United States Patent Application Publication US 2011/0183924 A1 - sequence listing, part 29

SEQ ID NO: 67741 - DNA, 490 bp, Homo sapiens
gggcgagggagagccaggaggcggaagttcccgcgggcggtggggacggcgccctcaccgcgagtcacttgtcagcccttgtctgaggcggaggcagccccgcgccgcgccggacccgagcatatttcattttctgtcattggactttgagccattagaaccatgagcaactacagtgtgtcactggttggcccagctccttggggtttccggctgcagggcggtaaggatttcaacatgcctctgacaatctctagtctaaaagatggcggcaaggcagcccaggcaaatgtaagaataggcgatgtggttctcagcattgatggaataaatgcacaaggaatgactcatcttgaagcccagaataagattaagggttgtacaggctctttgaatatgactctgcaaagttctggaggcaagtcccaaatcaaggtgctggcaggatcacattccctctaggagaatccttctttgcttcctccatctt

SEQ ID NO: 67742 - DNA, 722 bp, Homo sapiens
cggagtttcactgtgttagccaggatggtctcaatctcctgacctcatgatccgcccacctcagcctcccaaagtgctgggattacaggcgtgagccaccgtgccccgcctattttagatagatcttttaaaaacttgagaccgaatatacttgcaaagcaaactgtttatataaaaggaatattgaagattaatcatataaattataaataatttagtagaagatattttatccttttaatataactttacaatttttaattttttttttctccttaaccctagcccaccaagaaaacacattgtggagcgctatacagagttttatcatgtacccactcacagtgatgccagcaagaagagactgattgaggatactgaagactggcgtccaaggactggaacaactcagtctcgctctttccgaatccttgcccagatcactgggactgaacatttgaaagaatctgaagccgataatacaaagaaggcaaagtaagttctctatctttttgacaattgaatgttttcctttcacgaatggtctcaatttagtttttcaaattgtcaagtataatggtatggcatttcgtctttgcagctagaagctaagcatttaactttggtgccttttgtgtgacctaaatgtacaacttgcagattttaaaagtagtagatattgtctggattttaaggcttgttttccctagtattgaaataag

SEQ ID NO: 67743 - DNA, 6102 bp, Homo sapiens
gggcgagggagagccaggaggcggaagttcccgcgggcggtggggacggcgccctcaccgcgagtcacttgtcagcccttgtctgaggcggaggcagccccgcgccgcgccggacccgagcatatttcattttctgtcattggactttgagccattagaaccatgagcaactacagtgtgtcactggttggcccagctccttggggtttccggctgcagggcggtaaggatttcaacatgcctctgacaatctctagtctaaaagatggcggcaaggcagcccaggcaaatgtaagaataggcgatgtggttctcagcattgatggaataaatgcacaaggaatgactcatcttgaagcccagaataagattaagggttgtacaggctctttgaatatgactctgcaaagagcatctgctgcacccaagcctgagccggttcctgttcaaaagggagaacctaaagaagtagttaaacctgtgcccattacatctcctgctgtgtccaaagtcacttccacaaacaacatggcctacaataaggcaccacggccttttggttctgtgtcttcaccaaaagtcacatccatcccatcaccatcgtctgccttcaccccagcccatgcgaccacctcatcacatgcttccccttcacccgtggctgccgtcactcctcccctgttcgctgcatctggactgcatgctaatgccaatcttagtgctgaccagtctccatctgcactgagcgctggtaaaactgcagttaatgtcccacggcagcccacagtcaccagcgtgtgttccgagacttctcaggagctagcagagggacagagaagaggatcccagggtgacagtaaacagcaaaatggcccaccaagaaaacacattgtggagcgctatacagagttttatcatgtacccactcacagtgatgccagcaagaagagactgattgaggatactgaagactggcgtccaaggactggaacaactcagtctcgctctttccgaatccttgcccagatcactgggactgaacatttgaaagaatctgaagccgataatacaaagaaggcaaataactctcaggagccttctccgcagttggcttcctcggtagcttccacacggagcatgcccgagagcctggacagcccaacctctggcagaccaggggttaccagcctcacaactgcagctgccttcaagcctgtaggatccactggcgtcatcaagtcaccaagctggcaacggccaaaccaaggagtaccttccactggaagaatctcaaacagcgctacttactcaggatcagtggcaccagccaactcagctttgggacaaacccagccaagtgaccaggacactttagtgcaaagagctgagcacattccagcagggaaacgaactccgatgtgcgcccattgtaaccaggtcatcagaggaccattcttagtggcactggggaaatcttggcacccagaagaattcaactgcgctcactgcaaaaatacaatggcctacattggatttgtagaggagaaaggagccctgtattgtgagctgtgctatgagaaattctttgcccctgaatgtggtcgatgccaaaggaagatccttggagaagtcatcaatgcgttgaaacaaacttggcatgtttcctgttttgtgtgtgtagcctgtggaaagcccattcggaacaatgtttttcacttggaggatggtgaaccctactgtgagactgattattatgccctctttggtactatatgccatggatgtgaatttcccatagaagctggtgacatgttcctggaagctctgggctacacctggcatgacacttgctttgtatgctcagtgtgttgtgaaagtttggaaggtcagacctttttctccaagaaggacaagcccctgtgtaagaaacatgctcattctgtgaatttttgaaagtcaacagttcaggagaagagaaggaatttgaagagaaaaaggaaaattaaaattactaattaatttttagattcaatatttatatggagttttgaaaaataatagtggccctgaaggaataaattccagctttaaaaaccaagtctgaggaaatatttggcttcataaagtaaagagacggtttggcatttattattactttttcctgtattttatgcccataaaataagctttataaaaaccaatttcctgatggactattaaattcatcttagaataaattagtgaagaatttaattttagaataaataatccaatctgaaataattataccttctttccttgttaggtagttatgagtaaatctgcaaaaggcaatgaaaatgccttaaattttatcaataacagaattattgtatttaaaaaaaaactaatacttatctttaaaatagtaaataggattttaaacagagaattttatcagtaataggtgtcagtttttaaaaaattgcttgtaggctgagcgcggtggctcacgcctgtaatcccagcactttgggaggccaaggtgggtggaccacatgaggtcaggagtttgagatcagcctggccaacatggtgaaaccccatctctactaaaaatacaaaaattagccggacgcagtggcacgcgcctgtaatcccagctactcaagaggctgaggcacgagaatcacttgaacccgggagggagaggttgcagtgagccaagatcgtaccactgcactccagcctgggtgacagagtgagactccgtctccaaaaaaaaactttgcttgtatattatttttgccttacagtggatcattctagtaggaaaggacaataagattttttatcaaaatgtgtcatgccagtaagagatgttatattcttttctcatttcttccccacccaaaaataagctaccatatagcttataagtctcaaatttttgccttttactaaaatgtgattgtttctgttcattgtgtatgcttcatcacctatattaggcaaattccattttttcccttgcgctaaggtaaagatttaattaaataattttggcctctcatagttttctctctctttaaagagaataaatagagggccaggtgtggtggctcacgcctgtgatcccagcactttgggaggccaagacgggcggatcatgaggtcaagagatcaagatcatcctggccaacatggtgaaaccctgtctctactaaaaatacaaaaatgagctgggcatggtggggcgtgcctgtagtcccatgtacttgggaggctgaggcaggaaaattcttgaacccaggagacggaagttgcagtgagctgagatcacaccactgcactccagcctggtgacagagcaagactccggctcttaaaaaaaaaaaaaaaaaaaaaaaaagagagagagagaataaatagaaaagaatgtggctgggaattgtgaatcagaagattataccccccaattgtttttcaatccccttttctcaaataataaattagttaaatcagtttctgagttatgccactggctgatgaagagttgagaggtctctttgcagaatgatctttttgtttcgttttgtttcttcttctgcatttaaaaattaaaagattggtttgaggatgtgatgaaattgagactttttgtggttttctctcaataataagtgaaccaatttcaaatgtgatcacaaagtttggaaagcttttattcacagaggttgggtagtgttgggaggggagtttaattactcagattggcctgttatttgatttcctcctttgggaaaagaattatgtagataccacatggagacagggaaacaattgtggtaaaactgtggatcctgttgctatttgcccagtgagaaaacagattctggtatttgatttggtttttctctttgtttccagaatggatgaaagtccatgaacctcctaagttataatttaaatttgtttggggcaaggtgattttatagtcgagacagagccctaggtccttcctgccccatcactcacttacgacatcacttccattgtgtgcatgtttgttatagaggaggttttaggctacaatatttgtttaacctccctaagaactttcaaggcatctgtcctgaaagctgttaatttatggtctagcagatttatattatatgcagataataattaactggggataaaagaatggcaaggggtgacacaaagtagcaaactgaatacttctccaatagcaaccccaagctacctcctcaccctgcatcttggagggaggcaggaaatttcttttgaaataaagtgctggagctgaattctgcattatttatcgttgctgctgaaaccacctataaaagacttgctggctaatgtgcattgtcatataatgtacactgtcacatctttacagtcttgtatgttatagaatacaaaataagttgatggttttgtttggtgtgagctttttgtttgtttagttttgccttcataggttatatgccaagatagtatttgataagtcaatgacatttggatgttttcttcaaagaattttatttgacccagatttcttataaagttatcttacattaaggatgtcattttcatcagaccttctttctacatattattcatgaagcataatgttgcatttctccaaattttatgcctgaaagggtagtgttgcttcctaaggtatcatgttgtctttgtgctttgtccatctcttccgtggcgaagctttatatctgttcctaaaacagttaatcctgtgaaataaatattgaacataatccagaagaatctctctgtttcccttggggaatgccatatttaattcaccagcagtaatcctttaataactggcagagcactttattcttctggtgagctccctgaatatttatttttctgattataaattttctatattagtagcattttttaattattacttcttcactatagagcatttacttttagtctctagatgtatattttggaatgctgtacttggcataacatagattaaaatcataatgcatgactaaaaactccttggatttatttcccattttaaaatttttagcggtaagttcagatttataatctttctctagacttccatggtctgaatgttgcctgctgaagtagcaacctaaaaagtatcccctgcttatgcttctccagttggccctccatgtccataggcttcgcatctgtgattcagcccactgtgggtcaaaaatatttggggaaaaaaatggatggttgcgcctttgctgaacatgtacaaacttttttttgtcattaaacaatatagtataacaactatttacaaagcatttacattgtattagctattataggtaatctagagatgatttaaagtgtatggtaggatgtgcacaggttatatgcaaatactacaccattttctataagggacttgaacatcatggactttagtatcctagggggttcttggaacccatcacccataggggcaccataggacaactatagtaccgtgtttatttcctattaattcaggttccgtttagagtctaaaactaaaacctaatcatttagtcacagtgtaaaaacaaatggaaataacagctcaaatcttcaaaatattactatagcattatgtttaaaataatctacaacaaaaatgtaccattttcaagcagtactacattaggagcccttttatagaaaataatttcttctttacccccgttccagtgtgaatctagtattctgttaacatttgtgtggcatttggagtttgtcatccccattgaagggagagccttctcagacatgaagcaagggaaacatactgaatagttttacacaaatttgatctggcttccatttgtccccctcatttcccaaatgtttaaatgtattggatttggattctcaatgtataagttgccttatctgttaatgtctatcttctgtctctttaattttgtatatctgctgttttgcttttggatacattttctaattagaagtcacatgataaatataatcagtatagtaataataccataatgtgcacatactcaataaataaatgactgcattgttgta

SEQ ID NO: 67744 - DNA, 6051 bp, Homo sapiens
gggcgagggagagccaggaggcggaagttcccgcgggcggtggggacggcgccctcaccgcgagtcacttgtcagcccttgtctgaggcggaggcagccccgcgccgcgccggacccgagcatatttcattttctgtcattggactttgagccattagaaccatgagcaactacagtgtgtcactggttggcccagctccttggggtttccggctgcagggcggtaaggatttcaacatgcctctgacaatctctagtctaaaagatggcggcaaggcagcccaggcaaatgtaagaataggcgatgtggttctcagcattgatggaataaatgcacaaggaatgactcatcttgaagcccagaataagattaagggttgtacaggctctttgaatatgactctgcaaagagcatctgctgcacccaagcctgagccggttcctgttcaaaagggagaacctaaagaagtagttaaacctgtgcccattacatctcctgctgtgtccaaagtcacttccacaaacaacatggcctacaataaggcaccacggccttttggttctgtgtcttcaccaaaagtcacatccatcccatcaccatcgtctgccttcaccccagcccatgcgaccacctcatcacatgcttccccttcacccgtggctgccgtcactcctcccctgttcgctgcatctggactgcatgctaatgccaatcttagtgctgaccagtctccatctgcactgagcgctggtaaaactgcagttaatgtcccacggcagcccacagtcaccagcgtgtgttccgagacttctcaggagctagcagagggacagagaagaggatcccagggtgacagtaaacagcaaaatggcccaccaagaaaacacattgtggagcgctatacagagttttatcatgtacccactcacagtgatgccagcaagaagagactgattgaggatactgaagactggcgtccaaggactggaacaatgaaagaatctgaagccgataatacaaagaaggcaaataactctcaggagccttctccgcagttggcttcctcggtagcttccacacggagcatgcccgagagcctggacagcccaacctctggcagaccaggggttaccagcctcacaactgcagctgccttcaagcctgtaggatccactggcgtcatcaagtcaccaagctggcaacggccaaaccaaggagtaccttccactggaagaatctcaaacagcgctacttactcaggatcagtggcaccagccaactcagctttgggacaaacccagccaagtgaccaggacactttagtgcaaagagctgagcacattccagcagggaaacgaactccgatgtgcgcccattgtaaccaggtcatcagaggaccattcttagtggcactggggaaatcttggcacccagaagaattcaactgcgctcactgcaaaaatacaatggcctacattggatttgtagaggagaaaggagccctgtattgtgagctgtgctatgagaaattctttgcccctgaatgtggtcgatgccaaaggaagatccttggagaagtcatcaatgcgttgaaacaaacttggcatgtttcctgttttgtgtgtgtagcctgtggaaagcccattcggaacaatgtttttcacttggaggatggtgaaccctactgtgagactgattattatgccctctttggtactatatgccatggatgtgaatttcccatagaagctggtgacatgttcctggaagctctgggctacacctggcatgacacttgctttgtatgctcagtgtgttgtgaaagtttggaaggtcagacctttttctccaagaaggacaagcccctgtgtaagaaacatgctcattctgtgaatttttgaaagtcaacagttcaggagaagagaaggaatttgaagagaaaaaggaaaattaaaattactaattaatttttagattcaatatttatatggagttttgaaaaataatagtggccctgaaggaataaattccagctttaaaaaccaagtctgaggaaatatttggcttcataaagtaaagagacggtttggcatttattattactttttcctgtattttatgcccataaaataagctttataaaaaccaatttcctgatggactattaaattcatcttagaataaattagtgaagaatttaattttagaataaataatccaatctgaaataattataccttctttccttgttaggtagttatgagtaaatctgcaaaaggcaatgaaaatgccttaaattttatcaataacagaattattgtatttaaaaaaaaactaatacttatctttaaaatagtaaataggattttaaacagagaattttatcagtaataggtgtcagtttttaaaaaattgcttgtaggctgagcgcggtggctcacgcctgtaatcccagcactttgggaggccaaggtgggtggaccacatgaggtcaggagtttgagatcagcctggccaacatggtgaaaccccatctctactaaaaatacaaaaattagccggacgcagtggcacgcgcctgtaatcccagctactcaagaggctgaggcacgagaatcacttgaacccgggagggagaggttgcagtgagccaagatcgtaccactgcactccagcctgggtgacagagtgagactccgtctccaaaaaaaaactttgcttgtatattatttttgccttacagtggatcattctagtaggaaaggacaataagattttttatcaaaatgtgtcatgccagtaagagatgttatattcttttctcatttcttccccacccaaaaataagctaccatatagcttataagtctcaaatttttgccttttactaaaatgtgattgtttctgttcattgtgtatgcttcatcacctatattaggcaaattccattttttcccttgcgctaaggtaaagatttaattaaataattttggcctctcatagttttctctctctttaaagagaataaatagagggccaggtgtggtggctcacgcctgtgatcccagcactttgggaggccaagacgggcggatcatgaggtcaagagatcaagatcatcctggccaacatggtgaaaccctgtctctactaaaaatacaaaaatgagctgggcatggtggggcgtgcctgtagtcccatgtacttgggaggctgaggcaggaaaattcttgaacccaggagacggaagttgcagtgagctgagatcacaccactgcactccagcctggtgacagagcaagactccggctcttaaaaaaaaaaaaaaaaaaaaaaaaagagagagagagaataaatagaaaagaatgtggctgggaattgtgaatcagaagattataccccccaattgtttttcaatccccttttctcaaataataaattagttaaatcagtttctgagttatgccactggctgatgaagagttgagaggtctctttgcagaatgatctttttgtttcgttttgtttcttcttctgcatttaaaaattaaaagattggtttgaggatgtgatgaaattgagactttttgtggttttctctcaataataagtgaaccaatttcaaatgtgatcacaaagtttggaaagcttttattcacagaggttgggtagtgttgggaggggagtttaattactcagattggcctgttatttgatttcctcctttgggaaaagaattatgtagataccacatggagacagggaaacaattgtggtaaaactgtggatcctgttgctatttgcccagtgagaaaacagattctggtatttgatttggtttttctctttgtttccagaatggatgaaagtccatgaacctcctaagttataatttaaatttgtttggggcaaggtgattttatagtcgagacagagccctaggtccttcctgccccatcactcacttacgacatcacttccattgtgtgcatgtttgttatagaggaggttttaggctacaatatttgtttaacctccctaagaactttcaaggcatctgtcctgaaagctgttaatttatggtctagcagatttatattatatgcagataataattaactggggataaaagaatggcaaggggtgacacaaagtagcaaactgaatacttctccaatagcaaccccaagctacctcctcaccctgcatcttggagggaggcaggaaatttcttttgaaataaagtgctggagctgaattctgcattatttatcgttgctgctgaaaccacctataaaagacttgctggctaatgtgcattgtcatataatgtacactgtcacatctttacagtcttgtatgttatagaatacaaaataagttgatggttttgtttggtgtgagctttttgtttgtttagttttgccttcataggttatatgccaagatagtatttgataagtcaatgacatttggatgttttcttcaaagaattttatttgacccagatttcttataaagttatcttacattaaggatgtcattttcatcagaccttctttctacatattattcatgaagcataatgttgcatttctccaaattttatgcctgaaagggtagtgttgcttcctaaggtatcatgttgtctttgtgctttgtccatctcttccgtggcgaagctttatatctgttcctaaaacagttaatcctgtgaaataaatattgaacataatccagaagaatctctctgtttcccttggggaatgccatatttaattcaccagcagtaatcctttaataactggcagagcactttattcttctggtgagctccctgaatatttatttttctgattataaattttctatattagtagcattttttaattattacttcttcactatagagcatttacttttagtctctagatgtatattttggaatgctgtacttggcataacatagattaaaatcataatgcatgactaaaaactccttggatttatttcccattttaaaatttttagcggtaagttcagatttataatctttctctagacttccatggtctgaatgttgcctgctgaagtagcaacctaaaaagtatcccctgcttatgcttctccagttggccctccatgtccataggcttcgcatctgtgattcagcccactgtgggtcaaaaatatttggggaaaaaaatggatggttgcgcctttgctgaacatgtacaaacttttttttgtcattaaacaatatagtataacaactatttacaaagcatttacattgtattagctattataggtaatctagagatgatttaaagtgtatggtaggatgtgcacaggttatatgcaaatactacaccattttctataagggacttgaacatcatggactttagtatcctagggggttcttggaacccatcacccataggggcaccataggacaactatagtaccgtgtttatttcctattaattcaggttccgtttagagtctaaaactaaaacctaatcatttagtcacagtgtaaaaacaaatggaaataacagctcaaatcttcaaaatattactatagcattatgtttaaaataatctacaacaaaaatgtaccattttcaagcagtactacattaggagcccttttatagaaaataatttcttctttacccccgttccagtgtgaatctagtattctgttaacatttgtgtggcatttggagtttgtcatccccattgaagggagagccttctcagacatgaagcaagggaaacatactgaatagttttacacaaatttgatctggcttccatttgtccccctcatttcccaaatgtttaaatgtattggatttggattctcaatgtataagttgccttatctgttaatgtctatcttctgtctctttaattttgtatatctgctgttttgcttttggatacattttctaattagaagtcacatgataaatataatcagtatagtaataataccataatgtgcacatactcaataaataaatgactgcattgttgta

SEQ ID NO: 67745 - DNA, 5733 bp, Homo sapiens
gggcgagggagagccaggaggcggaagttcccgcgggcggtggggacggcgccctcaccgcgagtcacttgtcagcccttgtctgaggcggaggcagccccgcgccgcgccggacccgagcatatttcattttctgtcattggactttgagccattagaaccatgagcaactacagtgtgtcactggttggcccagctccttggggtttccggctgcagggcggtaaggatttcaacatgcctctgacaatctctagtctaaaagatggcggcaaggcagcccaggcaaatgtaagaataggcgatgtggttctcagcattgatggaataaatgcacaaggaatgactcatcttgaagcccagaataagattaagggttgtacaggctctttgaatatgactctgcaaagagcatctgctgcacccaagcctgagccggttcctgttcaaaagaaaacacaagtgacaaataaccctggcactgtgaaaatcccacctaaacgcccaccaagaaaacacattgtggagcgctatacagagttttatcatgtacccactcacagtgatgccagcaagaagagactgattgaggatactgaagactggcgtccaaggactggaacaactcagtctcgctctttccgaatccttgcccagatcactgggactgaacatttgaaagaatctgaagccgataatacaaagaaggcaaataactctcaggagccttctccgcagttggcttcctcggtagcttccacacggagcatgcccgagagcctggacagcccaacctctggcagaccaggggttaccagcctcacaactgcagctgccttcaagcctgtaggatccactggcgtcatcaagtcaccaagctggcaacggccaaaccaaggagtaccttccactggaagaatctcaaacagcgctacttactcaggatcagtggcaccagccaactcagctttgggacaaacccagccaagtgaccaggacactttagtgcaaagagctgagcacattccagcagggaaacgaactccgatgtgcgcccattgtaaccaggtcatcagaggaccattcttagtggcactggggaaatcttggcacccagaagaattcaactgcgctcactgcaaaaatacaatggcctacattggatttgtagaggagaaaggagccctgtattgtgagctgtgctatgagaaattctttgcccctgaatgtggtcgatgccaaaggaagatccttggagaagtcatcaatgcgttgaaacaaacttggcatgtttcctgttttgtgtgtgtagcctgtggaaagcccattcggaacaatgtttttcacttggaggatggtgaaccctactgtgagactgattattatgccctctttggtactatatgccatggatgtgaatttcccatagaagctggtgacatgttcctggaagctctgggctacacctggcatgacacttgctttgtatgctcagtgtgttgtgaaagtttggaaggtcagacctttttctccaagaaggacaagcccctgtgtaagaaacatgctcattctgtgaatttttgaaagtcaacagttcaggagaagagaaggaatttgaagagaaaaaggaaaattaaaattactaattaatttttagattcaatatttatatggagttttgaaaaataatagtggccctgaaggaataaattccagctttaaaaaccaagtctgaggaaatatttggcttcataaagtaaagagacggtttggcatttattattactttttcctgtattttatgcccataaaataagctttataaaaaccaatttcctgatggactattaaattcatcttagaataaattagtgaagaatttaattttagaataaataatccaatctgaaataattataccttctttccttgttaggtagttatgagtaaatctgcaaaaggcaatgaaaatgccttaaattttatcaataacagaattattgtatttaaaaaaaaactaatacttatctttaaaatagtaaataggattttaaacagagaattttatcagtaataggtgtcagtttttaaaaaattgcttgtaggctgagcgcggtggctcacgcctgtaatcccagcactttgggaggccaaggtgggtggaccacatgaggtcaggagtttgagatcagcctggccaacatggtgaaaccccatctctactaaaaatacaaaaattagccggacgcagtggcacgcgcctgtaatcccagctactcaagaggctgaggcacgagaatcacttgaacccgggagggagaggttgcagtgagccaagatcgtaccactgcactccagcctgggtgacagagtgagactccgtctccaaaaaaaaactttgcttgtatattatttttgccttacagtggatcattctagtaggaaaggacaataagattttttatcaaaatgtgtcatgccagtaagagatgttatattcttttctcatttcttccccacccaaaaataagctaccatatagcttataagtctcaaatttttgccttttactaaaatgtgattgtttctgttcattgtgtatgcttcatcacctatattaggcaaattccattttttcccttgcgctaaggtaaagatttaattaaataattttggcctctcatagttttctctctctttaaagagaataaatagagggccaggtgtggtggctcacgcctgtgatcccagcactttgggaggccaagacgggcggatcatgaggtcaagagatcaagatcatcctggccaacatggtgaaaccctgtctctactaaaaatacaaaaatgagctgggcatggtggggcgtgcctgtagtcccatgtacttgggaggctgaggcaggaaaattcttgaacccaggagacggaagttgcagtgagctgagatcacaccactgcactccagcctggtgacagagcaagactccggctcttaaaaaaaaaaaaaaaaaaaaaaaaagagagagagagaataaatagaaaagaatgtggctgggaattgtgaatcagaagattataccccccaattgtttttcaatccccttttctcaaataataaattagttaaatcagtttctgagttatgccactggctgatgaagagttgagaggtctctttgcagaatgatctttttgtttcgttttgtttcttcttctgcatttaaaaattaaaagattggtttgaggatgtgatgaaattgagactttttgtggttttctctcaataataagtgaaccaatttcaaatgtgatcacaaagtttggaaagcttttattcacagaggttgggtagtgttgggaggggagtttaattactcagattggcctgttatttgatttcctcctttgggaaaagaattatgtagataccacatggagacagggaaacaattgtggtaaaactgtggatcctgttgctatttgcccagtgagaaaacagattctggtatttgatttggtttttctctttgtttccagaatggatgaaagtccatgaacctcctaagttataatttaaatttgtttggggcaaggtgattttatagtcgagacagagccctaggtccttcctgccccatcactcacttacgacatcacttccattgtgtgcatgtttgttatagaggaggttttaggctacaatatttgtttaacctccctaagaactttcaaggcatctgtcctgaaagctgttaatttatggtctagcagatttatattatatgcagataataattaactggggataaaagaatggcaaggggtgacacaaagtagcaaactgaatacttctccaatagcaaccccaagctacctcctcaccctgcatcttggagggaggcaggaaatttcttttgaaataaagtgctggagctgaattctgcattatttatcgttgctgctgaaaccacctataaaagacttgctggctaatgtgcattgtcatataatgtacactgtcacatctttacagtcttgtatgttatagaatacaaaataagttgatggttttgtttggtgtgagctttttgtttgtttagttttgccttcataggttatatgccaagatagtatttgataagtcaatgacatttggatgttttcttcaaagaattttatttgacccagatttcttataaagttatcttacattaaggatgtcattttcatcagaccttctttctacatattattcatgaagcataatgttgcatttctccaaattttatgcctgaaagggtagtgttgcttcctaaggtatcatgttgtctttgtgctttgtccatctcttccgtggcgaagctttatatctgttcctaaaacagttaatcctgtgaaataaatattgaacataatccagaagaatctctctgtttcccttggggaatgccatatttaattcaccagcagtaatcctttaataactggcagagcactttattcttctggtgagctccctgaatatttatttttctgattataaattttctatattagtagcattttttaattattacttcttcactatagagcatttacttttagtctctagatgtatattttggaatgctgtacttggcataacatagattaaaatcataatgcatgactaaaaactccttggatttatttcccattttaaaatttttagcggtaagttcagatttataatctttctctagacttccatggtctgaatgttgcctgctgaagtagcaacctaaaaagtatcccctgcttatgcttctccagttggccctccatgtccataggcttcgcatctgtgattcagcccactgtgggtcaaaaatatttggggaaaaaaatggatggttgcgcctttgctgaacatgtacaaacttttttttgtcattaaacaatatagtataacaactatttacaaagcatttacattgtattagctattataggtaatctagagatgatttaaagtgtatggtaggatgtgcacaggttatatgcaaatactacaccattttctataagggacttgaacatcatggactttagtatcctagggggttcttggaacccatcacccataggggcaccataggacaactatagtaccgtgtttatttcctattaattcaggttccgtttagagtctaaaactaaaacctaatcatttagtcacagtgtaaaaacaaatggaaataacagctcaaatcttcaaaatattactatagcattatgtttaaaataatctacaacaaaaatgtaccattttcaagcagtactacattaggagcccttttatagaaaataatttcttctttacccccgttccagtgtgaatctagtattctgttaacatttgtgtggcatttggagtttgtcatccccattgaagggagagccttctcagacatgaagcaagggaaacatactgaatagttttacacaaatttgatctggcttccatttgtccccctcatttcccaaatgtttaaatgtattggatttggattctcaatgtataagttgccttatctgttaatgtctatcttctgtctctttaattttgtatatctgctgttttgcttttggatacattttctaattagaagtcacatgataaatataatcagtatagtaataataccataatgtgcacatactcaataaataaatgactgcattgttgta

SEQ ID NO: 67746 - DNA, 5775 bp, Homo sapiens
gggcgagggagagccaggaggcggaagttcccgcgggcggtggggacggcgccctcaccgcgagtcacttgtcagcccttgtctgaggcggaggcagccccgcgccgcgccggacccgagcatatttcattttctgtcattggactttgagccattagaaccatgagcaactacagtgtgtcactggttggcccagctccttggggtttccggctgcagggcggtaaggatttcaacatgcctctgacaatctctagtctaaaagatggcggcaaggcagcccaggcaaatgtaagaataggcgatgtggttctcagcattgatggaataaatgcacaaggaatgactcatcttgaagcccagaataagattaagggttgtacaggctctttgaatatgactctgcaaagagcatctgctgcacccaagcctgagccggttcctgttcaaaagcccacagtcaccagcgtgtgttccgagacttctcaggagctagcagagggacagagaagaggatcccagggtgacagtaaacagcaaaatggcccaccaagaaaacacattgtggagcgctatacagagttttatcatgtacccactcacagtgatgccagcaagaagagactgattgaggatactgaagactggcgtccaaggactggaacaactcagtctcgctctttccgaatccttgcccagatcactgggactgaacatttgaaagaatctgaagccgataatacaaagaaggcaaataactctcaggagccttctccgcagttggcttcctcggtagcttccacacggagcatgcccgagagcctggacagcccaacctctggcagaccaggggttaccagcctcacaactgcagctgccttcaagcctgtaggatccactggcgtcatcaagtcaccaagctggcaacggccaaaccaaggagtaccttccactggaagaatctcaaacagcgctacttactcaggatcagtggcaccagccaactcagctttgggacaaacccagccaagtgaccaggacactttagtgcaaagagctgagcacattccagcagggaaacgaactccgatgtgcgcccattgtaaccaggtcatcagaggaccattcttagtggcactggggaaatcttggcacccagaagaattcaactgcgctcactgcaaaaatacaatggcctacattggatttgtagaggagaaaggagccctgtattgtgagctgtgctatgagaaattctttgcccctgaatgtggtcgatgccaaaggaagatccttggagaagtcatcaatgcgttgaaacaaacttggcatgtttcctgttttgtgtgtgtagcctgtggaaagcccattcggaacaatgtttttcacttggaggatggtgaaccctactgtgagactgattattatgccctctttggtactatatgccatggatgtgaatttcccatagaagctggtgacatgttcctggaagctctgggctacacctggcatgacacttgctttgtatgctcagtgtgttgtgaaagtttggaaggtcagacctttttctccaagaaggacaagcccctgtgtaagaaacatgctcattctgtgaatttttgaaagtcaacagttcaggagaagagaaggaatttgaagagaaaaaggaaaattaaaattactaattaatttttagattcaatatttatatggagttttgaaaaataatagtggccctgaaggaataaattccagctttaaaaaccaagtctgaggaaatatttggcttcataaagtaaagagacggtttggcatttattattactttttcctgtattttatgcccataaaataagctttataaaaaccaatttcctgatggactattaaattcatcttagaataaattagtgaagaatttaattttagaataaataatccaatctgaaataattataccttctttccttgttaggtagttatgagtaaatctgcaaaaggcaatgaaaatgccttaaattttatcaataacagaattattgtatttaaaaaaaaactaatacttatctttaaaatagtaaataggattttaaacagagaattttatcagtaataggtgtcagtttttaaaaaattgcttgtaggctgagcgcggtggctcacgcctgtaatcccagcactttgggaggccaaggtgggtggaccacatgaggtcaggagtttgagatcagcctggccaacatggtgaaaccccatctctactaaaaatacaaaaattagccggacgcagtggcacgcgcctgtaatcccagctactcaagaggctgaggcacgagaatcacttgaacccgggagggagaggttgcagtgagccaagatcgtaccactgcactccagcctgggtgacagagtgagactccgtctccaaaaaaaaactttgcttgtatattatttttgccttacagtggatcattctagtaggaaaggacaataagattttttatcaaaatgtgtcatgccagtaagagatgttatattcttttctcatttcttccccacccaaaaataagctaccatatagcttataagtctcaaatttttgccttttactaaaatgtgattgtttctgttcattgtgtatgcttcatcacctatattaggcaaattccattttttcccttgcgctaaggtaaagatttaattaaataattttggcctctcatagttttctctctctttaaagagaataaatagagggccaggtgtggtggctcacgcctgtgatcccagcactttgggaggccaagacgggcggatcatgaggtcaagagatcaagatcatcctggccaacatggtgaaaccctgtctctactaaaaatacaaaaatgagctgggcatggtggggcgtgcctgtagtcccatgtacttgggaggctgaggcaggaaaattcttgaacccaggagacggaagttgcagtgagctgagatcacaccactgcactccagcctggtgacagagcaagactccggctcttaaaaaaaaaaaaaaaaaaaaaaaaagagagagagagaataaatagaaaagaatgtggctgggaattgtgaatcagaagattataccccccaattgtttttcaatccccttttctcaaataataaattagttaaatcagtttctgagttatgccactggctgatgaagagttgagaggtctctttgcagaatgatctttttgtttcgttttgtttcttcttctgcatttaaaaattaaaagattggtttgaggatgtgatgaaattgagactttttgtggttttctctcaataataagtgaaccaatttcaaatgtgatcacaaagtttggaaagcttttattcacagaggttgggtagtgttgggaggggagtttaattactcagattggcctgttatttgatttcctcctttgggaaaagaattatgtagataccacatggagacagggaaacaattgtggtaaaactgtggatcctgttgctatttgcccagtgagaaaacagattctggtatttgatttggtttttctctttgtttccagaatggatgaaagtccatgaacctcctaagttataatttaaatttgtttggggcaaggtgattttatagtcgagacagagccctaggtccttcctgccccatcactcacttacgacatcacttccattgtgtgcatgtttgttatagaggaggttttaggctacaatatttgtttaacctccctaagaactttcaaggcatctgtcctgaaagctgttaatttatggtctagcagatttatattatatgcagataataattaactggggataaaagaatggcaaggggtgacacaaagtagcaaactgaatacttctccaatagcaaccccaagctacctcctcaccctgcatcttggagggaggcaggaaatttcttttgaaataaagtgctggagctgaattctgcattatttatcgttgctgctgaaaccacctataaaagacttgctggctaatgtgcattgtcatataatgtacactgtcacatctttacagtcttgtatgttatagaatacaaaataagttgatggttttgtttggtgtgagctttttgtttgtttagttttgccttcataggttatatgccaagatagtatttgataagtcaatgacatttggatgttttcttcaaagaattttatttgacccagatttcttataaagttatcttacattaaggatgtcattttcatcagaccttctttctacatattattcatgaagcataatgttgcatttctccaaattttatgcctgaaagggtagtgttgcttcctaaggtatcatgttgtctttgtgctttgtccatctcttccgtggcgaagctttatatctgttcctaaaacagttaatcctgtgaaataaatattgaacataatccagaagaatctctctgtttcccttggggaatgccatatttaattcaccagcagtaatcctttaataactggcagagcactttattcttctggtgagctccctgaatatttatttttctgattataaattttctatattagtagcattttttaattattacttcttcactatagagcatttacttttagtctctagatgtatattttggaatgctgtacttggcataacatagattaaaatcataatgcatgactaaaaactccttggatttatttcccattttaaaatttttagcggtaagttcagatttataatctttctctagacttccatggtctgaatgttgcctgctgaagtagcaacctaaaaagtatcccctgcttatgcttctccagttggccctccatgtccataggcttcgcatctgtgattcagcccactgtgggtcaaaaatatttggggaaaaaaatggatggttgcgcctttgctgaacatgtacaaacttttttttgtcattaaacaatatagtataacaactatttacaaagcatttacattgtattagctattataggtaatctagagatgatttaaagtgtatggtaggatgtgcacaggttatatgcaaatactacaccattttctataagggacttgaacatcatggactttagtatcctagggggttcttggaacccatcacccataggggcaccataggacaactatagtaccgtgtttatttcctattaattcaggttccgtttagagtctaaaactaaaacctaatcatttagtcacagtgtaaaaacaaatggaaataacagctcaaatcttcaaaatattactatagcattatgtttaaaataatctacaacaaaaatgtaccattttcaagcagtactacattaggagcccttttatagaaaataatttcttctttacccccgttccagtgtgaatctagtattctgttaacatttgtgtggcatttggagtttgtcatccccattgaagggagagccttctcagacatgaagcaagggaaacatactgaatagttttacacaaatttgatctggcttccatttgtccccctcatttcccaaatgtttaaatgtattggatttggattctcaatgtataagttgccttatctgttaatgtctatcttctgtctctttaattttgtatatctgctgttttgcttttggatacattttctaattagaagtcacatgataaatataatcagtatagtaataataccataatgtgcacatactcaataaataaatgactgcattgttgta

SEQ ID NO: 67747 - DNA, 6255 bp, Homo sapiens
caaattctttaagattattaattagagtttgcacattcctgagttaggtgaaaattatcttattccctgtgttttttgtttttttaaacttaaagagttagaaatgtgctgctccttctgcgtgaaacaaatgattccactctggagagaaatgaaacatgtttgaaaaatgggactatgggctttgaaagatggaaagatgggctttggatattttaacataaaaaacacctcagttagcaatgttttgtttattgtagggtatttaaacatttttcctttggaatatgcctaggttgacactgatgaggggctttaggctttctgatagttttcctgctgtatttccgaaatattttgaaactactttcatttttatttttaaaaattatacctaatgtgtgcatctgtgttatgcatgttgggactagttagcatgcacgttatgctttatcagcccattgtttttatctggaaacatgatgtttgagctgctaacctgattgtgtttgtcttttaaaaaatcagctctgtgttcttttcggtgaaatatattttgcatgtgtttggtgtggttttgtgtatgtttatttttgttttacatagggagaacctaaagaagtagttaaacctgtgcccattacatctcctgctgtgtccaaagtcacttccacaaacaacatggcctacaataaggcaccacggccttttggttctgtgtcttcaccaaaagtcacatccatcccatcaccatcgtctgccttcaccccagcccatgcgaccacctcatcacatgcttccccttcacccgtggctgccgtcactcctcccctgttcgctgcatctggactgcatgctaatgccaatcttagtgctgaccagtctccatctgcactgagcgctggtaaaactgcagttaatgtcccacggcagcccacagtcaccagcgtgtgttccgagacttctcaggagctagcagagggacagagaagaggatcccagggtgacagtaaacagcaaaatggcccaccaagaaaacacattgtggagcgctatacagagttttatcatgtacccactcacagtgatgccagcaagaagagactgattgaggatactgaagactggcgtccaaggactggaacaactcagtctcgctctttccgaatccttgcccagatcactgggactgaacatttgaaagaatctgaagccgataatacaaagaaggcaaataactctcaggagccttctccgcagttggcttcctcggtagcttccacacggagcatgcccgagagcctggacagcccaacctctggcagaccaggggttaccagcctcacaactgcagctgccttcaagcctgtaggatccactggcgtcatcaagtcaccaagctggcaacggccaaaccaaggagtaccttccactggaagaatctcaaacagcgctacttactcaggatcagtggcaccagccaactcagctttgggacaaacccagccaagtgaccaggacactttagtgcaaagagctgagcacattccagcagggaaacgaactccgatgtgcgcccattgtaaccaggtcatcagaggaccattcttagtggcactggggaaatcttggcacccagaagaattcaactgcgctcactgcaaaaatacaatggcctacattggatttgtagaggagaaaggagccctgtattgtgagctgtgctatgagaaattctttgcccctgaatgtggtcgatgccaaaggaagatccttggagaagtcatcaatgcgttgaaacaaacttggcatgtttcctgttttgtgtgtgtagcctgtggaaagcccattcggaacaatgtttttcacttggaggatggtgaaccctactgtgagactgattattatgccctctttggtactatatgccatggatgtgaatttcccatagaagctggtgacatgttcctggaagctctgggctacacctggcatgacacttgctttgtatgctcagtgtgttgtgaaagtttggaaggtcagacctttttctccaagaaggacaagcccctgtgtaagaaacatgctcattctgtgaatttttgaaagtcaacagttcaggagaagagaaggaatttgaagagaaaaaggaaaattaaaattactaattaatttttagattcaatatttatatggagttttgaaaaataatagtggccctgaaggaataaattccagctttaaaaaccaagtctgaggaaatatttggcttcataaagtaaagagacggtttggcatttattattactttttcctgtattttatgcccataaaataagctttataaaaaccaatttcctgatggactattaaattcatcttagaataaattagtgaagaatttaattttagaataaataatccaatctgaaataattataccttctttccttgttaggtagttatgagtaaatctgcaaaaggcaatgaaaatgccttaaattttatcaataacagaattattgtatttaaaaaaaaactaatacttatctttaaaatagtaaataggattttaaacagagaattttatcagtaataggtgtcagtttttaaaaaattgcttgtaggctgagcgcggtggctcacgcctgtaatcccagcactttgggaggccaaggtgggtggaccacatgaggtcaggagtttgagatcagcctggccaacatggtgaaaccccatctctactaaaaatacaaaaattagccggacgcagtggcacgcgcctgtaatcccagctactcaagaggctgaggcacgagaatcacttgaacccgggagggagaggttgcagtgagccaagatcgtaccactgcactccagcctgggtgacagagtgagactccgtctccaaaaaaaaactttgcttgtatattatttttgccttacagtggatcattctagtaggaaaggacaataagattttttatcaaaatgtgtcatgccagtaagagatgttatattcttttctcatttcttccccacccaaaaataagctaccatatagcttataagtctcaaatttttgccttttactaaaatgtgattgtttctgttcattgtgtatgcttcatcacctatattaggcaaattccattttttcccttgcgctaaggtaaagatttaattaaataattttggcctctcatagttttctctctctttaaagagaataaatagagggccaggtgtggtggctcacgcctgtgatcccagcactttgggaggccaagacgggcggatcatgaggtcaagagatcaagatcatcctggccaacatggtgaaaccctgtctctactaaaaatacaaaaatgagctgggcatggtggggcgtgcctgtagtcccatgtacttgggaggctgaggcaggaaaattcttgaacccaggagacggaagttgcagtgagctgagatcacaccactgcactccagcctggtgacagagcaagactccggctcttaaaaaaaaaaaaaaaaaaaaaaaaagagagagagagaataaatagaaaagaatgtggctgggaattgtgaatcagaagattataccccccaattgtttttcaatccccttttctcaaataataaattagttaaatcagtttctgagttatgccactggctgatgaagagttgagaggtctctttgcagaatgatctttttgtttcgttttgtttcttcttctgcatttaaaaattaaaagattggtttgaggatgtgatgaaattgagactttttgtggttttctctcaataataagtgaaccaatttcaaatgtgatcacaaagtttggaaagcttttattcacagaggttgggtagtgttgggaggggagtttaattactcagattggcctgttatttgatttcctcctttgggaaaagaattatgtagataccacatggagacagggaaacaattgtggtaaaactgtggatcctgttgctatttgcccagtgagaaaacagattctggtatttgatttggtttttctctttgtttccagaatggatgaaagtccatgaacctcctaagttataatttaaatttgtttggggcaaggtgattttatagtcgagacagagccctaggtccttcctgccccatcactcacttacgacatcacttccattgtgtgcatgtttgttatagaggaggttttaggctacaatatttgtttaacctccctaagaactttcaaggcatctgtcctgaaagctgttaatttatggtctagcagatttatattatatgcagataataattaactggggataaaagaatggcaaggggtgacacaaagtagcaaactgaatacttctccaatagcaaccccaagctacctcctcaccctgcatcttggagggaggcaggaaatttcttttgaaataaagtgctggagctgaattctgcattatttatcgttgctgctgaaaccacctataaaagacttgctggctaatgtgcattgtcatataatgtacactgtcacatctttacagtcttgtatgttatagaatacaaaataagttgatggttttgtttggtgtgagctttttgtttgtttagttttgccttcataggttatatgccaagatagtatttgataagtcaatgacatttggatgttttcttcaaagaattttatttgacccagatttcttataaagttatcttacattaaggatgtcattttcatcagaccttctttctacatattattcatgaagcataatgttgcatttctccaaattttatgcctgaaagggtagtgttgcttcctaaggtatcatgttgtctttgtgctttgtccatctcttccgtggcgaagctttatatctgttcctaaaacagttaatcctgtgaaataaatattgaacataatccagaagaatctctctgtttcccttggggaatgccatatttaattcaccagcagtaatcctttaataactggcagagcactttattcttctggtgagctccctgaatatttatttttctgattataaattttctatattagtagcattttttaattattacttcttcactatagagcatttacttttagtctctagatgtatattttggaatgctgtacttggcataacatagattaaaatcataatgcatgactaaaaactccttggatttatttcccattttaaaatttttagcggtaagttcagatttataatctttctctagacttccatggtctgaatgttgcctgctgaagtagcaacctaaaaagtatcccctgcttatgcttctccagttggccctccatgtccataggcttcgcatctgtgattcagcccactgtgggtcaaaaatatttggggaaaaaaatggatggttgcgcctttgctgaacatgtacaaacttttttttgtcattaaacaatatagtataacaactatttacaaagcatttacattgtattagctattataggtaatctagagatgatttaaagtgtatggtaggatgtgcacaggttatatgcaaatactacaccattttctataagggacttgaacatcatggactttagtatcctagggggttcttggaacccatcacccataggggcaccataggacaactatagtaccgtgtttatttcctattaattcaggttccgtttagagtctaaaactaaaacctaatcatttagtcacagtgtaaaaacaaatggaaataacagctcaaatcttcaaaatattactatagcattatgtttaaaataatctacaacaaaaatgtaccattttcaagcagtactacattaggagcccttttatagaaaataatttcttctttacccccgttccagtgtgaatctagtattctgttaacatttgtgtggcatttggagtttgtcatccccattgaagggagagccttctcagacatgaagcaagggaaacatactgaatagttttacacaaatttgatctggcttccatttgtccccctcatttcccaaatgtttaaatgtattggatttggattctcaatgtataagttgccttatctgttaatgtctatcttctgtctctttaattttgtatatctgctgttttgcttttggatacattttctaattagaagtcacatgataaatataatcagtatagtaataataccataatgtgcacatactcaataaataaatgactgcattgttgta

SEQ ID NO: 67748 - DNA, 5640 bp, Homo sapiens
gggcgagggagagccaggaggcggaagttcccgcgggcggtggggacggcgccctcaccgcgagtcacttgtcagcccttgtctgaggcggaggcagccccgcgccgcgccggacccgagcatatttcattttctgtcattggactttgagccattagaaccatgagcaactacagtgtgtcactggttggcccagctccttggggtttccggctgcagggcggtaaggatttcaacatgcctctgacaatctctagtctaaaagatggcggcaaggcagcccaggcaaatgtaagaataggcgatgtggttctcagcattgatggaataaatgcacaaggaatgactcatcttgaagcccagaataagattaagggttgtacaggctctttgaatatgactctgcaaagcccaccaagaaaacacattgtggagcgctatacagagttttatcatgtacccactcacagtgatgccagcaagaagagactgattgaggatactgaagactggcgtccaaggactggaacaactcagtctcgctctttccgaatccttgcccagatcactgggactgaacatttgaaagaatctgaagccgataatacaaagaaggcaaataactctcaggagccttctccgcagttggcttcctcggtagcttccacacggagcatgcccgagagcctggacagcccaacctctggcagaccaggggttaccagcctcacaactgcagctgccttcaagcctgtaggatccactggcgtcatcaagtcaccaagctggcaacggccaaaccaaggagtaccttccactggaagaatctcaaacagcgctacttactcaggatcagtggcaccagccaactcagctttgggacaaacccagccaagtgaccaggacactttagtgcaaagagctgagcacattccagcagggaaacgaactccgatgtgcgcccattgtaaccaggtcatcagaggaccattcttagtggcactggggaaatcttggcacccagaagaattcaactgcgctcactgcaaaaatacaatggcctacattggatttgtagaggagaaaggagccctgtattgtgagctgtgctatgagaaattctttgcccctgaatgtggtcgatgccaaaggaagatccttggagaagtcatcaatgcgttgaaacaaacttggcatgtttcctgttttgtgtgtgtagcctgtggaaagcccattcggaacaatgtttttcacttggaggatggtgaaccctactgtgagactgattattatgccctctttggtactatatgccatggatgtgaatttcccatagaagctggtgacatgttcctggaagctctgggctacacctggcatgacacttgctttgtatgctcagtgtgttgtgaaagtttggaaggtcagacctttttctccaagaaggacaagcccctgtgtaagaaacatgctcattctgtgaatttttgaaagtcaacagttcaggagaagagaaggaatttgaagagaaaaaggaaaattaaaattactaattaatttttagattcaatatttatatggagttttgaaaaataatagtggccctgaaggaataaattccagctttaaaaaccaagtctgaggaaatatttggcttcataaagtaaagagacggtttggcatttattattactttttcctgtattttatgcccataaaataagctttataaaaaccaatttcctgatggactattaaattcatcttagaataaattagtgaagaatttaattttagaataaataatccaatctgaaataattataccttctttccttgttaggtagttatgagtaaatctgcaaaaggcaatgaaaatgccttaaattttatcaataacagaattattgtatttaaaaaaaaactaatacttatctttaaaatagtaaataggattttaaacagagaattttatcagtaataggtgtcagtttttaaaaaattgcttgtaggctgagcgcggtggctcacgcctgtaatcccagcactttgggaggccaaggtgggtggaccacatgaggtcaggagtttgagatcagcctggccaacatggtgaaaccccatctctactaaaaatacaaaaattagccggacgcagtggcacgcgcctgtaatcccagctactcaagaggctgaggcacgagaatcacttgaacccgggagggagaggttgcagtgagccaagatcgtaccactgcactccagcctgggtgacagagtgagactccgtctccaaaaaaaaactttgcttgtatattatttttgccttacagtggatcattctagtaggaaaggacaataagattttttatcaaaatgtgtcatgccagtaagagatgttatattcttttctcatttcttccccacccaaaaataagctaccatatagcttataagtctcaaatttttgccttttactaaaatgtgattgtttctgttcattgtgtatgcttcatcacctatattaggcaaattccattttttcccttgcgctaaggtaaagatttaattaaataattttggcctctcatagttttctctctctttaaagagaataaatagagggccaggtgtggtggctcacgcctgtgatcccagcactttgggaggccaagacgggcggatcatgaggtcaagagatcaagatcatcctggccaacatggtgaaaccctgtctctactaaaaatacaaaaatgagctgggcatggtggggcgtgcctgtagtcccatgtacttgggaggctgaggcaggaaaattcttgaacccaggagacggaagttgcagtgagctgagatcacaccactgcactccagcctggtgacagagcaagactccggctcttaaaaaaaaaaaaaaaaaaaaaaaaagagagagagagaataaatagaaaagaatgtggctgggaattgtgaatcagaagattataccccccaattgtttttcaatccccttttctcaaataataaattagttaaatcagtttctgagttatgccactggctgatgaagagttgagaggtctctttgcagaatgatctttttgtttcgttttgtttcttcttctgcatttaaaaattaaaagattggtttgaggatgtgatgaaattgagactttttgtggttttctctcaataataagtgaaccaatttcaaatgtgatcacaaagtttggaaagcttttattcacagaggttgggtagtgttgggaggggagtttaattactcagattggcctgttatttgatttcctcctttgggaaaagaattatgtagataccacatggagacagggaaacaattgtggtaaaactgtggatcctgttgctatttgcccagtgagaaaacagattctggtatttgatttggtttttctctttgtttccagaatggatgaaagtccatgaacctcctaagttataatttaaatttgtttggggcaaggtgattttatagtcgagacagagccctaggtccttcctgccccatcactcacttacgacatcacttccattgtgtgcatgtttgttatagaggaggttttaggctacaatatttgtttaacctccctaagaactttcaaggcatctgtcctgaaagctgttaatttatggtctagcagatttatattatatgcagataataattaactggggataaaagaatggcaaggggtgacacaaagtagcaaactgaatacttctccaatagcaaccccaagctacctcctcaccctgcatcttggagggaggcaggaaatttcttttgaaataaagtgctggagctgaattctgcattatttatcgttgctgctgaaaccacctataaaagacttgctggctaatgtgcattgtcatataatgtacactgtcacatctttacagtcttgtatgttatagaatacaaaataagttgatggttttgtttggtgtgagctttttgtttgtttagttttgccttcataggttatatgccaagatagtatttgataagtcaatgacatttggatgttttcttcaaagaattttatttgacccagatttcttataaagttatcttacattaaggatgtcattttcatcagaccttctttctacatattattcatgaagcataatgttgcatttctccaaattttatgcctgaaagggtagtgttgcttcctaaggtatcatgttgtctttgtgctttgtccatctcttccgtggcgaagctttatatctgttcctaaaacagttaatcctgtgaaataaatattgaacataatccagaagaatctctctgtttcccttggggaatgccatatttaattcaccagcagtaatcctttaataactggcagagcactttattcttctggtgagctccctgaatatttatttttctgattataaattttctatattagtagcattttttaattattacttcttcactatagagcatttacttttagtctctagatgtatattttggaatgctgtacttggcataacatagattaaaatcataatgcatgactaaaaactccttggatttatttcccattttaaaatttttagcggtaagttcagatttataatctttctctagacttccatggtctgaatgttgcctgctgaagtagcaacctaaaaagtatcccctgcttatgcttctccagttggccctccatgtccataggcttcgcatctgtgattcagcccactgtgggtcaaaaatatttggggaaaaaaatggatggttgcgcctttgctgaacatgtacaaacttttttttgtcattaaacaatatagtataacaactatttacaaagcatttacattgtattagctattataggtaatctagagatgatttaaagtgtatggtaggatgtgcacaggttatatgcaaatactacaccattttctataagggacttgaacatcatggactttagtatcctagggggttcttggaacccatcacccataggggcaccataggacaactatagtaccgtgtttatttcctattaattcaggttccgtttagagtctaaaactaaaacctaatcatttagtcacagtgtaaaaacaaatggaaataacagctcaaatcttcaaaatattactatagcattatgtttaaaataatctacaacaaaaatgtaccattttcaagcagtactacattaggagcccttttatagaaaataatttcttctttacccccgttccagtgtgaatctagtattctgttaacatttgtgtggcatttggagtttgtcatccccattgaagggagagccttctcagacatgaagcaagggaaacatactgaatagttttacacaaatttgatctggcttccatttgtccccctcatttcccaaatgtttaaatgtattggatttggattctcaatgtataagttgccttatctgttaatgtctatcttctgtctctttaattttgtatatctgctgttttgcttttggatacattttctaattagaagtcacatgataaatataatcagtatagtaataataccataatgtgcacatactcaataaataaatgactgcattgttgta

SEQ ID NO: 67749 - DNA, 4882 bp, Homo sapiens
cctttcttgaaggaatcccttaagtgcacgtctcccgttttcttttcacatcaatgcagagtccctctgtgaatttacaacacccaacacccatgagttcagtccttaagaaggaaaattgagcaagtatttaattggttggacattgcataaaagaggtccatatccaggctaactctagaaattttattctcaaacttagttggcctctttttcttctgtcagaggaccattcttagtggcactggggaaatcttggcacccagaagaattcaactgcgctcactgcaaaaatacaatggcctacattggatttgtagaggagaaaggagccctgtattgtgagctgtgctatgagaaattctttgcccctgaatgtggtcgatgccaaaggaagatccttggagaagtcatcaatgcgttgaaacaaacttggcatgtttcctgttttgtgtgtgtagcctgtggaaagcccattcggaacaatgtttttcacttggaggatggtgaaccctactgtgagactgattattatgccctctttggtactatatgccatggatgtgaatttcccatagaagctggtgacatgttcctggaagctctgggctacacctggcatgacacttgctttgtatgctcagtgtgttgtgaaagtttggaaggtcagacctttttctccaagaaggacaagcccctgtgtaagaaacatgctcattctgtgaatttttgaaagtcaacagttcaggagaagagaaggaatttgaagagaaaaaggaaaattaaaattactaattaatttttagattcaatatttatatggagttttgaaaaataatagtggccctgaaggaataaattccagctttaaaaaccaagtctgaggaaatatttggcttcataaagtaaagagacggtttggcatttattattactttttcctgtattttatgcccataaaataagctttataaaaaccaatttcctgatggactattaaattcatcttagaataaattagtgaagaatttaattttagaataaataatccaatctgaaataattataccttctttccttgttaggtagttatgagtaaatctgcaaaaggcaatgaaaatgccttaaattttatcaataacagaattattgtatttaaaaaaaaactaatacttatctttaaaatagtaaataggattttaaacagagaattttatcagtaataggtgtcagtttttaaaaaattgcttgtaggctgagcgcggtggctcacgcctgtaatcccagcactttgggaggccaaggtgggtggaccacatgaggtcaggagtttgagatcagcctggccaacatggtgaaaccccatctctactaaaaatacaaaaattagccggacgcagtggcacgcgcctgtaatcccagctactcaagaggctgaggcacgagaatcacttgaacccgggagggagaggttgcagtgagccaagatcgtaccactgcactccagcctgggtgacagagtgagactccgtctccaaaaaaaaactttgcttgtatattatttttgccttacagtggatcattctagtaggaaaggacaataagattttttatcaaaatgtgtcatgccagtaagagatgttatattcttttctcatttcttccccacccaaaaataagctaccatatagcttataagtctcaaatttttgccttttactaaaatgtgattgtttctgttcattgtgtatgcttcatcacctatattaggcaaattccattttttcccttgcgctaaggtaaagatttaattaaataattttggcctctcatagttttctctctctttaaagagaataaatagagggccaggtgtggtggctcacgcctgtgatcccagcactttgggaggccaagacgggcggatcatgaggtcaagagatcaagatcatcctggccaacatggtgaaaccctgtctctactaaaaatacaaaaatgagctgggcatggtggggcgtgcctgtagtcccatgtacttgggaggctgaggcaggaaaattcttgaacccaggagacggaagttgcagtgagctgagatcacaccactgcactccagcctggtgacagagcaagactccggctcttaaaaaaaaaaaaaaaaaaaaaaaaagagagagagagaataaatagaaaagaatgtggctgggaattgtgaatcagaagattataccccccaattgtttttcaatccccttttctcaaataataaattagttaaatcagtttctgagttatgccactggctgatgaagagttgagaggtctctttgcagaatgatctttttgtttcgttttgtttcttcttctgcatttaaaaattaaaagattggtttgaggatgtgatgaaattgagactttttgtggttttctctcaataataagtgaaccaatttcaaatgtgatcacaaagtttggaaagcttttattcacagaggttgggtagtgttgggaggggagtttaattactcagattggcctgttatttgatttcctcctttgggaaaagaattatgtagataccacatggagacagggaaacaattgtggtaaaactgtggatcctgttgctatttgcccagtgagaaaacagattctggtatttgatttggtttttctctttgtttccagaatggatgaaagtccatgaacctcctaagttataatttaaatttgtttggggcaaggtgattttatagtcgagacagagccctaggtccttcctgccccatcactcacttacgacatcacttccattgtgtgcatgtttgttatagaggaggttttaggctacaatatttgtttaacctccctaagaactttcaaggcatctgtcctgaaagctgttaatttatggtctagcagatttatattatatgcagataataattaactggggataaaagaatggcaaggggtgacacaaagtagcaaactgaatacttctccaatagcaaccccaagctacctcctcaccctgcatcttggagggaggcaggaaatttcttttgaaataaagtgctggagctgaattctgcattatttatcgttgctgctgaaaccacctataaaagacttgctggctaatgtgcattgtcatataatgtacactgtcacatctttacagtcttgtatgttatagaatacaaaataagttgatggttttgtttggtgtgagctttttgtttgtttagttttgccttcataggttatatgccaagatagtatttgataagtcaatgacatttggatgttttcttcaaagaattttatttgacccagatttcttataaagttatcttacattaaggatgtcattttcatcagaccttctttctacatattattcatgaagcataatgttgcatttctccaaattttatgcctgaaagggtagtgttgcttcctaaggtatcatgttgtctttgtgctttgtccatctcttccgtggcgaagctttatatctgttcctaaaacagttaatcctgtgaaataaatattgaacataatccagaagaatctctctgtttcccttggggaatgccatatttaattcaccagcagtaatcctttaataactggcagagcactttattcttctggtgagctccctgaatatttatttttctgattataaattttctatattagtagcattttttaattattacttcttcactatagagcatttacttttagtctctagatgtatattttggaatgctgtacttggcataacatagattaaaatcataatgcatgactaaaaactccttggatttatttcccattttaaaatttttagcggtaagttcagatttataatctttctctagacttccatggtctgaatgttgcctgctgaagtagcaacctaaaaagtatcccctgcttatgcttctccagttggccctccatgtccataggcttcgcatctgtgattcagcccactgtgggtcaaaaatatttggggaaaaaaatggatggttgcgcctttgctgaacatgtacaaacttttttttgtcattaaacaatatagtataacaactatttacaaagcatttacattgtattagctattataggtaatctagagatgatttaaagtgtatggtaggatgtgcacaggttatatgcaaatactacaccattttctataagggacttgaacatcatggactttagtatcctagggggttcttggaacccatcacccataggggcaccataggacaactatagtaccgtgtttatttcctattaattcaggttccgtttagagtctaaaactaaaacctaatcatttagtcacagtgtaaaaacaaatggaaataacagctcaaatcttcaaaatattactatagcattatgtttaaaataatctacaacaaaaatgtaccattttcaagcagtactacattaggagcccttttatagaaaataatttcttctttacccccgttccagtgtgaatctagtattctgttaacatttgtgtggcatttggagtttgtcatccccattgaagggagagccttctcagacatgaagcaagggaaacatactgaatagttttacacaaatttgatctggcttccatttgtccccctcatttcccaaatgtttaaatgtattggatttggattctcaatgtataagttgccttatctgttaatgtctatcttctgtctctttaattttgtatatctgctgttttgcttttggatacattttctaattagaagtcacatgataaatataatcagtatagtaataataccataatgtgcacatactcaataaataaatgactgcattgttgta

SEQ ID NO: 67750 - DNA, 5032 bp, Homo sapiens
gggcgagggagagccaggaggcggaagttcccgcgggcggtggggacggcgccctcaccgcgagtcacttgtcagcccttgtctgaggcggaggcagccccgcgccgcgccggacccgagcatatttcattttctgtcattggactttgagccattagaaccatgagcaactacagtgtgtcactggttggcccagctccttggggtttccggctgcagggcggtaaggatttcaacatgcctctgacaatctctagtctaaaagatggcggcaaggcagcccaggcaaatgtaagaataggcgatgtggttctcagcattgatggaataaatgcacaaggaatgactcatcttgaagcccagaataagattaagggttgtacaggctctttgaatatgactctgcaaagagcatctgctgcacccaagcctgagccggttcctgttcaaaagggagaacctaaagaagtagttaaacctgtgcccattacatctcctgctgtgtccaaagtcacttccacaaacaacatggcctacaataaggcaccacggccttttggttctgtgtcttcaccaaaagtcacatccatcccatcaccatcgtctgccttcaccccagcccatgcgaccacctcatcacatgcttccccttcacccgtggctgccgtcactcctcccctgttcgctgcatctggactgcatgctaatgccaatcttagtgctgaccagtctccatctgcactgagcgctggtaaaactgcagttaatgtcccacggcagcccacagtcaccagcgtgtgttccgagacttctcaggagctagcagagggacagagaagaggatcccagggtgacagtaaacagcaaaatggcccaccaagaaaacacattgtggagcgctatacagagttttatcatgtacccactcacagtgatgccagcaagaagagactgattgaggatactgaagactggcgtccaaggactggaacaactcagtctcgctctttccgaatccttgcccagatcactgggactgaacatttgaaagaatctgaagccgataatacaaagaaggcaaataactctcaggagccttctccgcagttggcttcctcggtagcttccacacggagcatgcccgagagcctggacagcccaacctctggcagaccaggggttaccagcctcacaactgcagctgccttcaagcctgtaggatccactggcgtcatcaagtcaccaagctggcaacggccaaaccaaggagtaccttccactggaagaatctcaaacagcgctacttactcaggatcagtggcaccagccaactcagctttgggacaaacccagccaagtgaccaggacactttagtgcaaagagctgagcacattccagcagggaaacgaactccgatgtgcgcccattgtaaccaggtcatcagaggaccattcttagtggcactggggaaatcttggcacccagaagaattcaactgcgctcactgcaaaaatacaatggcctacattggatttgtagaggagaaaggagccctgtattgtgagctgtgctatgagaaattctttgcccctgaatgtggtcgatgccaaaggaagatccttggagaagtcatcaatgcgttgaaacaaacttggcatgtttcctgttttgtgtgtgtagcctgtggaaagcccattcggaacaatgtttttcacttggaggatggtgaaccctactgtgagactgattattatgccctctttggtactatatgccatggatgtgaatttcccatagaagctggtgacatgttcctggaagctctgggctacacctggcatgacacttgctttgtatgctcagtgtgttgtgaaagtttggaaggtcagacctttttctccaagaaggacaagcccctgtgtaagaaacatgctcattctgtgaatttttgaaagtcaacagttcaggagaagagaaggaatttgaagagaaaaaggaaaattaaaattactaattaatttttagattcaatatttatatggagttttgaaaaataatagtggccctgaaggaataaattccagctttaaaaaccaagtctgaggaaatatttggcttcataaagtaaagagacggtttggcatttattattactttttcctgtattttatgcccataaaataagctttataaaaaccaatttcctgatggactattaaattcatcttagaataaattagtgaagaatttaattttagaataaataatccaatctgaaataattataccttctttccttgttaggtagttatgagtaaatctgcaaaaggcaatgaaaatgccttaaattttatcaataacagaattattgtatttaaaaaaaaactaatacttatctttaaaatagtaaataggattttaaacagagaattttatcagtaataggtgtcagtttttaaaaaattgcttgtaggctgagcgcggtggctcacgcctgtaatcccagcactttgggaggccaaggtgggtggaccacatgaggtcaggagtttgagatcagcctggccaacatggtgaaaccccatctctactaaaaatacaaaaattagccggacgcagtggcacgcgcctgtaatcccagctactcaagaggctgaggcacgagaatcacttgaacccgggagggagaggttgcagtgagccaagatcgtaccactgcactccagcctgggtgacagagtgagactccgtctccaaaaaaaaactttgcttgtatattatttttgccttacagtggatcattctagtaggaaaggacaataagattttttatcaaaatgtgtcatgccagtaagagatgttatattcttttctcatttcttccccacccaaaaataagctaccatatagcttataagtctcaaatttttgccttttactaaaatgtgattgtttctgttcattgtgtatgcttcatcacctatattaggcaaattccattttttcccttgcgctaaggtaaagatttaattaaataattttggcctctcatagttttctctctctttaaagagaataaatagagggccaggtgtggtggctcacgcctgtgatcccagcactttgggaggccaagacgggcggatcatgaggtcaagagatcaagatcatcctggccaacatggtgaaaccctgtctctactaaaaatacaaaaatgagctgggcatggtggggcgtgcctgtagtcccatgtacttgggaggctgaggcaggaaaattcttgaacccaggagacggaagttgcagtgagctgagatcacaccactgcactccagcctggtgacagagcaagactccggctcttaaaaaaaaaaaaaaaaaaaaaaaaagagagagagagaataaatagaaaagaatgtggctgggaattgtgaatcagaagattataccccccaattgtttttcaatccccttttctcaaataataaattagttaaatcagtttctgagttatgccactggctgatgaagagttgagaggtctctttgcagaatgatctttttgtttcgttttgtttcttcttctgcatttaaaaattaaaagattggtttgaggatgtgatgaaattgagactttttgtggttttctctcaataataagtgaaccaatttcaaatgtgatcacaaagtttggaaagcttttattcacagaggttgggtagtgttgggaggggagtttaattactcagattggcctgttatttgatttcctcctttgggaaaagaattatgtagataccacatggagacagggaaacaattgtggtaaaactgtggatcctgttgctatttgcccagtgagaaaacagattctggtatttgatttggtttttctctttgtttccagaatggatgaaagtccatgaacctcctaagttataatttaaatttgtttggggcaaggtgattttatagtcgagacagagccctaggtccttcctgccccatcactcacttacgacatcacttccattgtgtgcatgtttgttatagaggaggttttaggctacaatatttgtttaacctccctaagaactttcaaggcatctgtcctgaaagctgttaatttatggtctagcagatttatattatatgcagataataattaactggggataaaagaatggcaaggggtgacacaaagtagcaaactgaatacttctccaatagcaaccccaagctacctcctcaccctgcatcttggagggaggcaggaaatttcttttgaaataaagtgctggagctgaattctgcattatttatcgttgctgctgaaaccacctataaaagacttgctggctaatgtgcattgtcatataatgtacactgtcacatctttacagtcttgtatgttatagaatacaaaataagttgatggttttgtttggtgtgagctttttgtttgtttagttttgccttcataggttatatgccaagatagtatttgataagtcaatgacatttggatgttttcttcaaagaattttatttgacccagatttcttataaagttatcttacattaaggatgtcattttcatcagaccttctttctacatattattcatgaagcataatgttgcatttctccaaattttatgcctgaaagggtagtgttgcttcctaaggtatcatgttgtctttgtgctttgtccatctcttccgtggcgaagctttatatctgttcctaaaacagttaatcctgtgaaataaatattgaacataatccagaagaatctctctgtttcccttggggaatgccatatttaattcaccagcagtaatcctttaataactggcagagcactttattcttctggtgagctccctgaatatttatttttctgattataaattttctatattagtagcattttttaattattacttcttcactatagagcatttacttttagtctctagatgtatattttggaatactactgtcatcggggacctcagaacactaca

SEQ ID NO: 67751 - DNA, 2895 bp, Homo sapiens
ctcccttccacagcactaccccacctctgtgaataaaagctttcccaactttgtgatcacaattgaaaatgggtcacttattattgagagaaaaccaccaaaagtctcaaattcatcacatcctctgacccatcttttaatttttaaatgcagaagaagaaaccaaacggaaccaaaaaaaaaagagagagagagaataaatagaaaagaatgtggctgggaattgtgaatcagaagattataccccccaattgtttttcaatccccttttctcaaataataaattagttaaatcagtttctgagttatgccactggctgatgaagagttgagaggtctctttgcagaatgatctttttgtttcgttttgtttcttcttctgcatttaaaaattaaaagattggtttgaggatgtgatgaaattgagactttttgtggttttctctcaataataagtgaaccaatttcaaatgtgatcacaaagtttggaaagcttttattcacagaggttgggtagtgttgggaggggagtttaattactcagattggcctgttatttgatttcctcctttgggaaaagaattatgtagataccacatggagacagggaaacaattgtggtaaaactgtggatcctgttgctatttgcccagtgagaaaacagattctggtatttgatttggtttttctctttgtttccagaatggatgaaagtccatgaacctcctaagttataatttaaatttgtttggggcaaggtgattttatagtcgagacagagccctaggtccttcctgccccatcactcacttacgacatcacttccattgtgtgcatgtttgttatagaggaggttttaggctacaatatttgtttaacctccctaagaactttcaaggcatctgtcctgaaagctgttaatttatggtctagcagatttatattatatgcagataataattaactggggataaaagaatggcaaggggtgacacaaagtagcaaactgaatacttctccaatagcaaccccaagctacctcctcaccctgcatcttggagggaggcaggaaatttcttttgaaataaagtgctggagctgaattctgcattatttatcgttgctgctgaaaccacctataaaagacttgctggctaatgtgcattgtcatataatgtacactgtcacatctttacagtcttgtatgttatagaatacaaaataagttgatggttttgtttggtgtgagctttttgtttgtttagttttgccttcataggttatatgccaagatagtatttgataagtcaatgacatttggatgttttcttcaaagaattttatttgacccagatttcttataaagttatcttacattaaggatgtcattttcatcagaccttctttctacatattattcatgaagcataatgttgcatttctccaaattttatgcctgaaagggtagtgttgcttcctaaggtatcatgttgtctttgtgctttgtccatctcttccgtggcgaagctttatatctgttcctaaaacagttaatcctgtgaaataaatattgaacataatccagaagaatctctctgtttcccttggggaatgccatatttaattcaccagcagtaatcctttaataactggcagagcactttattcttctggtgagctccctgaatatttatttttctgattataaattttctatattagtagcattttttaattattacttcttcactatagagcatttacttttagtctctagatgtatattttggaatgctgtacttggcataacatagattaaaatcataatgcatgactaaaaactccttggatttatttcccattttaaaatttttagcggtaagttcagatttataatctttctctagacttccatggtctgaatgttgcctgctgaagtagcaacctaaaaagtatcccctgcttatgcttctccagttggccctccatgtccataggcttcgcatctgtgattcagcccactgtgggtcaaaaatatttggggaaaaaaatggatggttgcgcctttgctgaacatgtacaaacttttttttgtcattaaacaatatagtataacaactatttacaaagcatttacattgtattagctattataggtaatctagagatgatttaaagtgtatggtaggatgtgcacaggttatatgcaaatactacaccattttctataagggacttgaacatcatggactttagtatcctagggggttcttggaacccatcacccataggggcaccataggacaactatagtaccgtgtttatttcctattaattcaggttccgtttagagtctaaaactaaaacctaatcatttagtcacagtgtaaaaacaaatggaaataacagctcaaatcttcaaaatattactatagcattatgtttaaaataatctacaacaaaaatgtaccattttcaagcagtactacattaggagcccttttatagaaaataatttcttctttacccccgttccagtgtgaatctagtattctgttaacatttgtgtggcatttggagtttgtcatccccattgaagggagagccttctcagacatgaagcaagggaaacatactgaatagttttacacaaatttgatctggcttccatttgtccccctcatttcccaaatgtttaaatgtattggatttggattctcaatgtataagttgccttatctgttaatgtctatcttctgtctctttaattttgtatatctgctgttttgcttttggatacattttctaattagaagtcacatgataaatataatcagtatagtaataataccataatgtgcacatactcaataaataaatgactgcattgttgta

SEQ ID NO: 67752 - DNA, 2099 bp, Homo sapiens
aaagatagaatcgagtcggtaccgaattccattgtgtgcatgtttgttatagaggaggttttaggctacaatatttgtttaacctccctaagaactttcaaggcatctgtcctgaaagctgttaatttatggtctagcagatttatattatatgcagataataattaactggggataaaagaatggcaaggggtgacacaaagtagcaaactgaatacttctccaatagcaaccccaagctacctcctcaccctgcatcttggagggaggcaggaaatttcttttgaaataaagtgctggagctgaattctgcattatttatcgttgctgctgaaaccacctataaaagacttgctggctaatgtgcattgtcatataatgtacactgtcacatctttacagtcttgtatgttatagaatacaaaataagttgatggttttgtttggtgtgagctttttgtttgtttagttttgccttcataggttatatgccaagatagtatttgataagtcaatgacatttggatgttttcttcaaagaattttatttgacccagatttcttataaagttatcttacattaaggatgtcattttcatcagaccttctttctacatattattcatgaagcataatgttgcatttctccaaattttatgcctgaaagggtagtgttgcttcctaaggtatcatgttgtctttgtgctttgtccatctcttccgtggcgaagctttatatctgttcctaaaacagttaatcctgtgaaataaatattgaacataatccagaagaatctctctgtttcccttggggaatgccatatttaattcaccagcagtaatcctttaataactggcagagcactttattcttctggtgagctccctgaatatttatttttctgattataaattttctatattagtagcattttttaattattacttcttcactatagagcatttacttttagtctctagatgtatattttggaatgctgtacttggcataacatagattaaaatcataatgcatgactaaaaactccttggatttatttcccattttaaaatttttagcggtaagttcagatttataatctttctctagacttccatggtctgaatgttgcctgctgaagtagcaacctaaaaagtatcccctgcttatgcttctccagttggccctccatgtccataggcttcgcatctgtgattcagcccactgtgggtcaaaaatatttggggaaaaaaatggatggttgcgcctttgctgaacatgtacaaacttttttttgtcattaaacaatatagtataacaactatttacaaagcatttacattgtattagctattataggtaatctagagatgatttaaagtgtatggtaggatgtgcacaggttatatgcaaatactacaccattttctataagggacttgaacatcatggactttagtatcctagggggttcttggaacccatcacccataggggcaccataggacaactatagtaccgtgtttatttcctattaattcaggttccgtttagagtctaaaactaaaacctaatcatttagtcacagtgtaaaaacaaatggaaataacagctcaaatcttcaaaatattactatagcattatgtttaaaataatctacaacaaaaatgtaccattttcaagcagtactacattaggagcccttttatagaaaataatttcttctttacccccgttccagtgtgaatctagtattctgttaacatttgtgtggcatttggagtttgtcatccccattgaagggagagccttctcagacatgaagcaagggaaacatactgaatagttttacacaaatttgatctggcttccatttgtccccctcatttcccaaatgtttaaatgtattggatttggattctcaatgtataagttgccttatctgttaatgtctatcttctgtctctttaattttgtatatctgctgttttgcttttggatacattttctaattagaagtcacatgataaatataatcagtatagtaataataccataatgtgcacatactcaataaataaatgactgcattgttgta

SEQ ID NO: 67753 - DNA, 2341 bp, Homo sapiens
gggcgagggagagccaggaggcggaagttcccgcgggcggtggggacggcgccctcaccgcgagtcacttgtcagcccttgtctgaggcggaggcagccccgcgccgcgccggacccgagcatatttcattttctgtcattggactttgagccattagaaccatgagcaactacagtgtgtcactggttggcccagctccttggggtttccggctgcagggcggtaaggatttcaacatgcctctgacaatctctagtctaaaagatggcggcaaggcagcccaggcaaatgtaagaataggcgatgtggttctcagcattgatggaataaatgcacaaggaatgactcatcttgaagcccagaataagattaagggttgtacaggctctttgaatatgactctgcaaagagcatctgctgcacccaagcctgagccggttcctgttcaaaagggagaacctaaagaagtagttaaacctgtgcccattacatctcctgctgtgtccaaagtcacttccacaaacaacatggcctacaataaggcaccacggccttttggttctgtgtcttcaccaaaagtcacatccatcccatcaccatcgtctgccttcaccccagcccatgcgaccacctcatcacatgcttccccttcacccgtggctgccgtcactcctcccctgttcgctgcatctggactgcatgctaatgccaatcttagtgctgaccagtctccatctgcactgagcgctggtaaaactgcagttaatgtcccacggcagcccacagtcaccagcgtgtgttccgagacttctcaggagctagcagagggacagagaagaggatcccagggtgacagtaaacagcaaaatgggaaaatcccacctaaacgcccaccaagaaaacacattgtggagcgctatacagagttttatcatgtacccactcacagtgatgccagcaagaagagactgattgaggatactgaagactggcgtccaaggactggaacaactcagtctcgctctttccgaatccttgcccagatcactgggactgaacatttgaaagaatctgaagccgataatacaaagaaggcaaaggaaaagataccccttcacgtctttagtcccaaatacacaaaattacgtgactggcaccatgaagtttcagcacgtgctcttaacgtacagtgatttatgagccttgccccccaagcagccagcacataccttttcatttactttttttttttcaacttcatagcaaaatctgtattaaatttgccttatgaaaaaatagaactttttctatacttttctaacaatttcctattgttgtgagaaaaggaagatgaacatgttttgtgctagttggtagctcacaaatgtaaaaccaaaaaaaaaaaaaattgagaaatttaggggacctagatctattgggggattggtatctgtttttgttgtgattagggtagtaatctgggaaaacgaattattttcataagttgaatttggttagttggttggttgaagcagaggataatgagcaaataaagtccttgtctaatttggaaaatactttctttatattattaacatctcccaagattactttttaagttcattattatgttacattcaaagttgattgtaaattattctaaataagtaaatataaggaggcaagaataaacaaagactttattaaagaagagtgcgtgcattgtagatttaggtatcttttaaagtaggtactattcaggatggctctatgaagaggaggaggtccagatttggctcctgaaaaaggaaagaagagaattttacccctatttgcaatggagaaatacagtattctttggtttggttggatttgcaaatcctatttcctatcaaaggaaatatctctagtggatatttttagaatatagacaatttctaggtattaactaataagatatggaaaagatagctttgctttttttaatcagaagaacataaaataaattacaatatgaatgattgtgagacatcagagaaatattttacttagtgacgtaaactactgtgcactgctgctattcctaggaagctgtgttttgggcaatacatggaagctaaatatatgaccagaaatgctttctgccttgtaatatagtgtattatatattagagctaaatttagtaataaatgcattttgaagtttggaaaagtattgtaataaagttgcctttaacttagctttgtacttgttctgtttccttgaggctagacacagtgccatccaggacttattacagtataactgggtaaaataaacaattctctgacaaaaaaaat

SEQ ID NO: 67754 - DNA, 2096 bp, Homo sapiens
gggcgagggagagccaggaggcggaagttcccgcgggcggtggggacggcgccctcaccgcgagtcacttgtcagcccttgtctgaggcggaggcagccccgcgccgcgccggacccgagcatatttcattttctgtcattggactttgagccattagaaccatgagcaactacagtgtgtcactggttggcccagctccttggggtttccggctgcagggcggtaaggatttcaacatgcctctgacaatctctagtctaaaagatggcggcaaggcagcccaggcaaatgtaagaataggcgatgtggttctcagcattgatggaataaatgcacaaggaatgactcatcttgaagcccagaataagattaagggttgtacaggctctttgaatatgactctgcaaagagcatctgctgcacccaagcctgagccggttcctgttcaaaagggagaacctaaagaagtagttaaacctgtgcccattacatctcctgctgtgtccaaagtcacttccacaaacaacatggcctacaataaggcaccacggccttttggttctgtgtcttcaccaaaagtcacatccatcccatcaccatcgtctgccttcaccccagcccatgcgaccacctcatcacatgcttccccttcacccgtggctgccgtcactcctcccctgttcgctgcatctggactgcatgctaatgccaatcttagtgctgaccagtctccatctgcactgagcgctggtaaaactgcagttaatgtcccacggcagcccacagtcaccagcgtgtgttccgagacttctcaggagctagcagagggacagagaagaggatcccagggtgacagtaaacagcaaaatggcccaccaagaaaacacattgtggagcgctatacagagttttatcatgtacccactcacagtgatgccagcaagaagagactgattgaggatactgaagactggcgtccaaggactggaacaactcagtctcgctctttccgaatccttgcccagatcactgggactgaacatttgaaagaatctgaagccgataatacaaagaaggcaaataactctcaggagccttctccgcagttggcttcctcggtagcttccacacggagcatgcccgagagcctggacagcccaacctctggcagaccaggggttaccagcctcacaactgcagctgccttcaagcctgtaggatccactggcgtcatcaagtcaccaagctggcaacggccaaaccaaggagtaccttccactggaagaatctcaaacagcgctacttactcaggatcagtggcaccagccaactcagctttgggacaaacccagccaagtgaccaggacactttagtgcaaagagctgagcacattccagcagggaaacgaactccgatgtgcgcccattgtaaccaggtcatcagaggaccattcttagtggcactggggaaatcttggcacccagaagaattcaactgcgctcactgcaaaaatacaatggcctacattggatttgtagaggagaaaggagccctgtattgtgagctgtgctatgagaaattctttgcccctgaatgtggtcgatgccaaaggaagatccttggagaagtcatcaatgcgttgaaacaaacttggcatgtttcctgttttgtgtgtgtagcctgtggaaagcccattcggaacaatgtttttcacttggaggatggtgaaccctactgtgagactgattattatgccctctttggtactatatgccatggatgtgaatttcccatagaagctggtgacatgttcctggaagctctgggctacacctggcatgacacttgctttgtatgctcagtgtgttgtgaaagtttggaaggtcagacctttttctccaagaaggacaagcccctgtgtaagaaacatgctcattctgtgaatttttgaaagtcaacagttcaggagaagagaaggaatttgaagagaaaaaggaaaattaaaattactaattaatttttagattcaatatttatatggagttttgaaaaataatagtggccctgaaggaataaattccagctttaaaaacc

SEQ ID NO: 67755 - DNA, 2014 bp, Homo sapiens
gggcgagggagagccaggaggcggaagttcccgcgggcggtggggacggcgccctcaccgcgagtcacttgtcagcccttgtctgaggcggaggcagccccgcgccgcgccggacccgagcatatttcattttctgtcattggactttgagccattagaaccatgagcaactacagtgtgtcactggttggcccagctccttggggtttccggctgcagggcggtaaggatttcaacatgcctctgacaatctctagtctaaaagatggcggcaaggcagcccaggcaaatgtaagaataggcgatgtggttctcagcattgatggaataaatgcacaaggaatgactcatcttgaagcccagaataagattaagggttgtacaggctctttgaatatgactctgcaaagagcatctgctgcacccaagcctgagccggttcctgttcaaaagcccacagtcaccagcgtgtgttccgagacttctcaggagctagcagagggacagagaagaggatcccagggtgacagtaaacagcaaaatgggaaaatcccacctaaacgcccaccaagaaaacacattgtggagcgctatacagagttttatcatgtacccactcacagtgatgccagcaagaagagactgattgaggatactgaagactggcgtccaaggactggaacaactcagtctcgctctttccgaatccttgcccagatcactgggactgaacatttgaaagaatctgaagccgataatacaaagaaggcaaaggaaaagataccccttcacgtctttagtcccaaatacacaaaattacgtgactggcaccatgaagtttcagcacgtgctcttaacgtacagtgatttatgagccttgccccccaagcagccagcacataccttttcatttactttttttttttcaacttcatagcaaaatctgtattaaatttgccttatgaaaaaatagaactttttctatacttttctaacaatttcctattgttgtgagaaaaggaagatgaacatgttttgtgctagttggtagctcacaaatgtaaaaccaaaaaaaaaaaaaattgagaaatttaggggacctagatctattgggggattggtatctgtttttgttgtgattagggtagtaatctgggaaaacgaattattttcataagttgaatttggttagttggttggttgaagcagaggataatgagcaaataaagtccttgtctaatttggaaaatactttctttatattattaacatctcccaagattactttttaagttcattattatgttacattcaaagttgattgtaaattattctaaataagtaaatataaggaggcaagaataaacaaagactttattaaagaagagtgcgtgcattgtagatttaggtatcttttaaagtaggtactattcaggatggctctatgaagaggaggaggtccagatttggctcctgaaaaaggaaagaagagaattttacccctatttgcaatggagaaatacagtattctttggtttggttggatttgcaaatcctatttcctatcaaaggaaatatctctagtggatatttttagaatatagacaatttctaggtattaactaataagatatggaaaagatagctttgctttttttaatcagaagaacataaaataaattacaatatgaatgattgtgagacatcagagaaatattttacttagtgacgtaaactactgtgcactgctgctattcctaggaagctgtgttttgggcaatacatggaagctaaatatatgaccagaaatgctttctgccttgtaatatagtgtattatatattagagctaaatttagtaataaatgcattttgaagtttggaaaagtattgtaataaagttgcctttaacttagctttgtacttgttctgtttccttgaggctagacacagtgccatccaggacttattacagtataactgggtaaaataaacaattctctgacaaaaaaaat

SEQ ID NO: 67756 - DNA, 1954 bp, Homo sapiens
gggcgagggagagccaggaggcggaagttcccgcgggcggtggggacggcgccctcaccgcgagtcacttgtcagcccttgtctgaggcggaggcagccccgcgccgcgccggacccgagcatatttcattttctgtcattggactttgagccattagaaccatgagcaactacagtgtgtcactggttggcccagctccttggggtttccggctgcagggcggtaaggatttcaacatgcctctgacaatctctagtctaaaagatggcggcaaggcagcccaggcaaatgtaagaataggcgatgtggttctcagcattgatggaataaatgcacaaggaatgactcatcttgaagcccagaataagattaagggttgtacaggctctttgaatatgactctgcaaagagcatctgctgcacccaagcctgagccggttcctgttcaaaagaaaacacaagtgacaaataaccctggcactgtgaaaatcccacctaaacgcccaccaagaaaacacattgtggagcgctatacagagttttatcatgtacccactcacagtgatgccagcaagaagagactgattgaggatactgaagactggcgtccaaggactggaacaactcagtctcgctctttccgaatccttgcccagatcactgggactgaacatttgaaagaatctgaagccgataatacaaagaaggcaaaggaaaagataccccttcacgtctttagtcccaaatacacaaaattacgtgactggcaccatgaagtttcagcacgtgctcttaacgtacagtgatttatgagccttgccccccaagcagccagcacataccttttcatttactttttttttttcaacttcatagcaaaatctgtattaaatttgccttatgaaaaaatagaactttttctatacttttctaacaatttcctattgttgtgagaaaaggaagatgaacatgttttgtgctagttggtagctcacaaatgtaaaaccaaaaaaaaaaaaaattgagaaatttaggggacctagatctattgggggattggtatctgtttttgttgtgattagggtagtaatctgggaaaacgaattattttcataagttgaatttggttagttggttggttgaagcagaggataatgagcaaataaagtccttgtctaatttggaaaatactttctttatattattaacatctcccaagattactttttaagttcattattatgttacattcaaagttgattgtaaattattctaaataagtaaatataaggaggcaagaataaacaaagactttattaaagaagagtgcgtgcattgtagatttaggtatcttttaaagtaggtactattcaggatggctctatgaagaggaggaggtccagatttggctcctgaaaaaggaaagaagagaattttacccctatttgcaatggagaaatacagtattctttggtttggttggatttgcaaatcctatttcctatcaaaggaaatatctctagtggatatttttagaatatagacaatttctaggtattaactaataagatatggaaaagatagctttgctttttttaatcagaagaacataaaataaattacaatatgaatgattgtgagacatcagagaaatattttacttagtgacgtaaactactgtgcactgctgctattcctaggaagctgtgttttgggcaatacatggaagctaaatatatgaccagaaatgctttctgccttgtaatatagtgtattatatattagagctaaatttagtaataaatgcattttgaagtttggaaaagtattgtaataaagttgcctttaacttagctttgtacttgttctgtttccttgaggctagacacagtgccatccaggacttattacagtataactgggtaaaataaacaattctctgacaaaaaaaat

SEQ ID NO: 67757 - DNA, 1959 bp, Homo sapiens
gggcgagggagagccaggaggcggaagttcccgcgggcggtggggacggcgccctcaccgcgagtcacttgtcagcccttgtctgaggcggaggcagccccgcgccgcgccggacccgagcatatttcattttctgtcattggactttgagccattagaaccatgagcaactacagtgtgtcactggttggcccagctccttggggtttccggctgcagggcggtaaggatttcaacatgcctctgacaatctctagtctaaaagatggcggcaaggcagcccaggcaaatgtaagaataggcgatgtggttctcagcattgatggaataaatgcacaaggaatgactcatcttgaagcccagaataagattaagggttgtacaggctctttgaatatgactctgcaaagaggaaccatcttgtgcacccaaagcctgagccggttcctgttcaaaagaaaacacaagtgacaaataaccctggcactgtgaaaatcccacctaaacgcccaccaagaaaacacattgtggagcgctatacagagttttatcatgtacccactcacagtgatgccagcaagaagagactgattgaggatactgaagactggcgtccaaggactggaacaactcagtctcgctctttccgaatccttgcccagatcactgggactgaacatttgaaagaatctgaagccgataatacaaagaaggcaaaggaaaagataccccttcacgtctttagtcccaaatacacaaaattacgtgactggcaccatgaagtttcagcacgtgctcttaacgtacagtgatttatgagccttgccccccaagcagccagcacataccttttcatttactttttttttttcaacttcatagcaaaatctgtattaaatttgccttatgaaaaaatagaactttttctatacttttctaacaatttcctattgttgtgagaaaaggaagatgaacatgttttgtgctagttggtagctcacaaatgtaaaaccaaaaaaaaaaaaaattgagaaatttaggggacctagatctattgggggattggtatctgtttttgttgtgattagggtagtaatctgggaaaacgaattattttcataagttgaatttggttagttggttggttgaagcagaggataatgagcaaataaagtccttgtctaatttggaaaatactttctttatattattaacatctcccaagattactttttaagttcattattatgttacattcaaagttgattgtaaattattctaaataagtaaatataaggaggcaagaataaacaaagactttattaaagaagagtgcgtgcattgtagatttaggtatcttttaaagtaggtactattcaggatggctctatgaagaggaggaggtccagatttggctcctgaaaaaggaaagaagagaattttacccctatttgcaatggagaaatacagtattctttggtttggttggatttgcaaatcctatttcctatcaaaggaaatatctctagtggatatttttagaatatagacaatttctaggtattaactaataagatatggaaaagatagctttgctttttttaatcagaagaacataaaataaattacaatatgaatgattgtgagacatcagagaaatattttacttagtgacgtaaactactgtgcactgctgctattcctaggaagctgtgttttgggcaatacatggaagctaaatatatgaccagaaatgctttctgccttgtaatatagtgtattatatattagagctaaatttagtaataaatgcattttgaagtttggaaaagtattgtaataaagttgcctttaacttagctttgtacttgttctgtttccttgaggctagacacagtgccatccaggacttattacagtataactgggtaaaataaacaattctctgacaaaaaaaat

SEQ ID NO: 67758 - DNA, 1939 bp, Homo sapiens
gggcgagggagagccaggaggcggaagttcccgcgggcggtggggacggcgccctcaccgcgagtcacttgtcagcccttgtctgaggcggaggcagccccgcgccgcgccggacccgagcatatttcattttctgtcattggactttgagccattagaaccatgagcaactacagtgtgtcactggttggcccagctccttggggtttccggctgcagggcggtaaggatttcaacatgcctctgacaatctctagtctaaaagatggcggcaaggcagcccaggcaaatgtaagaataggcgatgtggttctcagcattgatggaataaatgcacaaggaatgactcatcttgaagcccagaataagattaagggttgtacaggctctttgaatatgactctgcaaagagcatctgctgcacccaagcctgagccggttcctgttcaaaagaaaacacaagtgacaaagaaaatcccacctaaacgcccaccaagaaaacacattgtggagcgctatacagagttttatcatgtacccactcacagtgatgccagcaagaagagactgattgaggatactgaagactggcgtccaaggactggaacaactcagtctcgctctttccgaatccttgcccagatcactgggactgaacatttgaaagaatctgaagccgataatacaaagaaggcaaaggaaaagataccccttcacgtctttagtcccaaatacacaaaattacgtgactggcaccatgaagtttcagcacgtgctcttaacgtacagtgatttatgagccttgccccccaagcagccagcacataccttttcatttactttttttttttcaacttcatagcaaaatctgtattaaatttgccttatgaaaaaatagaactttttctatacttttctaacaatttcctattgttgtgagaaaaggaagatgaacatgttttgtgctagttggtagctcacaaatgtaaaaccaaaaaaaaaaaaaattgagaaatttaggggacctagatctattgggggattggtatctgtttttgttgtgattagggtagtaatctgggaaaacgaattattttcataagttgaatttggttagttggttggttgaagcagaggataatgagcaaataaagtccttgtctaatttggaaaatactttctttatattattaacatctcccaagattactttttaagttcattattatgttacattcaaagttgattgtaaattattctaaataagtaaatataaggaggcaagaataaacaaagactttattaaagaagagtgcgtgcattgtagatttaggtatcttttaaagtaggtactattcaggatggctctatgaagaggaggaggtccagatttggctcctgaaaaaggaaagaagagaattttacccctatttgcaatggagaaatacagtattctttggtttggttggatttgcaaatcctatttcctatcaaaggaaatatctctagtggatatttttagaatatagacaatttctaggtattaactaataagatatggaaaagatagctttgctttttttaatcagaagaacataaaataaattacaatatgaatgattgtgagacatcagagaaatattttacttagtgacgtaaactactgtgcactgctgctattcctaggaagctgtgttttgggcaatacatggaagctaaatatatgaccagaaatgctttctgccttgtaatatagtgtattatatattagagctaaatttagtaataaatgcattttgaagtttggaaaagtattgtaataaagttgcctttaacttagctttgtacttgttctgtttccttgaggctagacacagtgccatccaggacttattacagtataactgggtaaaataaacaattctctgacaaaaaaaat

SEQ ID NO: 67759 - DNA, 2097 bp, Homo sapiens
  misc_feature (1462)..(1462): n is a, c, g, or t
  misc_feature (1466)..(1467): n is a, c, g, or t
  misc_feature (1477)..(1477): n is a, c, g, or t
  misc_feature (1480)..(1480): n is a, c, g, or t
  misc_feature (1489)..(1489): n is a, c, g, or t
  misc_feature (1500)..(1500): n is a, c, g, or t
  misc_feature (1503)..(1503): n is a, c, g, or t
gggcgagggagagccaggaggcggaagttcccgcgggcggtggggacggcgccctcaccgcgagtcacttgtcagcccttgtctgaggcggaggcagccccgcgccgcgccggacccgagcatatttcattttctgtcattggactttgagccattagaaccatgagcaactacagtgtgtcactggttggcccagctccttggggtttccggctgcagggcggtaaggatttcaacatgcctctgacaatctctagtctaaaagatggcggcaaggcagcccaggcaaatgtaagaataggcgatgtggttctcagcattgatggaataaatgcacaaggaatgactcatcttgaagcccagaataagattaagggttgtacaggctctttgaatatgactctgcaaagagcatctgctgcacccaagcctgagccggttcctgttcaaaagggagaacctaaagaagtagttaaacctgtgcccattacatctcctgctgtgtccaaagtcacttccacaaacaacatggcctacaataaggcaccacggccttttggttctgtgtcttcaccaaaagtcacatccatcccatcaccatcgtctgccttcaccccagcccatgcgaccacctcatcacatgcttccccttcacccgtggctgccgtcactcctcccctgttcgctgcatctggactgcatgctaatgccaatcttagtgctgaccagtctccatctgcactgagcgctggtaaaactgcagttaatgtcccacggcagcccacagtcaccagcgtgtgttccgagacttctcaggagctagcagagggacagagaagaggatcccagggtgacagtaaacagcaaaatgggaaaatcccacctaaacgcccaccaagaaaacacattgtggagcgctatacagagttttatcatgtacccactcacagtgatgccagcaagaagagactgattgaggatactgaagactggcgtccaaggactggaacaactcagtctcgctctttccgaatccttgcccagatcactgggactgaacatttgaaagaatctgaagccgataatacaaagaaggcaaaggaaaagataccccttcacgtctttagtcccaaatacacaaaattacgtgactggcaccatgaagtttcagcacgtgctcttaacgtacagtgatttatgagccttgccccccaagcagccagcacataccttttcatttactttttttttttcaacttcatagcaaaatctgtattaaatttgccttatgaaaaaatagaactttttctatacttttctaacaatttcctattgttgtgagaaaaggaagatgaacatgttttgtgctagttggtagctcacaaatgtaaaaccaaaaaaaaaaaaaattgagaaatttaggggacctagatctattgggggattggtatctgtttttggntggnngaataagggnagnataatcttntgggaaaaagngantttattttcccaataaggttgggaaatttggcgtatagtgggttgggtttgaaagccagaggatattatgttgagcaaaattaaaggctcccttggtcataatttggggaaaattacgtttcttttattatttattgaacattcttcccaaagattaactttgttaagaggttccatcttactatattggtacattccaagggtggatgtgtgtaaaatttattcttaaattaaggtaaattattagggagggcaaggaaattaacgcaaggaattttatttaataggaagaggtgtgtgcttgggaaaagattaagggtactcctttaaaagggagggtacaattccagggagtggctctatgacagaagggaggggagggcccaagattgcgcctcggaacaagggacaagaagagcaattataacccctatgtgtcatggggaacaatacaggaatcctgggtggggggttgggccaaatcctatttcctatacaggaaatattctgcggattttctagacacttttgacattctggtttacttatagaattggacagaaactctggttttatcgacagaacttaatactc

SEQ ID NO: 67760 - DNA, 491 bp, Homo sapiens
gaaaccctggctcacatctcgggtctataactagagcaccctgtgctggctacaacaaaaatgtaccattttcaagcagtactacattaggagcccttttatagaaaataatttcttctttacccccgttccagtgtgaatctagtattctgttaacatttgtgtggcatttggagtttgtcatccccattgaagggagagccttctcagacatgaagcaagggaaacatactgaatagttttacacaaatttgatctggcttccatttgtccccctcatttcccaaatgtttaaatgtattggatttggattctcaatgtataagttgccttatctgttaatgtctatcttctgtctctttaattttgtatatctgctgttttgcttttggatacattttctaattagaagtcacatgataaatataatcagtatagtaataataccataatgtgcacatactcaataaataaatgactgcattgttgta

SEQ ID NO: 67761 - DNA, 1904 bp, Homo sapiens
gggcgagggagagccaggaggcggaagttcccgcgggcggtggggacggcgccctcaccgcgagtcacttgtcagcccttgtctgaggcggaggcagccccgcgccgcgccggacccgagcatatttcattttctgtcattggactttgagccattagaaccatgagcaactacagtgtgtcactggttggcccagctccttggggtttccggctgcagggcggtaaggatttcaacatgcctctgacaatctctagtctaaaagatggcggcaaggcagcccaggcaaatgtaagaataggcgatgtggttctcagcattgatggaataaatgcacaaggaatgactcatcttgaagcccagaataagattaagggttgtacaggctctttgaatatgactctgcaaagagcatctgctgcacccaagcctgagccggttcctgttcaaaagggagaacctaaagaagtagttaaacctgtgcccattacatctcctgctgtgtccaaagtcacttccacaaacaacatggcctacaataaggcaccacggccttttggttctgtgtcttcaccaaaagtcacatccatcccatcaccatcgtctgccttcaccccagcccatgcgaccacctcatcacatgcttccccttcacccgtggctgccgtcactcctcccctgttcgctgcatctggactgcatgctaatgccaatcttagtgctgaccagtctccatctgcactgagcgctggtaaaactgcagttaatgtcccacggcagcccacagtcaccagcgtgtgttccgagacttctcaggagctagcagagggacagagaagaggatcccagggtgacagtaaacagcaaaatggcccaccaagaaaacacattgtggagcgctatacagagttttatcatgtacccactcacagtgatgccagcaagaagagactgattgaggatactgaagactggcgtccaaggactggaacaactcagtctcgctctttccgaatccttgcccagatcactgggactgaacatttgaaagaatctgaagccgataatacaaagaaggcaaataactctcaggagccttctccgcagttggcttcctcggtagcttccacacggagcatgcccgagagcctggacagcccaacctctggcagaccaggggttaccagcctcacaactgcagctgccttcaagcctgtaggatccactggcgtcatcaagtcaccaagctggcaacggccaaaccaaggagtaccttccactggaagaatctcaaacagcgctacttactcaggatcagtggcaccagccaactcagctttgggacaaacccagccaagtgaccaggacactttagtgcaaagagctgagcacattccagcagggaaacgaactccgatgtgcgcccattgtaaccaggtcatcagaggaccattcttagtggcactggggaaatcttggcacccagaagaattcaactgcgctcactgcaaaaatacaatggcctacattggatttgtagaggagaaaggagccctgtattgtgagctgtgctatgagaaattctttgcccctgaatgtggtcgatgccaaaggaagatccttggagaagtcatcaatgcgttgaaacaaacttggcatgtttcctgttttgtgtgtgtagcctgtggaaagcccattcggaacaatgtttttcacttggaggatggtgaaccctactgtgagactgactatatgccatggatgtgaatttcccatagaagctggtgacatgttcctggaagctctgggctacacctggcatgacacttgctttgtatgctcaggggcttgtccttcttggagaaaaaggtctgaccttccaaactttcacaacacacgtcgac

SEQ ID NO: 67762 - DNA, 1364 bp, Homo sapiens
  misc_feature (1072)..(1072): n is a, c, g, or t
  misc_feature (1101)..(1101): n is a, c, g, or t
gggcgagggagagccaggaggcggaagttcccgcgggcggtggggacggcgccctcaccgcgagtcacttgtcagcccttgtctgaggcggaggcagccccgcgccgcgccggacccgagcatatttcattttctgtcattggactttgagccattagaaccatgagcaactacagtgtgtcactggttggcccagctccttggggtttccggctgcagggcggtaaggatttcaacatgcctctgacaatctctagtctaaaagatggcggcaaggcagcccaggcaaatgtaagaataggcgatgtggttctcagcattgatggaataaatgcacaaggaatgactcatcttgaagcccagaataagattaagggttgtacaggctctttgaatatgactctgcaaagagcatctgctgcacccaagcctgagccggttcctgttcaaaagaaaacacaagtgacaaagaaaatcccacctaaacgcccaccaagaaaacacattgtggagcgctatacagagttttatcatgtacccactcacagtgatgccagcaagaagagactgattgaggatactgaagactggcgtccaaggactggaacaactcagtctcgctctttccgaatccttgcccagatcactgggactgaacatttgaaagaatctgaagccgataatacaaagaaggcaaaggaaaagataccccttcacgtctttagtcccaaatacacaaaattacgtgactggcaccatgaagtttcagcacgtgctcttaacgtacagtgatttatgagccttgccccccaagcagccagcacataccttttcatttactttttttttttcaacttcatagcaaaatctgtattaaatttgccttatgaaaaaatagaactttttctatacttttctaacaatttcctattgttgtgagaaaaggaagatgaacatgttttgtgctagttggtagctcacaaatgtaaaaccaaaaaaaaaaaaaattgagaaatttaggggacctagatctatggggggattggaatcggcgggggggataaaggggtangtactttgggagaaaccagatttattttncataaacgcgtgacattgggcgttcaagtgggtgggttagagcaagacggatattggcaattaaagacctgggtaaatgggagaaatatttctttctatatttacatttccaggaatacttttaggtctattactgtcactccacagttgcttggaatttttcactaggttaattgggagcaatacaagagttataaaaaaagggtggggaagctagctattaagaggcaaaggagtatgaaaaggaggcaattgttgaagaa

SEQ ID NO: 67763 - DNA, 2245 bp, Homo sapiens
gggcgagggagagccaggaggcggaagttcccgcgggcggtggggacggcgccctcaccgcgagtcacttgtcagcccttgtctgaggcggaggcagccccgcgccgcgccggacccgagcatatttcattttctgtcattggactttgagccattagaaccatgagcaactacagtgtgtcactggttggcccagctccttggggtttccggctgcagggcggtaaggatttcaacatgcctctgacaatctctagtctaaaagatggcggcaaggcagcccaggcaaatgtaagaataggcgatgtggttctcagcattgatggaataaatgcacaaggaatgactcatcttgaagcccagaataagattaagggttgtacaggctctttgaatatgactctgcaaagagcatctgctgcacccaagcctgagccggttcctgttcaaaagggagaacctaaagaagtagttaaacctgtgcccattacatctcctgctgtgtccaaagtcacttccacaaacaacatggcctacaataaggcaccacggccttttggttctgtgtcttcaccaaaagtcacatccatcccatcaccatcgtctgccttcaccccagcccatgcgaccacctcatcacatgcttccccttcacccgtggctgccgtcactcctcccctgttcgctgcatctggactgcatgctaatgccaatcttagtgctgaccagtctccatctgcactgagcgctggtaaaactgcagttaatgtcccacggcagcccacagtcaccagcgtgtgttccgagacttctcaggagctagcagagggacagagaagaggatcccagggtgacagtaaacagcaaaatggcccaccaagaaaacacattgtggagcgctatacagagttttatcatgtacccactcacagtgatgccagcaagaagagactgattgaggatactgaagactggcgtccaaggactggaacaactcagtctcgctctttccgaatccttgcccagatcactgggactgaacatttgaaagaatctgaagccgataatacaaagaaggcaaataactctcaggagccttctccgcagttggcttcctcggtagcttccacacggagcatgcccgagagcctggacagcccaacctctggcagaccaggggttaccagcctcacaactgcagctgccttcaagcctgtaggatccactggcgtcatcaagtcaccaagctggcaacggccaaaccaaggagtaccttccactggaagaatctcaaacagcgctacttactcaggatcagtggcaccagccaactcagctttgggacaaacccagccaagtgaccaggacactttagtgcaaagagctgagcacattccagcagggaaacgaactccgatgtgcgcccattgtaaccaggtcatcagaggaccattcttagtggcactggggaaatcttggcacccagaagaattcaactgcgctcactgcaaaaatacaatggcctacattggatttgtagaggagaaaggagccctgtattgtgagctgtgctatgagaaattctttgcccctgaatgtggtcgatgccaaaggaagatccttggatagagacggggtttcaccgtgttagccaggatggtctcgatctcctgaactcgtgatccgcccgcctcggcctcccaaagtgctgggattacaggaagtcatcaatgcgttgaaacaaacttggcatgtttcctgttttgtgtgtgtagcctgtggaaagcccattcggaacaatgtttttcacttggaggatggtgaaccctactgtgagactgattattatgccctctttggtactatatgccatggatgtgaatttcccatagaagctggtgacatgttcctggaagctctgggctacacctggcatgacacttgctttgtatgctcagtgtgttgtgaaagtttggaaggtcagacctttttctccaagaaggacaagcccctgtgtaagaaacatgctcattctgtgaatttttgaaagtcaacagttcaggagaagagaaggaatttgaagagaaaaaggaaaattaaaattactaattaatttttagattcaatatttatatggagttttgaaaaataatagtggccctgaaggaataaattccagctttaaaaaccaagtctgaggaaatatttggcttcataaagtaaagagacggtttggcatttatta

SEQ ID NO: 67764 - DNA, 1496 bp, Homo sapiens
gctcgtgtgttgtcttgcagtcactttattttgaacataaaaatgtatgtttccaagagggatctgtggattaattgctatatttctaaaaatgctctacccttaaaatttttgccacttaataaaacagctatgtgaaattaagcttttataaggcatgttttctgcatgatggaattagtctagaacctttttccttctatttcttatgactcttctatcactctttttttttttttttttgtatttccacagggaaaagataccccttcacgtctttagtcccaaatacacaaaattacgtgactggcaccatgaagtttcagcacgtgctcttaacgtacagtgatttatgagccttgccccccaagcagccagcacataccttttcatttactttttttttttcaacttcatagcaaaatctgtattaaatttgccttatgaaaaaatagaactttttctatacttttctaacaatttcctattgttgtgagaaaaggaagatgaacatgttttgtgctagttggtagctcacaaatgtaaaaccaaaaaaaaaaaaaattgagaaatttaggggacctagatctattgggggattggtatctgtttttgttgtgattagggtagtaatctgggaaaacgaattattttcataagttgaatttggttagttggttggttgaagcagaggataatgagcaaataaagtccttgtctaatttggaaaatactttctttatattattaacatctcccaagattactttttaagttcattattatgttacattcaaagttgattgtaaattattctaaataagtaaatataaggaggcaagaataaacaaagactttattaaagaagagtgcgtgcattgtagatttaggtatcttttaaagtaggtactattcaggatggctctatgaagaggaggaggtccagatttggctcctgaaaaaggaaagaagagaattttacccctatttgcaatggagaaatacagtattctttggtttggttggatttgcaaatcctatttcctatcaaaggaaatatctctagtggatatttttagaatatagacaatttctaggtattaactaataagatatggaaaagatagctttgctttttttaatcagaagaacataaaataaattacaatatgaatgattgtgagacatcagagaaatattttacttagtgacgtaaactactgtgcactgctgctattcctaggaagctgtgttttgggcaatacatggaagctaaatatatgaccagaaatgctttctgccttgtaatatagtgtattatatattagagctaaatttagtaataaatgcattttgaagtttggaaaagtattgtaataaagttgcctttaacttagctttgtacttgttctgtttccttgaggctagacacagtgccatccaggacttattacagtataactgggtaaaataaacaattctctgacaaaaaaaat

SEQ ID NO: 67765 - DNA, 1322 bp, Homo sapiens
  misc_feature (1272)..(1272): n is a, c, g, or t
  misc_feature (1286)..(1286): n is a, c, g, or t
  misc_feature (1302)..(1302): n is a, c, g, or t
gggcgagggagagccaggaggcggaagttcccgcgggcggtggggacggcgccctcaccgcgagtcacttgtcagcccttgtctgaggcggaggcagccccgcgccgcgccggacccgagcatatttcattttctgtcattggactttgagccattagaaccatgagcaactacagtgtgtcactggttggcccagctccttggggtttccggctgcagggcggtaaggatttcaacatgcctctgacaatctctagtctaaaagatggcggcaaggcagcccaggcaaatgtaagaataggcgatgtggttctcagcattgatggaataaatgcacaaggaatgactcatcttgaagcccagaataagattaagggttgtacaggctctttgaatatgactctgcaaagagcatctgctgcacccaagcctgagccggttcctgttcaaaagggagaacctaaagaagtagttaaacctgtgcccattacatctcctgctgtgtccaaagtcacttccacaaacaacatggcctacaataaggcaccacggccttttggttctgtgtcttcaccaaaagtcacatccatcccatcaccatcgtctgccttcaccccagcccatgcgaccacctcatcacatgcttccccttcacccgtggctgccgtcactcctcccctgttcgctgcatctggactgcatgctaatgccaatcttagtgctgaccagtctccatctgcactgagcgctggtaaaactgcagttaatgtcccacggcagcccacagtcaccagcgtgtgttccgagacttctcaggagctagcagagggacagagaagaggatcccagggtgacagtaaacagcaaaatggcccaccaagaaaacacattgtggagcgctatacagagttttatcatgtacccactcacagtgatgccagcaagaagagactgattgaggatactgaagactggcgtccaaggactggaacaactcagtctcgctctttccgaatccttgcccagatcactgggactgaacatttgaaagaatctgaagccgataatacaaagaaggcaaaggaaaagataccccttcacgtctttagtcccaaatacacaaaattacgtgactggcaccatgaagtttcagcacgtgctcttaacgtacagtgatttatgagccttgccccccaagcagccagcacataccttttcatttactttttttttttcaacttcatagcaaaatctgggttgtccactcctgtntggatgacatcgtntacagtgaagccagantgggtttccttgtcccgaag

SEQ ID NO: 67766 - DNA, 1384 bp, Homo sapiens
gggcgagggagagccaggaggcggaagttcccgcgggcggtggggacggcgccctcaccgcgagtcacttgtcagcccttgtctgaggcggaggcagccccgcgccgcgccggacccgagcatatttcattttctgtcattggactttgagccattagaaccatgagcaactacagtgtgtcactggttggcccagctccttggggtttccggctgcagggcggtaaggatttcaacatgcctctgacaatctctagtctaaaagatggcggcaaggcagcccaggcaaatgtaagaataggcgatgtggttctcagcattgatggaataaatgcacaaggaatgactcatcttgaagcccagaataagattaagggttgtacaggctctttgaatatgactctgcaaagagcatctgctgcacccaagcctgagccggttcctgttcaaaagggagaacctaaagaagtagttaaacctgtgcccattacatctcctgctgtgtccaaagtcacttccacaaacaacatggcctacaataaggcaccacggccttttggttctgtgtcttcaccaaaagtcacatccatcccatcaccatcgtctgccttcaccccagcccatgcgaccacctcatcacatgcttccccttcacccgtggctgccgtcactcctcccctgttcgctgcatctggactgcatgctaatgccaatcttagtgctgaccagtctccatctgcactgagcgctggtaaaactgcagttaatgtcccacggcagcccacagtcaccagcgtgtgttccgagacttctcaggagctagcagagggacagagaagaggatcccagggtgacagtaaacagcaaaatgggtaggtggctaaggtgctttctgctcttactaaaactcttctttcaggtaatttccaggaaatactctacattcctctcccccaaaaccaactttctttgaaggaagggagatgaagtattatttgcctcattaacatatggcctttatatacatagggtactttctgcaaagcaattatcacttattcaaaagctacttgtgcattttgacatgttctgaaccatgtaacatctctgtaactcattttttgtaagtcccgacacagcattgagcagctggcacttgtaatgcaaggcaaatcttgaatctttcttccttcaaagaaagttggttttgggggagaggaatgtagagtatttcctggaaattacctgaaagaagagttttagtaagagcagaaagcaccttagccacctacccattttgctgtttactgtcaccctgggatcctcttctctgtccctctgctagctcctgagaagtctcggaacacacgctggtgactgtggg

SEQ ID NO: 67767 - DNA, 1530 bp, Homo sapiens
gcgcccactccgcggcgtcggggaaatggctgcgagaccctagaggcctgggagcttactccacgggaacagcctctagataatctgagttgtgaaaatacgaagccgtgttactcgtgaacagtggctgacaacagtgttgtgtgagcctggctgtctgcttggacccagaggtttcgtctgccagggtttggcgtgtatcaggattctcagggaaacagtgtccaagctttcagtgttggagcaggtatggacgacaaaggcgacccgataatacaaagaaggcaacggaaaagataccccttcacgtctttagtcccaaatacacaaaattacgtgactggcaccatgaagtttcagcacgtgctcttaacgtacagtgatttatgagccttgccccccaagcagccagcacataccttttcatttactttttttttttcaacttcatagcaaaatctgtattaaatttgccttatgaaaaaatagaactttttctatacttttctaacaatttcctattgttgtgagaaaaggaagatgaacatgttttgtgctagttggtagctcacaaatgtaaaaccaaaaaaaaaaaaaattgagaaatttaggggacctagatctattgggggattggtatctgtttttgttgtgattagggtagtaatctgggaaaacgaattattttcataagttgaatttggttagttggttggttgaagcagaggataatgagcaaataaagtccttgtctaatttggaaaatactttctttatattattaacatctcccaagattactttttaagttcattattatgttacattcaaagttgattgtaaattattctaaataagtaaatataaggaggcaagaataaacaaagactttattaaagaagagtgcgtgcattgtagatttaggtatcttttaaagtaggtactattcaggatggctctatgaagaggaggaggtccagatttggctcctgaaaaaggaaagaagagaattttacccctatttgcaatggagaaatacagtattctttggtttggttggatttgcaaatcctatttcctatcaaaggaaatatctctagtggatatttttagaatatagacaatttctaggtattaactaataagatatggaaaagatagctttgctttttttaatcagaagaacataaaataaattacaatatgaatgattgtgagacatcagagaaatattttacttagtgacgtaaactactgtgcactgctgctattcctaggaagctgtgttttgggcaatacatggaagctaaatatatgaccagaaatgctttctgccttgtaatatagtgtattatatattagagctaaatttagtaataaatgcattttgaagtttggaaaagtattgtaataaagttgcctttaacttagctttgtacttgttctgtttccttgaggctagacacagtgccatccaggacttattacagtataactgggtaaaataaacaattctctgacaaaaaaaat

SEQ ID NO: 67768 - DNA, 1537 bp, Homo sapiens
caaattctttaagattattaattagagtttgcacattcctgagttaggtgaaaattatcttattccctgtgttttttgtttttttaaacttaaagagttagaaatgtgctgctccttctgcgtgaaacaaatgattccactctggagagaaatgaaacatgtttgaaaaatgggactatgggctttgaaagatggaaagatgggctttggatattttaacataaaaaacacctcagttagcaatgttttgtttattgtagggtatttaaacatttttcctttggaatatgcctaggttgacactgatgaggggctttaggctttctgatagttttcctgctgtatttccgaaatattttgaaactactttcatttttatttttaaaaattatacctaatgtgtgcatctgtgttatgcatgttgggactagttagcatgcacgttatgctttatcagcccattgtttttatctggaaacatgatgtttgagctgctaacctgattgtgtttgtcttttaaaaaatcagctctgtgttcttttcggtgaaatatattttgcatgtgtttggtgtggttttgtgtatgtttatttttgttttacatagggagaacctaaagaagtagttaaacctgtgcccattacatctcctgctgtgtccaaagtcacttccacaaacaacatggcctacaataaggcaccacggccttttggttctgtgtcttcaccaaaagtcacatccatcccatcaccatcgtctgccttcaccccagcccatgcgaccacctcatcacatgcttccccttcacccgtggctgccgtcactcctcccctgttcgctgcatctggactgcatgctaatgccaatcttagtgctgaccagtctccatctgcactgagcgctggtaaaactgcagttaatgtcccacggcagcccacagtcaccagcgtgtgttccgagacttctcaggagctagcagagggacagagaagaggatcccagggtgacagtaaacagcaaaatgggtaggtggctaaggtgctttctgctcttactaaaactcttctttcaggtaatttccaggaaatactctacattcctctcccccaaaaccaactttctttgaaggaagggagatgaagtattatttgcctcattaacatatggcctttatatacatagggtactttctgcaaagcaattatcacttattcaaaagctacttgtgcattttgacatgttctgaaccatgtaacatctctgtaactcattttttgtaagtcccgacacagcattgagcagctggcacttgtaatgcaaggcaaatcttgaatctttcttccttcaaagaaagttggttttgggggagaggaatgtagagtatttcctggaaattacctgaaagaagagttttagtaagagcagaaagcaccttagccacctacccattttgctgtttactgtcaccctgggatcctcttctctgtccctctgctagctcctgagaagtctcggaacacacgctggtgactgtggg

SEQ ID NO: 67769 - DNA, 176 bp, Homo sapiens
tgaaccatgtaacatctctgtaactcattttttgtaagtcccgacacagcattgagcagctggcacttgtaatgcaaggcaaatcttgaatctttcttcctcaattttttcattcttttaaataggccaccaaaagttcaaacagtggttacagttgctgtcaccttacacaactc

SEQ ID NO: 67770 - DNA, 952 bp, Homo sapiens
  misc_feature (829)..(829): n is a, c, g, or t
  misc_feature (835)..(835): n is a, c, g, or t
gggcgagggagagccaggaggcggaagttcccgcgggcggtggggacggcgccctcaccgcgagtcacttgtcagcccttgtctgaggcggaggcagccccgcgccgcgccggacccgagcatatttcattttctgtcattggactttgagccattagaaccatgagcaactacagtgtgtcactggttggcccagctccttggggtttccggctgcagggcggtaaggatttcaacatgcctctgacaatctctagtctaaaagatggcggcaaggcagcccaggcaaatgtaagaataggcgatgtggttctcagcattgatggaataaatgcacaaggaatgactcatcttgaagcccagaataagattaagggttgtacaggctctttgaatatgactctgcaaagagcatctgctgcacccaagcctgagccggttcctgttcaaaagaaaacacaagtgacaaataaccctggcactgtgaaaatcccacctaaacgcccaccaagaaaacacattgtggagcgctatacagagttttatcatgtacccactcacagtgatgccagcaagaagagactgattgaggatactgaagactggcgtccaaggactggaacaactcagtctcgctctttccgaatccttgcccagatcactgggactgaacatttgaaagaatctgaagccgataatacaaagaaggcaaaggaaaagataccccttcacgtctttagtcccaaatacacaaaattacgtgactggcaccatgaagtttcagcacgtgctcttaacgtacagtgatttatgagctggcccaagggcngatacnttcataatttttttcactcctaggactcgttatgttttgaaaaacttctttttaactctttggggaggagacatctgtttggggcttgcaaaaaatgggcttgtgttttgtggttca

SEQ ID NO: 67771 - DNA, 580 bp, Homo sapiens
acagttcaagcaggtcatcagaggaccattcttagtggcactggggaaatcttggcacccagaagaattcaactgcgctcactgcaaaaatacaatggcctacattggatttgtagaggagaaaggagccctgtattgtgagctgtgctatgagaaattctttgcccctgaatgtggtcgatgccaaaggaagatccttggagaagtcatcaatgcgttgaaacaaacttggcatgtttcctgttttgtgtgtgtagcctgtggaaagcccattcggaacaatgtttttcacttggaggatggtgaaccctactgtgagactgtttatattatgcctgttgttcctttcctctccaccctgactcacaaaacatttgctccacaaggacaggagtctgttttgttattgtctatatgtctaaaatggtgtcaggcccataggaggcatccaaacttgtattgaaggaaagaatggaaataataggaaaatctccctcatatggttacagtgaagctcccgtgaactgataaacctaaagtgccggcacagaggaagtaccaaaatataagcctacgatgc

SEQ ID NO: 67772 - DNA, 5967 bp, Homo sapiens
gggcgagggagagccaggaggcggaagttcccgcgggcggtggggacggcgccctcaccgcgagtcacttgtcagcccttgtctgaggcggaggcagccccgcgccgcgccggacccgagcatatttcattttctgtcattggactttgagccattagaaccatgagcaactacagtgtgtcactggttggcccagctccttggggtttccggctgcagggcggtaaggatttcaacatgcctctgacaatctctagtctaaaagatggcggcaaggcagcccaggcaaatgtaagaataggcgatgtggttctcagcattgatggaataaatgcacaaggaatgactcatcttgaagcccagaataagattaagggttgtacaggctctttgaatatgactctgcaaagagcatctgctgcacccaagcctgagccggttcctgttcaaaagggagaacctaaagaagtagttaaacctgtgcccattacatctcctgctgtgtccaaagtcacttccacaaacaacatggcctacaataaggcaccacggccttttggttctgtgtcttcaccaaaagtcacatccatcccatcaccatcgtctgccttcaccccagcccatgcgaccacctcatcacatgcttccccttcacccgtggctgccgtcactcctcccctgttcgctgcatctggactgcatgctaatgccaatcttagtgctgaccagtctccatctgcactgagcgctggtaaaactgcagttaatgtcccacggcagcccacagtcaccagcgtgtgttccgagacttctcaggagctagcagagggacagagaagaggatcccagggtgacagtaaacagcaaaatggcccaccaagaaaacacattgtggagcgctatacagagttttatcatgtacccactcacagtgatgccagcaagaagagactgattgaggatactgaagactggcgtccaaggactggaacaactcagtctcgctctttccgaatccttgcccagatcactgggactgaacatttgaaagaatctgaagccgataatacaaagaaggcaaataactctcaggagccttctccgcagttggcttcctcggtagcttccacacggagcatgcccgagagcctggacagcccaacctctggcagaccaggggttaccagcctcacaactgcagctgccttcaagcctgtaggatccactggcgtcatcaagtcaccaagctggcaacggccaaaccaaggagtaccttccactggaagaatctcaaacagcgctacttactcaggatcagtggcaccagccaactcagctttgggacaaacccagccaagtgaccaggacactttagtgcaaagagctgagcacattccagcagggaaacgaactccgatgtgcgcccattgtaaccaggtcatcagaggaccattcttagtggcactggggaaatcttggcacccagaagaattcaactgcgctcactgcaaaaatacaatggcctacattggatttgtagaggagaaaggagccctgtattgtgagctgtgctatgagaaattctttgcccctgaatgtggtcgatgccaaaggaagatccttggagaagtcatcaatgcgttgaaacaaacttggcatgtttcctgttttgtgtgtgtagcctgtggaaagcccattcggaacaatgtttttcacttggaggatggtgaaccctactgtgagactgattattatgccctctttggtactatatgccatggatgtgaatttcccatagaagctggtgacatgttcctggaagctctgggctacacctggcatgacacttgctttgtatgctcagtgtgttgtgaaagtttggaaggtcagacctttttctccaagaaggacaagcccctgtgtaagaaacatgctcattctgtgaatttttgaaagtcaacagttcaggagaagagaaggaatttgaagagaaaaaggaaaattaaaattactaattaatttttagattcaatatttatatggagttttgaaaaataatagtggccctgaaggaataaattccagctttaaaaaccaagtctgaggaaatatttggcttcataaagtaaagagacggtttggcatttattattactttttcctgtattttatgcccataaaataagctttataaaaaccaatttcctgatggactattaaattcatcttagaataaattagtgaagaatttaattttagaataaataatccaatctgaaataattataccttctttccttgttaggtagttatgagtaaatctgcaaaaggcaatgaaaatgccttaaattttatcaataacagaattattgtatttaaaaaaaaactaatacttatctttaaaatagtaaataggattttaaacagagaattttatcagtaataggtgtcagtttttaaaaaattgcttgtaggctgagcgcggtggctcacgcctgtaatcccagctactcaagaggctgaggcacgagaatcacttgaacccgggagggagaggttgcagtgagccaagatcgtaccactgcactccagcctgggtgacagagtgagactccgtctccaaaaaaaaactttgcttgtatattatttttgccttacagtggatcattctagtaggaaaggacaataagattttttatcaaaatgtgtcatgccagtaagagatgttatattcttttctcatttcttccccacccaaaaataagctaccatatagcttataagtctcaaatttttgccttttactaaaatgtgattgtttctgttcattgtgtatgcttcatcacctatattaggcaaattccattttttcccttgcgctaaggtaaagatttaattaaataattttggcctctcatagttttctctctctttaaagagaataaatagagggccaggtgtggtggctcacgcctgtgatcccagcactttgggaggccaagacgggcggatcatgaggtcaagagatcaagatcatcctggccaacatggtgaaaccctgtctctactaaaaatacaaaaatgagctgggcatggtggggcgtgcctgtagtcccatgtacttgggaggctgaggcaggaaaattcttgaacccaggagacggaagttgcagtgagctgagatcacaccactgcactccagcctggtgacagagcaagactccggctcttaaaaaaaaaaaaaaaaaaaaaaaaagagagagagagaataaatagaaaagaatgtggctgggaattgtgaatcagaagattataccccccaattgtttttcaatccccttttctcaaataataaattagttaaatcagtttctgagttatgccactggctgatgaagagttgagaggtctctttgcagaatgatctttttgtttcgttttgtttcttcttctgcatttaaaaattaaaagattggtttgaggatgtgatgaaattgagactttttgtggttttctctcaataataagtgaaccaatttcaaatgtgatcacaaagtttggaaagcttttattcacagaggttgggtagtgttgggaggggagtttaattactcagattggcctgttatttgatttcctcctttgggaaaagaattatgtagataccacatggagacagggaaacaattgtggtaaaactgtggatcctgttgctatttgcccagtgagaaaacagattctggtatttgatttggtttttctctttgtttccagaatggatgaaagtccatgaacctcctaagttataatttaaatttgtttggggcaaggtgattttatagtcgagacagagccctaggtccttcctgccccatcactcacttacgacatcacttccattgtgtgcatgtttgttatagaggaggttttaggctacaatatttgtttaacctccctaagaactttcaaggcatctgtcctgaaagctgttaatttatggtctagcagatttatattatatgcagataataattaactggggataaaagaatggcaaggggtgacacaaagtagcaaactgaatacttctccaatagcaaccccaagctacctcctcaccctgcatcttggagggaggcaggaaatttcttttgaaataaagtgctggagctgaattctgcattatttatcgttgctgctgaaaccacctataaaagacttgctggctaatgtgcattgtcatataatgtacactgtcacatctttacagtcttgtatgttatagaatacaaaataagttgatggttttgtttggtgtgagctttttgtttgtttagttttgccttcataggttatatgccaagatagtatttgataagtcaatgacatttggatgttttcttcaaagaattttatttgacccagatttcttataaagttatcttacattaaggatgtcattttcatcagaccttctttctacatattattcatgaagcataatgttgcatttctccaaattttatgcctgaaagggtagtgttgcttcctaaggtatcatgttgtctttgtgctttgtccatctcttccgtggcgaagctttatatctgttcctaaaacagttaatcctgtgaaataaatattgaacataatccagaagaatctctctgtttcccttggggaatgccatatttaattcaccagcagtaatcctttaataactggcagagcactttattcttctggtgagctccctgaatatttatttttctgattataaattttctatattagtagcattttttaattattacttcttcactatagagcatttacttttagtctctagatgtatattttggaatgctgtacttggcataacatagattaaaatcataatgcatgactaaaaactccttggatttatttcccattttaaaatttttagcggtaagttcagatttataatctttctctagacttccatggtctgaatgttgcctgctgaagtagcaacctaaaaagtatcccctgcttatgcttctccagttggccctccatgtccataggcttcgcatctgtgattcagcccactgtgggtcaaaaatatttggggaaaaaaatggatggttgcgcctttgctgaacatgtacaaacttttttttgtcattaaacaatatagtataacaactatttacaaagcatttacattgtattagctattataggtaatctagagatgatttaaagtgtatggtaggatgtgcacaggttatatgcaaatactacaccattttctataagggacttgaacatcatggactttagtatcctagggggttcttggaacccatcacccataggggcaccataggacaactatagtaccgtgtttatttcctattaattcaggttccgtttagagtctaaaactaaaacctaatcatttagtcacagtgtaaaaacaaatggaaataacagctcaaatcttcaaaatattactatagcattatgtttaaaataatctacaacaaaaatgtaccattttcaagcagtactacattaggagcccttttatagaaaataatttcttctttacccccgttccagtgtgaatctagtattctgttaacatttgtgtggcatttggagtttgtcatccccattgaagggagagccttctcagacatgaagcaagggaaacatactgaatagttttacacaaatttgatctggcttccatttgtccccctcatttcccaaatgtttaaatgtattggatttggattctcaatgtataagttgccttatctgttaatgtctatcttctgtctctttaattttgtatatctgctgttttgcttttggatacattttctaattagaagtcacatgataaatataatcagtatagtaataataccataatgtgcacatactcaataaataaatgactgcattgttgta

SEQ ID NO: 67773 - DNA, 5793 bp, Homo sapiens
gggcgagggagagccaggaggcggaagttcccgcgggcggtggggacggcgccctcaccgcgagtcacttgtcagcccttgtctgaggcggaggcagccccgcgccgcgccggacccgagcatatttcattttctgtcattggactttgagccattagaaccatgagcaactacagtgtgtcactggttggcccagctccttggggtttccggctgcagggcggtaaggatttcaacatgcctctgacaatctctagtctaaaagatggcggcaaggcagcccaggcaaatgtaagaataggcgatgtggttctcagcattgatggaataaatgcacaaggaatgactcatcttgaagcccagaataagattaagggttgtacaggctctttgaatatgactctgcaaagagcatctgctgcacccaagcctgagccggttcctgttcaaaagcccacagtcaccagcgtgtgttccgagacttctcaggagctagcagagggacagagaagaggatcccagggtgacagtaaacagcaaaatgggaaaatcccacctaaacgcccaccaagaaaacacattgtggagcgctatacagagttttatcatgtacccactcacagtgatgccagcaagaagagactgattgaggatactgaagactggcgtccaaggactggaacaactcagtctcgctctttccgaatccttgcccagatcactgggactgaacatttgaaagaatctgaagccgataatacaaagaaggcaaataactctcaggagccttctccgcagttggcttcctcggtagcttccacacggagcatgcccgagagcctggacagcccaacctctggcagaccaggggttaccagcctcacaactgcagctgccttcaagcctgtaggatccactggcgtcatcaagtcaccaagctggcaacggccaaaccaaggagtaccttccactggaagaatctcaaacagcgctacttactcaggatcagtggcaccagccaactcagctttgggacaaacccagccaagtgaccaggacactttagtgcaaagagctgagcacattccagcagggaaacgaactccgatgtgcgcccattgtaaccaggtcatcagaggaccattcttagtggcactggggaaatcttggcacccagaagaattcaactgcgctcactgcaaaaatacaatggcctacattggatttgtagaggagaaaggagccctgtattgtgagctgtgctatgagaaattctttgcccctgaatgtggtcgatgccaaaggaagatccttggagaagtcatcaatgcgttgaaacaaacttggcatgtttcctgttttgtgtgtgtagcctgtggaaagcccattcggaacaatgtttttcacttggaggatggtgaaccctactgtgagactgattattatgccctctttggtactatatgccatggatgtgaatttcccatagaagctggtgacatgttcctggaagctctgggctacacctggcatgacacttgctttgtatgctcagtgtgttgtgaaagtttggaaggtcagacctttttctccaagaaggacaagcccctgtgtaagaaacatgctcattctgtgaatttttgaaagtcaacagttcaggagaagagaaggaatttgaagagaaaaaggaaaattaaaattactaattaatttttagattcaatatttatatggagttttgaaaaataatagtggccctgaaggaataaattccagctttaaaaaccaagtctgaggaaatatttggcttcataaagtaaagagacggtttggcatttattattactttttcctgtattttatgcccataaaataagctttataaaaaccaatttcctgatggactattaaattcatcttagaataaattagtgaagaatttaattttagaataaataatccaatctgaaataattataccttctttccttgttaggtagttatgagtaaatctgcaaaaggcaatgaaaatgccttaaattttatcaataacagaattattgtatttaaaaaaaaactaatacttatctttaaaatagtaaataggattttaaacagagaattttatcagtaataggtgtcagtttttaaaaaattgcttgtaggctgagcgcggtggctcacgcctgtaatcccagcactttgggaggccaaggtgggtggaccacatgaggtcaggagtttgagatcagcctggccaacatggtgaaaccccatctctactaaaaatacaaaaattagccggacgcagtggcacgcgcctgtaatcccagctactcaagaggctgaggcacgagaatcacttgaacccgggagggagaggttgcagtgagccaagatcgtaccactgcactccagcctgggtgacagagtgagactccgtctccaaaaaaaaactttgcttgtatattatttttgccttacagtggatcattctagtaggaaaggacaataagattttttatcaaaatgtgtcatgccagtaagagatgttatattcttttctcatttcttccccacccaaaaataagctaccatatagcttataagtctcaaatttttgccttttactaaaatgtgattgtttctgttcattgtgtatgcttcatcacctatattaggcaaattccattttttcccttgcgctaaggtaaagatttaattaaataattttggcctctcatagttttctctctctttaaagagaataaatagagggccaggtgtggtggctcacgcctgtgatcccagcactttgggaggccaagacgggcggatcatgaggtcaagagatcaagatcatcctggccaacatggtgaaaccctgtctctactaaaaatacaaaaatgagctgggcatggtggggcgtgcctgtagtcccatgtacttgggaggctgaggcaggaaaattcttgaacccaggagacggaagttgcagtgagctgagatcacaccactgcactccagcctggtgacagagcaagactccggctcttaaaaaaaaaaaaaaaaaaaaaaaaagagagagagagaataaatagaaaagaatgtggctgggaattgtgaatcagaagattataccccccaattgtttttcaatccccttttctcaaataataaattagttaaatcagtttctgagttatgccactggctgatgaagagttgagaggtctctttgcagaatgatctttttgtttcgttttgtttcttcttctgcatttaaaaattaaaagattggtttgaggatgtgatgaaattgagactttttgtggttttctctcaataataagtgaaccaatttcaaatgtgatcacaaagtttggaaagcttttattcacagaggttgggtagtgttgggaggggagtttaattactcagattggcctgttatttgatttcctcctttgggaaaagaattatgtagataccacatggagacagggaaacaattgtggtaaaactgtggatcctgttgctatttgcccagtgagaaaacagattctggtatttgatttggtttttctctttgtttccagaatggatgaaagtccatgaacctcctaagttataatttaaatttgtttggggcaaggtgattttatagtcgagacagagccctaggtccttcctgccccatcactcacttacgacatcacttccattgtgtgcatgtttgttatagaggaggttttaggctacaatatttgtttaacctccctaagaactttcaaggcatctgtcctgaaagctgttaatttatggtctagcagatttatattatatgcagataataattaactggggataaaagaatggcaaggggtgacacaaagtagcaaactgaatacttctccaatagcaaccccaagctacctcctcaccctgcatcttggagggaggcaggaaatttcttttgaaataaagtgctggagctgaattctgcattatttatcgttgctgctgaaaccacctataaaagacttgctggctaatgtgcattgtcatataatgtacactgtcacatctttacagtcttgtatgttatagaatacaaaataagttgatggttttgtttggtgtgagctttttgtttgtttagttttgccttcataggttatatgccaagatagtatttgataagtcaatgacatttggatgttttcttcaaagaattttatttgacccagatttcttataaagttatcttacattaaggatgtcattttcatcagaccttctttctacatattattcatgaagcataatgttgcatttctccaaattttatgcctgaaagggtagtgttgcttcctaaggtatcatgttgtctttgtgctttgtccatctcttccgtggcgaagctttatatctgttcctaaaacagttaatcctgtgaaataaatattgaacataatccagaagaatctctctgtttcccttggggaatgccatatttaattcaccagcagtaatcctttaataactggcagagcactttattcttctggtgagctccctgaatatttatttttctgattataaattttctatattagtagcattttttaattattacttcttcactatagagcatttacttttagtctctagatgtatattttggaatgctgtacttggcataacatagattaaaatcataatgcatgactaaaaactccttggatttatttcccattttaaaatttttagcggtaagttcagatttataatctttctctagacttccatggtctgaatgttgcctgctgaagtagcaacctaaaaagtatcccctgcttatgcttctccagttggccctccatgtccataggcttcgcatctgtgattcagcccactgtgggtcaaaaatatttggggaaaaaaatggatggttgcgcctttgctgaacatgtacaaacttttttttgtcattaaacaatatagtataacaactatttacaaagcatttacattgtattagctattataggtaatctagagatgatttaaagtgtatggtaggatgtgcacaggttatatgcaaatactacaccattttctataagggacttgaacatcatggactttagtatcctagggggttcttggaacccatcacccataggggcaccataggacaactatagtaccgtgtttatttcctattaattcaggttccgtttagagtctaaaactaaaacctaatcatttagtcacagtgtaaaaacaaatggaaataacagctcaaatcttcaaaatattactatagcattatgtttaaaataatctacaacaaaaatgtaccattttcaagcagtactacattaggagcccttttatagaaaataatttcttctttacccccgttccagtgtgaatctagtattctgttaacatttgtgtggcatttggagtttgtcatccccattgaagggagagccttctcagacatgaagcaagggaaacatactgaatagttttacacaaatttgatctggcttccatttgtccccctcatttcccaaatgtttaaatgtattggatttggattctcaatgtataagttgccttatctgttaatgtctatcttctgtctctttaattttgtatatctgctgttttgcttttggatacattttctaattagaagtcacatgataaatataatcagtatagtaataataccataatgtgcacatactcaataaataaatgactgcattgttgta

SEQ ID NO: 67774 - DNA, 5683 bp, Homo sapiens
gggcgagggagagccaggaggcggaagttcccgcgggcggtggggacggcgccctcaccgcgagtcacttgtcagcccttgtctgaggcggaggcagccccgcgccgcgccggacccgagcatatttcattttctgtcattggactttgagccattagaaccatgagcaactacagtgtgtcactggttggcccagctccttggggtttccggctgcagggcggtaaggatttcaacatgcctctgacaatctctagtctaaaagatggcggcaaggcagcccaggcaaatgtaagaataggcgatgtggttctcagcattgatggaataaatgcacaaggaatgactcatcttgaagcccagaataagattaagggttgtacaggctctttgaatatgactctgcaaagagcatctgctgcacccaagcctgagccggttcctgttcaaaagcccaccaagaaaacacattgtggagcgctatacagagttttatcatgtacccactcacagtgatgccagcaagaagagactgattgaggatactgaagactggcgtccaaggactggaacaactcagtctcgctctttccgaatccttgcccagatcactgggactgaacatttgaaagaatctgaagccgataatacaaagaaggcaaataactctcaggagccttctccgcagttggcttcctcggtagcttccacacggagcatgcccgagagcctggacagcccaacctctggcagaccaggggttaccagcctcacaactgcagctgccttcaagcctgtaggatccactggcgtcatcaagtcaccaagctggcaacggccaaaccaaggagtaccttccactggaagaatctcaaacagcgctacttactcaggatcagtggcaccagccaactcagctttgggacaaacccagccaagtgaccaggacactttagtgcaaagagctgagcacattccagcagggaaacgaactccgatgtgcgcccattgtaaccaggtcatcagaggaccattcttagtggcactggggaaatcttggcacccagaagaattcaactgcgctcactgcaaaaatacaatggcctacattggatttgtagaggagaaaggagccctgtattgtgagctgtgctatgagaaattctttgcccctgaatgtggtcgatgccaaaggaagatccttggagaagtcatcaatgcgttgaaacaaacttggcatgtttcctgttttgtgtgtgtagcctgtggaaagcccattcggaacaatgtttttcacttggaggatggtgaaccctactgtgagactgattattatgccctctttggtactatatgccatggatgtgaatttcccatagaagctggtgacatgttcctggaagctctgggctacacctggcatgacacttgctttgtatgctcagtgtgttgtgaaagtttggaaggtcagacctttttctccaagaaggacaagcccctgtgtaagaaacatgctcattctgtgaatttttgaaagtcaacagttcaggagaagagaaggaatttgaagagaaaaaggaaaattaaaattactaattaatttttagattcaatatttatatggagttttgaaaaataatagtggccctgaaggaataaattccagctttaaaaaccaagtctgaggaaatatttggcttcataaagtaaagagacggtttggcatttattattactttttcctgtattttatgcccataaaataagctttataaaaaccaatttcctgatggactattaaattcatcttagaataaattagtgaagaatttaattttagaataaataatccaatctgaaataattataccttctttccttgttaggtagttatgagtaaatctgcaaaaggcaatgaaaatgccttaaattttatcaataacagaattattgtatttaaaaaaaaactaatacttatctttaaaatagtaaataggattttaaacagagaattttatcagtaataggtgtcagtttttaaaaaattgcttgtaggctgagcgcggtggctcacgcctgtaatcccagcactttgggaggccaaggtgggtggaccacatgaggtcaggagtttgagatcagcctggccaacatggtgaaaccccatctctactaaaaatacaaaaattagccggacgcagtggcacgcgcctgtaatcccagctactcaagaggctgaggcacgagaatcacttgaacccgggagggagaggttgcagtgagccaagatcgtaccactgcactccagcctgggtgacagagtgagactccgtctccaaaaaaaaactttgcttgtatattatttttgccttacagtggatcattctagtaggaaaggacaataagattttttatcaaaatgtgtcatgccagtaagagatgttatattcttttctcatttcttccccacccaaaaataagctaccatatagcttataagtctcaaatttttgccttttactaaaatgtgattgtttctgttcattgtgtatgcttcatcacctatattaggcaaattccattttttcccttgcgctaaggtaaagatttaattaaataattttggcctctcatagttttctctctctttaaagagaataaatagagggccaggtgtggtggctcacgcctgtgatcccagcactttgggaggccaagacgggcggatcatgaggtcaagagatcaagatcatcctggccaacatggtgaaaccctgtctctactaaaaatacaaaaatgagctgggcatggtggggcgtgcctgtagtcccatgtacttgggaggctgaggcaggaaaattcttgaacccaggagacggaagttgcagtgagctgagatcacaccactgcactccagcctggtgacagagcaagactccggctcttaaaaaaaaaaaaaaaaaaaaaaaaagagagagagagaataaatagaaaagaatgtggctgggaattgtgaatcagaagattataccccccaattgtttttcaatccccttttctcaaataataaattagttaaatcagtttctgagttatgccactggctgatgaagagttgagaggtctctttgcagaatgatctttttgtttcgttttgtttcttcttctgcatttaaaaattaaaagattggtttgaggatgtgatgaaattgagactttttgtggttttctctcaataataagtgaaccaatttcaaatgtgatcacaaagtttggaaagcttttattcacagaggttgggtagtgttgggaggggagtttaattactcagattggcctgttatttgatttcctcctttgggaaaagaattatgtagataccacatggagacagggaaacaattgtggtaaaactgtggatcctgttgctatttgcccagtgagaaaacagattctggtatttgatttggtttttctctttgtttccagaatggatgaaagtccatgaacctcctaagttataatttaaatttgtttggggcaaggtgattttatagtcgagacagagccctaggtccttcctgccccatcactcacttacgacatcacttccattgtgtgcatgtttgttatagaggaggttttaggctacaatatttgtttaacctccctaagaactttcaaggcatctgtcctgaaagctgttaatttatggtctagcagatttatattatatgcagataataattaactggggataaaagaatggcaaggggtgacacaaagtagcaaactgaatacttctccaatagcaaccccaagctacctcctcaccctgcatcttggagggaggcaggaaatttcttttgaaataaagtgctggagctgaattctgcattatttatcgttgctgctgaaaccacctataaaagacttgctggctaatgtgcattgtcatataatgtacactgtcacatctttacagtcttgtatgttatagaatacaaaataagttgatggttttgtttggtgtgagctttttgtttgtttagttttgccttcataggttatatgccaagatagtatttgataagtcaatgacatttggatgttttcttcaaagaattttatttgacccagatttcttataaagttatcttacattaaggatgtcattttcatcagaccttctttctacatattattcatgaagcataatgttgcatttctccaaattttatgcctgaaagggtagtgttgcttcctaaggtatcatgttgtctttgtgctttgtccatctcttccgtggcgaagctttatatctgttcctaaaacagttaatcctgtgaaataaatattgaacataatccagaagaatctctctgtttcccttggggaatgccatatttaattcaccagcagtaatcctttaataactggcagagcactttattcttctggtgagctccctgaatatttatttttctgattataaattttctatattagtagcattttttaattattacttcttcactatagagcatttacttttagtctctagatgtatattttggaatgctgtacttggcataacatagattaaaatcataatgcatgactaaaaactccttggatttatttcccattttaaaatttttagcggtaagttcagatttataatctttctctagacttccatggtctgaatgttgcctgctgaagtagcaacctaaaaagtatcccctgcttatgcttctccagttggccctccatgtccataggcttcgcatctgtgattcagcccactgtgggtcaaaaatatttggggaaaaaaatggatggttgcgcctttgctgaacatgtacaaacttttttttgtcattaaacaatatagtataacaactatttacaaagcatttacattgtattagctattataggtaatctagagatgatttaaagtgtatggtaggatgtgcacaggttatatgcaaatactacaccattttctataagggacttgaacatcatggactttagtatcctagggggttcttggaacccatcacccataggggcaccataggacaactatagtaccgtgtttatttcctattaattcaggttccgtttagagtctaaaactaaaacctaatcatttagtcacagtgtaaaaacaaatggaaataacagctcaaatcttcaaaatattactatagcattatgtttaaaataatctacaacaaaaatgtaccattttcaagcagtactacattaggagcccttttatagaaaataatttcttctttacccccgttccagtgtgaatctagtattctgttaacatttgtgtggcatttggagtttgtcatccccattgaagggagagccttctcagacatgaagcaagggaaacatactgaatagttttacacaaatttgatctggcttccatttgtccccctcatttcccaaatgtttaaatgtattggatttggattctcaatgtataagttgccttatctgttaatgtctatcttctgtctctttaattttgtatatctgctgttttgcttttggatacattttctaattagaagtcacatgataaatataatcagtatagtaataataccataatgtgcacatactcaataaataaatgactgcattgttgta

SEQ ID NO: 67775 - DNA, 5556 bp, Homo sapiens
ccacgcgtcgcggacgcgtggctaaaagatggcggcaaggcagcccaggcaaatgtaagaataggcgatgtggttctcagcattgatggaataaatgcacaaggaatgactcatcttgaagcccagaataagattaagggttgtacaggctctttgaatatgactctgcaaagagcatctgctgcacccaagcctgagccggttcctgttcaaaagcccacagtcaccagcgtgtgttccgagacttctcaggagctagcagagggacagagaagaggatcccagggtgacagtaaacagcaaaatgggaaaatcccacctaaacgcccaccaagaaaacacattgtggagcgctatacagagttttatcatgtacccactcacagtgatgccagcaagaagagactgattgaggatactgaagactggcgtccaaggactggaacaactcagtctcgctctttccgaatccttgcccagatcactgggactgaacatttgaaagaatctgaagccgataatacaaagaaggcaaataactctcaggagccttctccgcagttggcttcctcggtagcttccacacggagcatgcccgagagcctggacagcccaacctctggcagaccaggggttaccagcctcacaactgcagctgccttcaagcctgtaggatccactggcgtcatcaagtcaccaagctggcaacggccaaaccaaggagtaccttccactggaagaatctcaaacagcgctacttactcaggatcagtggcaccagccaactcagctttgggacaaacccagccaagtgaccaggacactttagtgcaaagagctgagcacattccagcagggaaacgaactccgatgtgcgcccattgtaaccaggtcatcagaggaccattcttagtggcactggggaaatcttggcacccagaagaattcaactgcgctcactgcaaaaatacaatggcctacattggatttgtagaggagaaaggagccctgtattgtgagctgtgctatgagaaattctttgcccctgaatgtggtcgatgccaaaggaagatccttggagaagtcatcaatgcgttgaaacaaacttggcatgtttcctgttttgtgtgtgtagcctgtggaaagcccattcggaacaatgtttttcacttggaggatggtgaaccctactgtgagactgattattatgccctctttggtactatatgccatggatgtgaatttcccatagaagctggtgacatgttcctggaagctctgggctacacctggcatgacacttgctttgtatgctcagtgtgttgtgaaagtttggaaggtcagacctttttctccaagaaggacaagcccctgtgtaagaaacatgctcattctgtgaatttttgaaagtcaacagttcaggagaagagaaggaatttgaagagaaaaaggaaaattaaaattactaattaatttttagattcaatatttatatggagttttgaaaaataatagtggccctgaaggaataaattccagctttaaaaaccaagtctgaggaaatatttggcttcataaagtaaagagacggtttggcatttattattactttttcctgtattttatgcccataaaataagctttataaaaaccaatttcctgatggactattaaattcatcttagaataaattagtgaagaatttaattttagaataaataatccaatctgaaataattataccttctttccttgttaggtagttatgagtaaatctgcaaaaggcaatgaaaatgccttaaattttatcaataacagaattattgtatttaaaaaaaaactaatacttatctttaaaatagtaaataggattttaaacagagaattttatcagtaataggtgtcagtttttaaaaaattgcttgtaggctgagcgcggtggctcacgcctgtaatcccagcactttgggaggccaaggtgggtggaccacatgaggtcaggagtttgagatcagcctggccaacatggtgaaaccccatctctactaaaaatacaaaaattagccggacgcagtggcacgcgcctgtaatcccagctactcaagaggctgaggcacgagaatcacttgaacccgggagggagaggttgcagtgagccaagatcgtaccactgcactccagcctgggtgacagagtgagactccgtctccaaaaaaaaactttgcttgtatattatttttgccttacagtggatcattctagtaggaaaggacaataagattttttatcaaaatgtgtcatgccagtaagagatgttatattcttttctcatttcttccccacccaaaaataagctaccatatagcttataagtctcaaatttttgccttttactaaaatgtgattgtttctgttcattgtgtatgcttcatcacctatattaggcaaattccattttttcccttgcgctaaggtaaagatttaattaaataattttggcctctcatagttttctctctctttaaagagaataaatagagggccaggtgtggtggctcacgcctgtgatcccagcactttgggaggccaagacgggcggatcatgaggtcaagagatcaagatcatcctggccaacatggtgaaaccctgtctctactaaaaatacaaaaatgagctgggcatggtggggcgtgcctgtagtcccatgtacttgggaggctgaggcaggaaaattcttgaacccaggagacggaagttgcagtgagctgagatcacaccactgcactccagcctggtgacagagcaagactccggctcttaaaaaaaaaaaaaaaaaaaaaaaaagagagagagagaataaatagaaaagaatgtggctgggaattgtgaatcagaagattataccccccaattgtttttcaatccccttttctcaaataataaattagttaaatcagtttctgagttatgccactggctgatgaagagttgagaggtctctttgcagaatgatctttttgtttcgttttgtttcttcttctgcatttaaaaattaaaagattggtttgaggatgtgatgaaattgagactttttgtggttttctctcaataataagtgaaccaatttcaaatgtgatcacaaagtttggaaagcttttattcacagaggttgggtagtgttgggaggggagtttaattactcagattggcctgttatttgatttcctcctttgggaaaagaattatgtagataccacatggagacagggaaacaattgtggtaaaactgtggatcctgttgctatttgcccagtgagaaaacagattctggtatttgatttggtttttctctttgtttccagaatggatgaaagtccatgaacctcctaagttataatttaaatttgtttggggcaaggtgattttatagtcgagacagagccctaggtccttcctgccccatcactcacttacgacatcacttccattgtgtgcatgtttgttatagaggaggttttaggctacaatatttgtttaacctccctaagaactttcaaggcatctgtcctgaaagctgttaatttatggtctagcagatttatattatatgcagataataattaactggggataaaagaatggcaaggggtgacacaaagtagcaaactgaatacttctccaatagcaaccccaagctacctcctcaccctgcatcttggagggaggcaggaaatttcttttgaaataaagtgctggagctgaattctgcattatttatcgttgctgctgaaaccacctataaaagacttgctggctaatgtgcattgtcatataatgtacactgtcacatctttacagtcttgtatgttatagaatacaaaataagttgatggttttgtttggtgtgagctttttgtttgtttagttttgccttcataggttatatgccaagatagtatttgataagtcaatgacatttggatgttttcttcaaagaattttatttgacccagatttcttataaagttatcttacattaaggatgtcattttcatcagaccttctttctacatattattcatgaagcataatgttgcatttctccaaattttatgcctgaaagggtagtgttgcttcctaaggtatcatgttgtctttgtgctttgtccatctcttccgtggcgaagctttatatctgttcctaaaacagttaatcctgtgaaataaatattgaacataatccagaagaatctctctgtttcccttggggaatgccatatttaattcaccagcagtaatcctttaataactggcagagcactttattcttctggtgagctccctgaatatttatttttctgattataaattttctatattagtagcattttttaattattacttcttcactatagagcatttacttttagtctctagatgtatattttggaatgctgtacttggcataacatagattaaaatcataatgcatgactaaaaactccttggatttatttcccattttaaaatttttagcggtaagttcagatttataatctttctctagacttccatggtctgaatgttgcctgctgaagtagcaacctaaaaagtatcccctgcttatgcttctccagttggccctccatgtccataggcttcgcatctgtgattcagcccactgtgggtcaaaaatatttggggaaaaaaatggatggttgcgcctttgctgaacatgtacaaacttttttttgtcattaaacaatatagtataacaactatttacaaagcatttacattgtattagctattataggtaatctagagatgatttaaagtgtatggtaggatgtgcacaggttatatgcaaatactacaccattttctataagggacttgaacatcatggactttagtatcctagggggttcttggaacccatcacccataggggcaccataggacaactatagtaccgtgtttatttcctattaattcaggttccgtttagagtctaaaactaaaacctaatcatttagtcacagtgtaaaaacaaatggaaataacagctcaaatcttcaaaatattactatagcattatgtttaaaataatctacaacaaaaatgtaccattttcaagcagtactacattaggagcccttttatagaaaataatttcttctttacccccgttccagtgtgaatctagtattctgttaacatttgtgtggcatttggagtttgtcatccccattgaagggagagccttctcagacatgaagcaagggaaacatactgaatagttttacacaaatttgatctggcttccatttgtccccctcatttcccaaatgtttaaatgtattggatttggattctcaatgtataagttgccttatctgttaatgtctatcttctgtctctttaattttgtatatctgctgttttgcttttggatacattttctaattagaagtcacatgataaatataatcagtatagtaataataccataatgtgcacatactcaataaataaatgactgcattgttgta

SEQ ID NO: 67776 - DNA, 6048 bp, Homo sapiens
gggcgagggagagccaggaggcggaagttcccgcgggcggtggggacggcgccctcaccgcgagtcacttgtcagcccttgtctgaggcggaggcagccccgcgccgcgccggacccgagcatatttcattttctgtcattggactttgagccattagaaccatgagcaactacagtgtgtcactggttggcccagctccttggggtttccggctgcagggcggtaaggatttcaacatgcctctgacaatctctagtctaaaagatggcggcaaggcagcccaggcaaatgtaagaataggcgatgtggttctcagcattgatggaataaatgcacaaggaatgactcatcttgaagcccagaataagattaagggttgtacaggctctttgaatatgactctgcaaagagcatctgctgcacccaagcctgagccggttcctgttcaaaagggagaacctaaagaagtagttaaacctgtgcccattacatctcctgctgtgtccaaagtcacttccacaaacaacatggcctacaataaggcaccacggccttttggttctgtgtcttcaccaaaagtcacatccatcccatcaccatcgtctgccttcaccccagcccatgcgaccacctcatcacatgcttccccttcacccgtggctgccgtcactcctcccctgttcgctgcatctggactgcatgctaatgccaatcttagtgctgaccagtctccatctgcactgagcgctggtaaaactgcagttaatgtcccacggcagcccacagtcaccagcgtgtgttccgagacttctcaggagctagcagagggacagagaagaggatcccagggtgacagtaaacagcaaaatggcccaccaagaaaacacattgtggagcgctatacagagttttatcatgtacccactcacagtgatgccagcaagaagagactgattgaggatactgaagactggcgtccaaggactggaacaactcagtctcgctctttccgaatccttgcccagatcactgggactgaacatttgaaagaatctgaagccgataatacaaagaaggcaaataactctcaggagccttctccgcagttggcttcctcggtagcttccacacggagcatgcccgagagcctggacagcccaacctctggcagaccaggggttaccagcctcacaactgcagctgccttcaagcctgtaggatccactggcgtcatcaagtcaccaagctggcaacggccaaaccaaggagtaccttccactggaagaatctcaaacagcgctacttactcaggatcagtggcaccagccaactcagctttgggacaaacccagccaagtgaccaggacactttagtgcaaagagctgagcacattccagcagggaaacgaactccgatgtgcgcccattgtaaccaggtcatcagaggaccattcttagtggcactggggaaatcttggcacccagaagaattcaactgcgctcactgcaaaaatacaatggcctacattggatttgtagaggagaaaggagccctgtattgtgagctgtgctatgagaaattctttgcccctgaatgtggtcgatgccaaaggaagatccttggagaagtcatcaatgcgttgaaacaaacttggcatgtttcctgttttgtgtgtgtagcctgtggaaagcccattcggaacaatgtttttcacttggaggatggtgaaccctactgtgagactgattattatgccctctttggtactatatgccatggatgtgaatttcccatagaagctggtgacatgttcctggaagctctgggctacacctggcatgacacttgctttgtatgctcagtgtgttgtgaaagtttggaaggtcagacctttttctccaagaaggacaagcccctgtgtaagaaacatgctcattctgtgaatttttgaaagtcaacagttcaggagaagagaaggaatttgaagagaaaaaggaaaattaaaattactaattaatttttagattcaatatttatatggagttttgaaaaataatagtggccctgaaggaataaattccagctttaaaaaccaagtctgaggaaatatttggcttcataaagtaaagagacggtttggcatttattattactttttcctgtattttatgcccataaaataagctttataaaaaccaatttcctgatggactattaaattcatcttagaataaattagtgaagaatttaattttagaataaataatccaatctgaaataattataccttctttccttgttaggtagttatgagtaaatctgcaaaaggcaatgaaaatgccttaaattttatcaataacagaattattgtatttaaaaaaaaactaatacttatctttaaaatagtaaataggattttaaacagagaattttatcagtaataggtgtcagtttttaaaaaattgcttgtaggctgagcgcggtggctcacgcctgtaatcccagcactttgggaggccaaggtgggtggaccacatgaggtcaggagtttgagatcagcctggccaacatggtgaaaccccatctctactaaaaatacaaaaattagccggacgcagtggcacgcgcctgtaatcccagctactcaagaggctgaggcacgagaatcacttgaacccgggagggagaggttgcagtgagccaagatcgtaccactgcactccagcctgggtgacagagtgagactccgtctccaaaaaaaaactttgcttgtatattatttttgccttacagtggatcattctagtaggaaaggacaataagattttttatcaaaatgtgtcatgccagtaagagatgttatattcttttctcatttcttccccacccaaaaataagctaccatatagcttataagtctcaaatttttgccttttactaaaatgtgattgtttctgttcattgtgtatgcttcatcacctatattaggcaaattccattttttcccttgcgctaaggtaaagatttaattaaataattttggcctctcatagttttctctctctttaaagagaataaatagagggccaggtgtggtggctcacgcctgtgatcccagcactttgggaggccaagacgggcggatcatgaggtcaagagatcaagatcatcctggccaacatggtgaaaccctgtctctactaaaaatacaaaaatgagctgggcatggtggggcgtgcctgtagtcccatgtacttgggaggctgaggcaggaaaattcttgaacccaggagacggaagttgcagtgagctgagatcacaccactgcactccagcctggtgacagagcaagactccggctcttaaaaaaaaaaaaaaaaaaaaaaaaagagagagagagaataaatagaaaagaatgtggctgggaattgtgaatcagaagattataccccccaattgtttttcaatccccttttctcaaataataaattagttaaatcagtttctgagttatgccactggctgatgaagagttgagaggtctctttgcagaatgatctttttgtttcgttttgtttcttcttctgcatttaaaaattaaaagattggtttgaggatgtgatgaaattgagactttttgtggttttctctcaataataagtgaaccaatttcaaatgtgatcacaaagtttggaaagcttttattcacagaggttgggtagtgttgggaggggagtttaattactcagattggcctgttatttgatttcctcctttgggaaaagaattatgtagataccacatggagacagggaaacaattgtggtaaaactgtggatcctgttgctatttgcccagtgagaaaacagattctggtatttgatttggtttttctctttgtttccagaatggatgaaagtccatgaacctcctaagttataatttaaatttgtttggggcaaggtgattttatagtcgagacagagccctaggtccttcctgccccatcactcacttacgacatcacttccattgtgtgcatgtttgttatagaggaggttttaggctacaatatttgtttaacctccctaagaactttcaaggcatctgtcctgaaagctgttaatttatggtctagcagatttatattatatgcagataataattaactggggataaaagaatggcaaggggtgacacaaagtagcaaactgaatacttctccaatagcaaccccaagctacctcctcaccctgcatcttggagggaggcaggaaatttcttttgaaataaagtgctggagctgaattctgcattatttatcgttgctgctgaaaccacctataaaagacttgctggctaatgtgcattgtcatataatgtacactgtcacatctttacagtcttgtatgttatagaatacaaaataagttgatggttttgtttggtgtgagctttttgtttgtttagttttgccttcataggttatatgccaagatagtatttgataagtcaatgacatttggatgttttcttcaaagaattttatttgacccagatttcttataaagttatcttacattaaggatgtcattttcatcagaccttctttctacatattattcatgaagcataatgttgcatttctccaaattttatgcctgaaagggtagtgttgcttcctaaggtatcatgttgtctttgtgctttgtccatctcttccgtggcgaagctttatatctgttcctaaaacagttaatcctgtgaaataaatattgaacataatccagaagaatctctctgtttcccttggggaatgccatatttaattcaccagcagtaatcctttaataactggcagagcactttattcttctggtgagctccctgaatatttatttttctgattataaattttctatattagtagcattttttaattattacttcttcactatagagcatttacttttagtctctagatgtatattttggaatgctgtacttggcataacatagattaaaatcataatgcatgactaaaaactccttggatttatttcccattttaaaatttttagcggtaagttcagatttataatctttctctagacttccatggtctgaatgttgcctgctgaagtagcaacctaaaaagtatcccctgcttatgcttctccagttggccctccatgtccataggcttcgcatctgtgattcagcccactgtgggtcaaaaatatttggggaaaaaaatggatggttgcgcctttgctgaacatgtacaaacttttttttgtcattaaacaatatagtataacaactatttacaaagcatttacattgtattagctattataggtaatctagagatgatttaaagtgtatggtaggatgtgcacaggttatatgcaaatactacaccattttctataagggacttgaacatcatggactttagtatcctagggggttcttggaacccatcacccataggggcaccataggacaactatagtaccgtgtttatttcctattaattcaggttccgtttagagtctaaaactaaaacctaatcatttagtcacagtgtaaaaacaaatggaaataacagctcaaatcttcaaaatattactatagcattatgtttaaaataatctacaacaaaaatgtaccattttcaagcagtactacattaggagcccttttatagtttgtgtggcatttggagtttgtcatccccattgaagggagagccttctcagacatgaagcaagggaaacatactgaatagttttacacaaatttgatctggcttccatttgtccccctcatttcccaaatgtttaaatgtattggatttggattctcaatgtataagttgccttatctgttaatgtctatcttctgtctctttaattttgtatatctgctgttttgcttttggatacattttctaattagaagtcacatgataaatataatcagtatagtaataataccataatgtgcacatactcaataaataaatgactgcattgttgta

SEQ ID NO: 67777 - DNA, 4486 bp, Homo sapiens
  misc_feature (12)..(12): n is a, c, g, or t
  misc_feature (15)..(15): n is a, c, g, or t
  misc_feature (35)..(36): n is a, c, g, or t
gcacgagaagtnacncaaacacttctgctttcacnnttggcatgtttcctgttttgtgtgtgtagcctgtggaaagcccattcggaacaatgtttttcacttggaggatggtgaaccctactgtgagactgattattatgccctctttggtactatatgccatggatgtgaatttcccatagaagctggtgacatgttcctggaagctctgggctacacctggcatgacacttgctttgtatgctcagtgtgttgtgaaagtttggaaggtcagacctttttctccaagaaggacaagcccctgtgtaagaaacatgctcattctgtgaatttttgaaagtcaacagttcaggagaagagaaggaatttgaagagaaaaaggaaaattaaaattactaattaatttttagattcaatatttatatggagttttgaaaaataatagtggccctgaaggaataaattccagctttaaaaaccaagtctgaggaaatatttggcttcataaagtaaagagacggtttggcatttattattactttttcctgtattttatgcccataaaataagctttataaaaaccaatttcctgatggactattaaattcatcttagaataaattagtgaagaatttaattttagaataaataatccaatctgaaataattataccttctttccttgttaggtagttatgagtaaatctgcaaaaggcaatgaaaatgccttaaattttatcaataacagaattattgtatttaaaaaaaaactaatacttatctttaaaatagtaaataggattttaaacagagaattttatcagtaataggtgtcagtttttaaaaaattgcttgtaggctgagcgcggtggctcacgcctgtaatcccagcactttgggaggccaaggtgggtggaccacatgaggtcaggagtttgagatcagcctggccaacatggtgaaaccccatctctactaaaaatacaaaaattagccggacgcagtggcacgcgcctgtaatcccagctactcaagaggctgaggcacgagaatcacttgaacccgggagggagaggttgcagtgagccaagatcgtaccactgcactccagcctgggtgacagagtgagactccgtctccaaaaaaaaactttgcttgtatattatttttgccttacagtggatcattctagtaggaaaggacaataagattttttatcaaaatgtgtcatgccagtaagagatgttatattcttttctcatttcttccccacccaaaaataagctaccatatagcttataagtctcaaatttttgccttttactaaaatgtgattgtttctgttcattgtgtatgcttcatcacctatattaggcaaattccattttttcccttgcgctaaggtaaagatttaattaaataattttggcctctcatagttttctctctctttaaagagaataaatagagggccaggtgtggtggctcacgcctgtgatcccagcactttgggaggccaagacgggcggatcatgaggtcaagagatcaagatcatcctggccaacatggtgaaaccctgtctctactaaaaatacaaaaatgagctgggcatggtggggcgtgcctgtagtcccatgtacttgggaggctgaggcaggaaaattcttgaacccaggagacggaagttgcagtgagctgagatcacaccactgcactccagcctggtgacagagcaagactccggctcttaaaaaaaaaaaaaaaaaaaaaaaaagagagagagagaataaatagaaaagaatgtggctgggaattgtgaatcagaagattataccccccaattgtttttcaatccccttttctcaaataataaattagttaaatcagtttctgagttatgccactggctgatgaagagttgagaggtctctttgcagaatgatctttttgtttcgttttgtttcttcttctgcatttaaaaattaaaagattggtttgaggatgtgatgaaattgagactttttgtggttttctctcaataataagtgaaccaatttcaaatgtgatcacaaagtttggaaagcttttattcacagaggttgggtagtgttgggaggggagtttaattactcagattggcctgttatttgatttcctcctttgggaaaagaattatgtagataccacatggagacagggaaacaattgtggtaaaactgtggatcctgttgctatttgcccagtgagaaaacagattctggtatttgatttggtttttctctttgtttccagaatggatgaaagtccatgaacctcctaagttataatttaaatttgtttggggcaaggtgattttatagtcgagacagagccctaggtccttcctgccccatcactcacttacgacatcacttccattgtgtgcatgtttgttatagaggaggttttaggctacaatatttgtttaacctccctaagaactttcaaggcatctgtcctgaaagctgttaatttatggtctagcagatttatattatatgcagataataattaactggggataaaagaatggcaaggggtgacacaaagtagcaaactgaatacttctccaatagcaaccccaagctacctcctcaccctgcatcttggagggaggcaggaaatttcttttgaaataaagtgctggagctgaattctgcattatttatcgttgctgctgaaaccacctataaaagacttgctggctaatgtgcattgtcatataatgtacactgtcacatctttacagtcttgtatgttatagaatacaaaataagttgatggttttgtttggtgtgagctttttgtttgtttagttttgccttcataggttatatgccaagatagtatttgataagtcaatgacatttggatgttttcttcaaagaattttatttgacccagatttcttataaagttatcttacattaaggatgtcattttcatcagaccttctttctacatattattcatgaagcataatgttgcatttctccaaattttatgcctgaaagggtagtgttgcttcctaaggtatcatgttgtctttgtgctttgtccatctcttccgtggcgaagctttatatctgttcctaaaacagttaatcctgtgaaataaatattgaacataatccagaagaatctctctgtttcccttggggaatgccatatttaattcaccagcagtaatcctttaataactggcagagcactttattcttctggtgagctccctgaatatttatttttctgattataaattttctatattagtagcattttttaattattacttcttcactatagagcatttacttttagtctctagatgtatattttggaatgctgtacttggcataacatagattaaaatcataatgcatgactaaaaactccttggatttatttcccattttaaaatttttagcggtaagttcagatttataatctttctctagacttccatggtctgaatgttgcctgctgaagtagcaacctaaaaagtatcccctgcttatgcttctccagttggccctccatgtccataggcttcgcatctgtgattcagcccactgtgggtcaaaaatatttggggaaaaaaatggatggttgcgcctttgctgaacatgtacaaacttttttttgtcattaaacaatatagtataacaactatttacaaagcatttacattgtattagctattataggtaatctagagatgatttaaagtgtatggtaggatgtgcacaggttatatgcaaatactacaccattttctataagggacttgaacatcatggactttagtatcctagggggttcttggaacccatcacccataggggcaccataggacaactatagtaccgtgtttatttcctattaattcaggttccgtttagagtctaaaactaaaacctaatcatttagtcacagtgtaaaaacaaatggaaataacagctcaaatcttcaaaatattactatagcattatgtttaaaataatctacaacaaaaatgtaccattttcaagcagtactacattaggagcccttttatagaaaataatttcttctttacccccgttccagtgtgaatctagtattctgttaacatttgtgtggcatttggagtttgtcatccccattgaagggagagccttctcagacatgaagcaagggaaacatactgaatagttttacacaaatttgatctggcttccatttgtccccctcatttcccaaatgtttaaatgtattggatttggattctcaatgtataagttgccttatctgttaatgtctatcttctgtctctttaattttgtatatctgctgttttgcttttggatacattttctaattagaagtcacatgataaatataatcagtatagtaataataccataatgtgcacatactcaataaataaatgactgcattgttgta

SEQ ID NO: 67778 - DNA, 4868 bp, Homo sapiens
gggcgagggagagccaggaggcggaagttcccgcgggcggtggggacggcgccctcaccgcgagtcacttgtcagcccttgtctgaggcggaggcagccccgcgccgcgccggacccgagcatatttcattttctgtcattggactttgagccattagaaccatgagcaactacagtgtgtcactggttggcccagctccttggggtttccggctgcagggcggtaaggatttcaacatgcctctgacaatctctagtctaaaagatggcggcaaggcagcccaggcaaatgtaagaataggcgatgtggttctcagcattgatggaataaatgcacaaggaatgactcatcttgaagcccagaataagattaagggttgtacaggctctttgaatatgactctgcaaagagcatctgctgcacccaagcctgagccggttcctgttcaaaagggagaacctaaagaagtagttaaacctgtgcccattacatctcctgctgtgtccaaagtcacttccacaaacaacatggcctacaataaggcaccacggccttttggttctgtgtcttcaccaaaagtcacatccatcccatcaccatcgtctgccttcaccccagcccatgcgaccacctcatcacatgcttccccttcacccgtggctgccgtcactcctcccctgttcgctgcatctggactgcatgctaatgccaatcttagtgctgaccagtctccatctgcactgagcgctggtaaaactgcagttaatgtcccacggcagcccacagtcaccagcgtgtgttccgagacttctcaggagctagcagagggacagagaagaggatcccagggtgacagtaaacagcaaaatggcccaccaagaaaacacattgtggagcgctatacagagttttatcatgtacccactcacagtgatgccagcaagaagagactgattgaggatactgaagactggcgtccaaggactggaacaactcagtctcgctctttccgaatccttgcccagatcactgggactgaacatttgaaagaatctgaagccgataatacaaagaaggcaaataactctcaggagccttctccgcagttggcttcctcggtagcttccacacggagcatgcccgagagcctggacagcccaacctctggcagaccaggggttaccagcctcacaactgcagctgccttcaagcctgtaggatccactggcgtcatcaagtcaccaagctggcaacggccaaaccaaggagtaccttccactggaagaatctcaaacagcgctacttactcaggatcagtggcaccagccaactcagctttgggacaaacccagccaagtgaccaggacactttagtgcaaagagctgagcacattccagcagggaaacgaactccgatgtgcgcccattgtaaccaggtcatcagaggaccattcttagtggcactggggaaatcttggcacccagaagaattcaactgcgctcactgcaaaaatacaatggcctacattggatttgtagaggagaaaggagccctgtattgtgagctgtgctatgagaaattctttgcccctgaatgtggtcgatgccaaaggaagatccttggagaagtcatcaatgcgttgaaacaaacttggcatgtttcctgttttgtgtgtgtagcctgtggaaagcccattcggaacaatgtttttcacttggaggatggtgaaccctactgtgagactgattattatgccctctttggtactatatgccatggatgtgaatttcccatagaagctggtgacatgttcctggaagctctgggctacacctggcatgacacttgctttgtatgctcagtgtgttgtgaaagtttggaaggtcagacctttttctccaagaaggacaagcccctgtgtaagaaacatgctcattctgtgaatttttgaaagtcaacagttcaggagaagagaaggaatttgaagagaaaaaggaaaattaaaattactaattaatttttagattcaatatttatatggagttttgaaaaataatagtggccctgaaggaataaattccagctttaaaaaccaagtctgaggaaatatttggcttcataaagtaaagagacggtttggcatttattattactttttcctgtattttatgcccataaaataagctttataaaaaccaatttcctgatggactattaaattcatcttagaataaattagtgaagaatttaattttagaataaataatccaatctgaaataattataccttctttccttgttaggtagttatgagtaaatctgcaaaaggcaatgaaaatgccttaaattttatcaataacagaattattgtatttaaaaaaaaactaatacttatctttaaaatagtaaataggattttaaacagagaattttatcagtaataggtgtcagtttttaaaaaattgcttgtaggctgagcgcggtggctcacgcctgtaatcccagcactttgggaggccaaggtgggtggaccacatgaggtcaggagtttgagatcagcctggccaacatggtgaaaccccatctctactaaaaatacaaaaattagccggacgcagtggcacgcgcctgtaatcccagctactcaagaggctgaggcacgagaatcacttgaacccgggagggagaggttgcagtgagccaagatcgtaccactgcactccagcctgggtgacagagtgagactccgtctccaaaaaaaaactttgcttgtatattatttttgccttacagtggatcattctagtaggaaaggacaataagattttttatcaaaatgtgtcatgccagtaagagatgttatattcttttctcatttcttccccacccaaaaataagctaccatatagcttataagtctcaaatttttgccttttactaaaatgtgattgtttctgttcattgtgtatgcttcatcacctatattaggcaaattccattttttcccttgcgctaaggtaaagatttaattaaataattttggcctctcatagttttctctctctttaaagagaataaatagagggccaggtgtggtggctcacgcctgtgatcccagcactttgggaggccaagacgggcggatcatgaggtcaagagatcaagatcatcctggccaacatggtgaaaccctgtctctactaaaaatacaaaaatgagctgggcatggtggggcgtgcctgtagtcccatgtacttgggaggctgaggcaggaaaattcttgaacccaggagacggaagttgcagtgagctgagatcacaccactgcactccagcctggtgacagagcaagactccggctcttaaaaaaaaaaaaaaaaaaaaaaaaagagagagagagaataaatagaaaagaatgtggctgggaattgtgaatcagaagattataccccccaattgtttttcaatccccttttctcaaataataaattagttaaatcagtttctgagttatgccactggctgatgaagagttgagaggtctctttgcagaatgatctttttgtttcgttttgtttcttcttctgcatttaaaaattaaaagattggtttgaggatgtgatgaaattgagactttttgtggttttctctcaataataagtgaaccaatttcaaatgtgatcacaaagtttggaaagcttttattcacagaggttgggtagtgttgggaggggagtttaattactcagattggcctgttatttgatttcctcctttgggaaaagaattatgtagataccacatggagacagggaaacaattgtggtaaaactgtggatcctgttgctatttgcccagtgagaaaacagattctggtatttgatttggtttttctctttgtttccagaatggatgaaagtccatgaacctcctaagttataatttaaatttgtttggggcaaggtgattttatagtcgagacagagccctaggtccttcctgccccatcactcacttacgacatcacttccattgtgtgcatgtttgttatagaggaggttttaggctacaatatttgtttaacctccctaagaactttcaaggcatctgtcctgaaagctgttaatttatggtctagcagatttatattatatgcagataataattaactggggataaaagaatggcaaggggtgacacaaagtagcaaactgaatacttctccaatagcaaccccaagctacctcctcaccctgcatcttggagggaggcaggaaatttcttttgaaataaagtgctggagctgaattctgcattatttatcgttgctgctgaaaccacctataaaagacttgctggctaatgtgcattgtcatataatgtacactgtcacatctttacagtcttgtatgttatagaatacaaaataagttgatggttttgtttggtgtgagctttttgtttgtttagttttgccttcataggttatatgccaagatagtatttgataagtcaatgacatttggatgttttcttcaaagaattttatttgacccagatttcttataaagttatcttacattaaggatgtcattttcatcagaccttctttctacatattattcatgaagcataatgttgcatttctccaaattttatgcctgaaagggtagtgttgcttcctaaggtatcatgttgtctttgtgctttgtccatctcttccgtggcgaagctttatatctgttcctaaaacagttaatcctgtgaaataaatattgaacataatccagaagaatctctctgtttcccttggggaatgccatatttattctacctagctagctagctagctcggaggagtttgcg

SEQ ID NO: 67779 - DNA, 2151 bp, Homo sapiens
gggcgagggagagccaggaggcggaagttcccgcgggcggtggggacggcgccctcaccgcgagtcacttgtcagcccttgtctgaggcggaggcagccccgcgccgcgccggacccgagcatatttcattttctgtcattggactttgagccattagaaccatgagcaactacagtgtgtcactggttggcccagctccttggggtttccggctgcagggcggtaaggatttcaacatgcctctgacaatctctagtctaaaagatggcggcaaggcagcccaggcaaatgtaagaataggcgatgtggttctcagcattgatggaataaatgcacaaggaatgactcatcttgaagcccagaataagattaagggttgtacaggctctttgaatatgactctgcaaagagcatctgctgcacccaagcctgagccggttcctgttcaaaagggagaacctaaagaagtagttaaacctgtgcccattacatctcctgctgtgtccaaagtcacttccacaaacaacatggcctacaataaggcaccacggccttttggttctgtgtcttcaccaaaagtcacatccatcccatcaccatcgtctgccttcaccccagcccatgcgaccacctcatcacatgcttccccttcacccgtggctgccgtcactcctcccctgttcgctgcatctggactgcatgctaatgccaatcttagtgctgaccagtctccatctgcactgagcgctggtaaaactgcagttaatgtcccacggcagcccacagtcaccagcgtgtgttccgagacttctcaggagctagcagagggacagagaagaggatcccagggtgacagtaaacagcaaaatggcccaccaagaaaacacattgtggagcgctatacagagttttatcatgtacccactcacagtgatgccagcaagaagagactgattgaggatactgaagactggcgtccaaggactggaacaactcagtctcgctctttccgaatccttgcccagatcactgggactgaacatttgaaagaatctgaagccgataatacaaagaaggcaaataactctcaggagccttctccgcagttggcttcctcggtagcttccacacggagcatgcccgagagcctggacagcccaacctctggcagaccaggggttaccagcctcacaactgcagctgccttcaagcctgtaggatccactggcgtcatcaagtcaccaagctggcaacggccaaaccaaggagtaccttccactggaagaatctcaaacagcgctacttactcaggatcagtggcaccagccaactcagctttgggacaaacccagccaagtgaccaggacactttagtgcaaagagctgagcacattccagcagggaaacgaactccgatgtgcgcccattgtaaccaggtcatcagaggaccattcttagtggcactggggaaatcttggcacccagaagaattcaactgcgctcactgcaaaaatacaatggcctacattggatttgtagaggagaaaggagccctgtattgtgagctgtgctatgagaaattctttgcccctgaatgtggtcgatgccaaaggaagatccttggagaagtcatcaatgcgttgaaacaaacttggcatgtttcctgttttgtgtgtgtagcctgtggaaagcccattcggaacaatgtttttcacttggaggatggtgaaccctactgtgagactgattattatgccctctttggtactatatgccatggatgtgaatttcccatagaagctggtgacatgttcctggaagctctgggctacacctggcatgacacttgctttgtatgctcagtgtgttgtgaaagtttggaaggtcagacctttttctccaagaaggacaagcccctgtgtaagaaacatgctcattctgtgaatttttgaaagtcaacagttcaggagaagagaaggaatttgaagagaaaaaggaaaattaaaattactaattaatttttagattcaatatttatatggagttttgaaaaataatagtggccctgaaggaataaattccagctttaaaaaccaagtctgaggaaatatttggcttcataaagtaaagagacggtttggcatttatta

SEQ ID NO: 67780 - DNA, 1766 bp, Homo sapiens
  misc_feature (1474)..(1474): n is a, c, g, or t
  misc_feature (1503)..(1503): n is a, c, g, or t
gggcgagggagagccaggaggcggaagttcccgcgggcggtggggacggcgccctcaccgcgagtcacttgtcagcccttgtctgaggcggaggcagccccgcgccgcgccggacccgagcatatttcattttctgtcattggactttgagccattagaaccatgagcaactacagtgtgtcactggttggcccagctccttggggtttccggctgcagggcggtaaggatttcaacatgcctctgacaatctctagtctaaaagatggcggcaaggcagcccaggcaaatgtaagaataggcgatgtggttctcagcattgatggaataaatgcacaaggaatgactcatcttgaagcccagaataagattaagggttgtacaggctctttgaatatgactctgcaaagagcatctgctgcacccaagcctgagccggttcctgttcaaaagggagaacctaaagaagtagttaaacctgtgcccattacatctcctgctgtgtccaaagtcacttccacaaacaacatggcctacaataaggcaccacggccttttggttctgtgtcttcaccaaaagtcacatccatcccatcaccatcgtctgccttcaccccagcccatgcgaccacctcatcacatgcttccccttcacccgtggctgccgtcactcctcccctgttcgctgcatctggactgcatgctaatgccaatcttagtgctgaccagtctccatctgcactgagcgctggtaaaactgcagttaatgtcccacggcagcccacagtcaccagcgtgtgttccgagacttctcaggagctagcagagggacagagaagaggatcccagggtgacagtaaacagcaaaatgggaaaatcccacctaaacgcccaccaagaaaacacattgtggagcgctatacagagttttatcatgtacccactcacagtgatgccagcaagaagagactgattgaggatactgaagactggcgtccaaggactggaacaactcagtctcgctctttccgaatccttgcccagatcactgggactgaacatttgaaagaatctgaagccgataatacaaagaaggcaaaggaaaagataccccttcacgtctttagtcccaaatacacaaaattacgtgactggcaccatgaagtttcagcacgtgctcttaacgtacagtgatttatgagccttgccccccaagcagccagcacataccttttcatttactttttttttttcaacttcatagcaaaatctgtattaaatttgccttatgaaaaaatagaactttttctatacttttctaacaatttcctattgttgtgagaaaaggaagatgaacatgttttgtgctagttggtagctcacaaatgtaaaaccaaaaaaaaaaaaaattgagaaatttaggggacctagatctatggggggattggaatcggcgggggggataaaggggtangtactttgggagaaaccagatttattttncataaacgcgtgacattgggcgttcaagtgggtgggttagagcaagacggatattggcaattaaagacctgggtaaatgggagaaatatttctttctatatttacatttccaggaatacttttaggtctattactgtcactccacagttgcttggaatttttcactaggttaattgggagcaatacaagagttataaaaaaagggtggggaagctagctattaagaggcaaaggagtatgaaaaggaggcaattgttgaagaa

SEQ ID NO: 67781 - DNA, 1187 bp, Homo sapiens
gggcgagggagagccaggaggcggaagttcccgcgggcggtggggacggcgccctcaccgcgagtcacttgtcagcccttgtctgaggcggaggcagccccgcgccgcgccggacccgagcatatttcattttctgtcattggactttgagccattagaaccatgagcaactacagtgtgtcactggttggcccagctccttggggtttccggctgcagggcggtaaggatttcaacatgcctctgacaatctctagtctaaaagatggcggcaaggcagcccaggcaaatgtaagaataggcgatgtggttctcagcattgatggaataaatgcacaaggaatgactcatcttgaagcccagaataagattaagggttgtacaggctctttgaatatgactctgcaaagagcatctgctgcacccaagcctgagccggttcctgttcaaaagggagaacctaaagaagtagttaaacctgtgcccattacatctcctgctgtgtccaaagtcacttccacaaacaacatggcctacaataaggcaccacggccttttggttctgtgtcttcaccaaaagtcacatccatcccatcaccatcgtctgccttcaccccagcccatgcgaccacctcatcacatgcttccccttcacccgtggctgccgtcactcctcccctgttcgctgcatctggactgcatgctaatgccaatcttagtgctgaccagtctccatctgcactgagcgctggtaaaactgcagttaatgtcccacggcagcccacagtcaccagcgtgtgttccgagacttctcaggagctagcagagggacagagaagaggatcccagggtgacagtaaacagcaaaatggcccaccaagaaaacacattgtggagcgctatacagagttttatcatgtacccactcacagtgatgccagcaagaagagactgattgaggatactgaagactggcgtccaaggactggaacaactcagtctcgctctttccgaatccttgcccagatcactgggactgaacatttgaaagaatctgaagccgataatacaaagaaggcaaaagcatctgctgcacccaagcctgagccggttcctgttcaaaagggagaacctaaagaagtagttaaacctgtgcccattacatctcctgctgttgtctgctgcag

SEQ ID NO: 67782 - DNA, 605 bp, Homo sapiens
gggcgagggagagccaggaggcggaagttcccgcgggcggtggggacggcgccctcaccgcgagtcacttgtcagcccttgtctgaggcggaggcagccccgcgccgcgccggacccgagcatatttcattttctgtcattggactttgagccattagaaccatgagcaactacagtgtgtcactggttggcccagctccttggggtttccggctgcagggcggtaaggatttcaacatgcctctgacaatctctagtctaaaagatggcggcaaggcagcccaggcaaatgtaagaataggcgatgtggttctcagcattgatggaataaatgcacaaggaatgactcatcttgaagcccagaataagattaagggttgtacaggctctttgaatatgactctgcaaagcagttactcgggagttacccagctactcaggaggctgaggcaggagaatcgcttgaacccaggaggtggaggttgcagtgagctgagatcgcgcctgggtgacagaacaagactccgtctcaagaaaaaaaaatgcttatgttctgtataaaatcttcaataaaatgacgataccagtacctcatatttgtataa

SEQ ID NO: 67783 - DNA, 954 bp, Homo sapiens
agcagaagagactgtcagcagaccaccttggaggggatgcttggagctgcctaacgtgtgattcaaagatgaattccatgtgtttggagaagaagccctagcctcaacacaaaggttggccacattccagccaaggtagcacggagtgaaggcccgtggagggagagctgggcttttctgaactacttcagtacaccttgctgtgccttggcctgccgtgtttcatccccatggctgtcctcagtgatgtgcatggtcactgctcccttcaccactgagaagacgggcacaggacagtcaggggatgtgtccaaggtcccacagcaggaagggctggagccagaatgtggtctgagaggctggatatacaaagagacaatggcatgaccatctgtacaaatggaactatggcccacaacctgcagcagccagcccaggaagccaacccgtcacctgcagcagccaggatggatgctggcctgccctcagttgtactcacatcattggtcttatggggaaattttaagacctcccacttgtaaggttttatagccctctatggaatattgaagaaagagtaaaatgcatccaaaaaaaaaaaaaaacactaaactggataaattctaaggcctcttcaggtcttaagatggccattttctaggtcctcttgctgcagcagtgaaatccacaaacacggacaagtcagtcagttacgtgcctttcagagaaaacttctgacttaggaattccagctatttggcccaacccatattagattgtgttacttaaagccatggtaaattcacatcccgaagggaagagcagaggaaacataatattccttcaagacccatcagctcagatgttagcagaacacccctaaggaggaaaacaagaaattttgggtttgaacttggtacttcccagcagccctgggagtggggtcagaagccc

SEQ ID NO: 67784 - DNA, 1188 bp, Homo sapiens
agcagaagagactgtcagcagaccaccttggaggggatgcttggagctgcctaacgtgtgattcaaagatgaattccatgtgtttggagaagaagccctagcctcaacacaaaggttggccacattccagccaaggtagcacggagtgaaggcccgtggagggagagctgggcttttctgaactacttcagtacaccttgctgtgccttggcctgccgtgtttcatccccatggctgtcctcagtgatgtgcatggtcactgctcccttcaccactgagaagacgggcacaggacagtcaggggatgtgtccaaggtcccacagcaggaagggctggagccagaatgtggtctgagaggctggatatacaaagagacaatggcatgaccatctgtacaaatggaactatggcccacaacctgcagcagccagcccaggaagccaacccgtcacctgcagcagccaggatggatgctggcctgccctcaggtgcccttgttggagaacatgggggccaaattccaaacgtggcaagagataacaaatgacttgtctggtggctgaaccctgagctgggagcactgcctggagaaaactctgatactcaagtctagttttatatggctccaaacgcctccaccatgagctcaaggcagtgagactgactgaaaaaccctctctattacagaccacaacattgaacccaacatccccctaagtaggttgtactcacatcattggtcttatggggaaattttaagacctcccacttgtaaggttttatagccctctatggaatattgaagaaagagtaaaatgcatccaaaaaaaaaaaaaaacactaaactggataaattctaaggcctcttcaggtcttaagatggccattttctaggtcctcttgctgcagcagtgaaatccacaaacacggacaagtcagtcagttacgtgcctttcagagaaaacttctgacttaggaattccagctatttggcccaacccatattagattgtgttacttaaagccatggtaaattcacatcccgaagggaagagcagaggaaacataatattccttcaagacccatcagctcagatgttagcagaacacccctaaggaggaaaacaagaaattttgggtttgaacttggtacttcccagcagccctgggagtggggtcagaagccc

SEQ ID NO: 67785 - DNA, 521 bp, Homo sapiens
tttggatgctggcctgccctcaaccacaacattgaacccaacatcccctaagtaggttgtactcacatcattggtcttatggggaaattttaagacctcccacttgtaaggttttatagccctctatggaatattgaagaaagagtaaaatgcatccaaaaaaaaaaaaaaacactaaactggataaattctaaggcctcttcaggtcttaagatggccattttctaggtcctcttgctgcagcagtgaaatccacaaacacggacaagtcagtcagttacgtgcctttcagagaaaacttctgacttaggaattccagctatttggcccaacccatattagattgtgttacttaaagccatggtaaattcacatcccgaagggaagagcagaggaaacataatattccttcaagacccatcagctcagatgttagcagaacacccctaaggaggaaaacaagaaattttgggtttgaacttggtacttcccagcagccctgggagtggggtcagaagccc

SEQ ID NO: 67786 - DNA, 1079 bp, Homo sapiens
agcagaagagactgtcagcagaccaccttggaggggatgcttggagctgcctaacgtgtgattcaaagatgaattccatgtgtttggagaagaagccctagcctcaacacaaaggttggccacattccagccaaggtagcacggagtgaaggcccgtggagggagagctgggcttttctgaactacttcagtacaccttgctgtgccttggcctgccgtgtttcatccccatggctgtcctcagtgatgtgcatggtcactgctcccttcaccactgagaagacgggcacaggacagtcaggggatgtgtccaaggtcccacagcaggaagggctggagccagaatgtggtctgagaggctggatatacaaagagacaatggcatgaccatctgtacaaatggaactatggcccacaacctgcagcagccagcccaggaagccaacccgtcacctgcagcagccaggatggatgctggcctgccctcactgatactcaagtctagttttatatggctccaaacgcctccaccatgagctcaaggcagtgagactgactgaaaaaccctctctattacagaccacaacattgaacccaacatccccctaagtaggttgtactcacatcattggtcttatggggaaattttaagacctcccacttgtaaggttttatagccctctatggaatattgaagaaagagtaaaatgcatccaaaaaaaaaaaaaaacactaaactggataaattctaaggcctcttcaggtcttaagatggccattttctaggtcctcttgctgcagcagtgaaatccacaaacacggacaagtcagtcagttacgtgcctttcagagaaaacttctgacttaggaattccagctatttggcccaacccatattagattgtgttacttaaagccatggtaaattcacatcccgaagggaagagcagaggaaacataatattccttcaagacccatcagctcagatgttagcagaacacccctaaggaggaaaacaagaaattttgggtttgaacttggtacttcccagcagccctgggagtggggtcagaagccc

SEQ ID NO: 67787 - DNA, 723 bp, Homo sapiens
agcagaagagactgtcagcagaccaccttggaggggatgcttggagctgcctaacgtgtgattcaaagatgaattccatgtgtttggagaagaagccctagcctcaacacaaaggttggccacattccagccaaggtagcacggagtgaaggcccgtggagggagagctgggcttttctgaactacttcagtacaccttgctgtgccttggcctgccgtgtttcatccccatggctgtcctcagtgatgtgcatggtcactgctcccttcaccactgagaagacgggcacaggacagtcaggggatgtgtccaaggtcccacagcaggaagggctggagccagaatgtggtctgagaggctggatatacaaagagacaatggcatgaccatctgtacaaatggaactatggcccacaacctgcagcagccagcccaggaagccaacccgtcacctgcagcagccaggatggatgctggcctgccctcatgtgggctccaccaccctcctgcctgctgtgggaaatcaggagggtgaaggtgaagctggacttggcccagaggtgcccacagggacgcccagagctgcacaagctccctccatcttgcctctgggaccagctctgcattgctccaaagccctcatcagtgtctgctttctgttgcaataactgaatacctgagattggacaatttataaagaaaaaaattatatctgacaattc

SEQ ID NO: 67788 - DNA, 751 bp, Homo sapiens
agcagaagagactgtcagcagaccaccttggaggggatgcttggagctgcctaacgtgtgattcaaagatgaattccatgtgtttggagaagaagccctagcctcaacacaaaggttggccacattccagccaaggtagcacggagtgaaggcccgtggagggagagctgggcttttctgaactacttcagtacaccttgctgtgccttggcctgccgtgtttcatccccatggctgtcctcagtgatgtgcatggtcactgctcccttcaccactgagaagacgggcacaggacagtcaggggatgtgtccaaggtcccacagcaggaagggctggagccagaatgtggtctgagaggctggatatacaaagagacaatggcatgaccatctgtacaaatggaactatggcccacaacctgcagcagccagcccaggaagccaacccgtcacctgcagcagccaggatggatgctggcctgccctcagagtctgagagactctcctgccccacagtgtgggctccaccaccctcctgcctgctgtgggaaatcaggagggtgaaggtgaagctggacttggcccagaggtgcccacagggacgcccagagctgcacaagctccctccatcttgcctctgggaccagctctgcattgctccaaagccctcatcagtgtctgctttctgttgcaataactgaatacctgagattggacaatttataaagaaaaaaattatatctgacaattc

SEQ ID NO: 67789 - DNA, 1838 bp, Homo sapiens
  misc_feature (274)..(274): n is a, c, g, or t
  misc_feature (326)..(326): n is a, c, g, or t
  misc_feature (1032)..(1032): n is a, c, g, or t
  misc_feature (1612)..(1612): n is a, c, g, or t
  misc_feature (1709)..(1709): n is a, c, g, or t
  misc_feature (1780)..(1780): n is a, c, g, or t
  misc_feature (1824)..(1824): n is a, c, g, or t
atacaaaaattattacacagctatcagagcaagagggaggttagtaaaagctggtggaccttaaagtttctctacttttgcaagtgtaaaaactggggtaaagatagagtttgggataacggacacagccatagccaaagaatgagtctagtgtctatagagaagttgtgatatttggaattttccatgtgcaaacacacacgcacatgcacgcgcacacgcacacacaccacacactcctcacctttgccattttcatagggaaacatgaagnaacaagtatatggattttggaattgggcagtgttttatttcagccccatgtncgcttgctagctatgtgatatgtgactttgggcaacttgtttatcttttctgggaaaacatatacctctaggggtgcagtaagggataactgggaacagtggagtgtgtgcctggtacaaagcctgcggtgtagatgccatttaataaatgatggttttctctatcctgcatcttgagagtagatccaatctattgtttattctttacagtaggcatggtagagtaaaaggaacaaaggaatcgagggaggaagggaagaaaaaatgagaaaaaccataaggccaggcgcggtagctcacgccagtaatcctaatactttgggaagctgaggcgggtgggcggaccacgaagtcaggagttcgagaccagcctgaccaatatggcaaaaccccatctctactaaaaatacaaaaaaaaaaaaaaaaaaaaaaaagttagccgggtatggtggcacgtgcctgtaatcccagcttctggggaggctgaagcaggagaattgcttgaaaccgggaggtggaggttgcagtgagccgggatcacaccactgcactccagcctgggtgacagagtgagactccctctcaaaaaaaaaaaaaaaaaaaaaaaaaaaaaaagaaaaaggaaaaagaaaaaaaagcaaccatgagacgagcaagaagctaagtttacaaataaatgtgatccacacttctcaacatcaggacnggtccttcatgcttagattccaggtctcttcttgcgaatgggaacagtcatcacttatccaatgatgcatttaagagcaccaagttttaaaaagagacaaatgtcgaaaagaaatgccatttatcatcaaacaccattattaaacactagcttgttggcatatctgtaagtctggttgtcattttgctaggtggagagggcagaattttggaaagtatctaggccacacccatgtttcagaatagtaagtacaaaagccacaatgtattgatcacttagactcatcatatgtttgtccttttattttaaataccccaaggatggaggtctttctagcctaattttccagctaagaaaatcaaggataaaaaattttcttgtgttgttactttatccttagtacccccctgggaagtaggtataattagcctcatcttagagatgagaaaactgaggctcagagaggactgtcctgtaaccagaaagaggatgtgttaggatctgaacccatctgacgaaaggctatgctcttaattagtaacatttccctgccttgcaaggacacatgtaggtcacaggntacccagggaaggtaaatgctctgtccttttctcaccagtactacaacttagtaacagcctctggcccaaaatgagactggacattgactttaatgnatggaagtacacattcctaacatggattcattcagaagcacccagatttcacaagaggaaatgatgaggcntttttctgaggtgttgaaattgtgccctttgtcagtcacaaacnaaccaaaaaaaaaa

SEQ ID NO: 67790 - DNA, 432 bp, Homo sapiens
gcaaagcaggagcaaagccccttataaaaccatcagatcgtgtcagaactcactatcatgaaaacagcatggaggtaactacccccatgattcaattacctcccccacccggctccctcccatgacacgtggagattatgggaagtacaagatgagatttgggtggggtcacagccaagccatatcagcatgtgcggcaaagccaggctgggcgggcttgtctgaggtccctccatggcatacgcaggcattttctgtggtagctggggagggggcagtccccaggcctccggtggaatgcttgggtgggaggtaacagcagttgtgctgtgaccttgccactggggagggtgaggctgctttcagtggcagcagcccatgccagtgagtgggaacacgcaccccacttgcaccttggcagtggcagcccgc

SEQ ID NO: 67791 - DNA, 346 bp, Homo sapiens
gttatagctaacactgtgtacttcacactactgctatttattatttttctttttctatatagattactggcaacatttctagtttatcttttgtataaaagcagaaaaatagaacacctggctgtttcttctcacctcatagagtaatgatattttactttatcttttatttactctgatatatttaatacaatttttcatttcgcagtcttttgcagtagcttctcttttctcctttcaggtttcaaatcgtccttctttaagcccttgttttgtccttatttcttctgcagttatttagttacttgtctctctatccatgtcctatggcttggctattcgagtt

SEQ ID NO: 67792 - DNA, 673 bp, Homo sapiens
ttatttctcttttaccagttccttcctgaaatttccatcctggaatgaatttgttttatataagaaattgatttttgttgtttctctgcatttatgaatatgtcatcatacttgtgagagagacaagaaaagtaaaaaaattcagagtgcagagtgattaaaatataaagttgatatttgtatacacttttctatctctttctggttttatatttgcaacatcagtgcctatttgaccaagaaaacaaagatctagaaattcttgggggttcaagacttctgccttcttgagaggcagagagggattggaatgaatagctcacctcgtcacttggctgcagctgctcaatggaaattgccatagttcactattgggcaaagttagagctgcagttcccgaccctattggcctcaggtgccagtgggtccagtttcagggaagttggcagggaaacagatgagaaggaagttggaagagagacacaggcagtgtagtacattctgacttttctaaatctagacctgttagctggatagtatgtcctgctctttgattataaccctgagctagaaagaggaaacacatttatcttgtacctaaaagctgatcccacatgaagaaccaagtcatggaaagaaaactaagcgaggattttaagtgagatttgttatc

SEQ ID NO: 67793 - DNA, 963 bp, Homo sapiens
gcttagaaaactccagcaactgaagcacagactggtaactgagtagctacagggaattaatgcttctctttaagcacctaatttcatatctggaaatggcaaacagggatgaaaatcgattatgttttggagactccttttggacatgtatcagtgtgttgatttgcacaaaccaataaaagccctacattttttggaaatggatccctagatttcaagcatgtataatcactcaaagtggatatgatcacaggcattcttctcttgagctcagcaaaactatgcctaccaacaccgaagagaagtcaaagatttaaatgaaaaaaaattgcagatgatgttggtgagataataggatatgagcaatgaacccttgggtggggttccagggcacttaaattgcctcgtgtcttgagttccttaagatggactcaaacaaaaaattagtattatcaataacaggtaatactgtgtggattctaacaacattagaatcattagctggcaagtgtcaactctgaacaagatttgtcagcttatcataattccaaccagttaattgatattgttcgaatttatctcattttttctcaaaggaagtgctctattagggatcaaaaagtctcacctggttcttaaaacctaacacaatttgaccttgaatcctcgacactaaaaattacgttggttgggtatcagattgaaaatatgcatggaggctgggcgtggtggctcacacctgcaatcccagcactttgggaggccaaggcaggcagatcacctgaggtcaggagttcaagaccagcctggccaacatggcaaaaccccgtctctactaaaaatacaaaaactagccgggcatggtggtgtgtgcctgtaatcccagctactcgggaggctgaggtgggagaatcacttgaacctgggaagcagaggttgcagtgagccaagttcgcgccattg

SEQ ID NO: 67794 - DNA, 277 bp, Homo sapiens
cacagtataacaactatttacacaatatttacattgaattaggcattaaaagtaatctagagatgatttaaagtaattgggatgatgtgcataggttaaatccaagtactgcatcattttataaaagcgacatgaacatctgcagatgctggtgtccacaggggttgtggaaccaatctcctgcagataccaggacatgactgtacatttatcctacttacatgtaaataaagtaaaatagggttattaaaagacttccaacaacaataaaaatcca

SEQ ID NO: 67795 - DNA, 2047 bp, Homo sapiens
agccgggctccgggccggccgggctccgcgcctgtcataacccctcattgttcgcagctgatgtcactcgcagttgtgagcggccgcctctcccggggacaatgtgggactgagcggcccagccgccgtgccgccgccgccgccgccgcaggacagccccagcgagagccggccaggttgcagcgcggacacactcgcaggtcgctgtggccccagcctcgcctgacagaatgagcggctcggacgggggactggaggaggagccagagctcagcatcaccctcacgctgcggatgctgatgcacgggaaggaagtgggcagcatcatcgggaagaagggcgagactgtaaagcgaatccgggagcagagcagtgcccggatcaccatctccgagggctcctgccctgaacgcatcaccaccatcaccgggtctacagcagctgtcttccatgcagtctccatgattgctttcaaactggatgaggacctttgtgctgctcctgcaaatggtggaaatgtctccaggcctccagtgaccctgcgccttgtcatccctgccagtcagtgtggctcactgattgggaaggctggcaccaagatcaaggagatccgagagactacgggtgcccaggtacaggtggcaggggacctgctccccaactccacagagcgagctgttacggtatctggggtgcctgatgccatcatcctgtgtgtgcgccagatctgcgctgttatcctggagtccccacccaaaggagccactatcccctaccatccgagcctctccctaggtactgttcttctctctgccaaccagggcttctctgtccagggtcagtatggggctgtgaccccagctgaggtcaccaagctccagcagctctcaagccatgcggtcccctttgccacacccagcgtggtgccaggactggatcccggcacacagaccagctcacaggagttcttggttcccaacgatttgattggctgtgtgatcgggcgccagggcagcaagatcagcgagatccggcagatgtcaggggcacatatcaagatcgggaaccaagcagagggcgctggggagcggcatgtcaccatcactggctctccggtctccatcgccctggcccagtacctcatcactgcctgtctagagacggccaagtctacctctggggggacgcccagctcggcccccgcagacctgcctgcccccttctcgccacccctgacggccctgcccacagctccccctggcctgctgggcacaccctatgccatctccctctccaacttcatcggcctcaagcccatgcccttcttggctttaccacctgcttccccagggccgccgccgggcttggcggcctacactgccaagatggcagcagctaatgggagcaagaaggctgagcggcagaaattctccccctactgaggccagctgaggtacaggcaggggcaggcaggaccaccagcagggggctgcctctgcaccctacccgcccaaggagactccaccctggggtcccaaacgccgctaacgcccagacgcatggatgcaccccctaccctgcctccatctatgggagttctttctctcagagtgggggcagtttctggcccaggggtctgagctgcggcagccccagggcagggggccctacctcctcagctctgtgcttggatacagggagcagccaggagactccctagtgcccccaccatggcgggtgtcactcacgcactccccatcccttagggcttcctggcctactgcatccttgtgggagtcagggaggagggcccgttgggtagctggggccaggcttctctccccaccacctgcagatttcttgctgcttccactgatacccttttgactggaatgaactggctgggcttgtcagggggcaccccaaagagggggcactgccaggtagctgggggagtggcatggggcaggggcccagttctcagcagcagacactctgtacagttttttcaatccctgtttttgaataaatattctcagcgaccagg

SEQ ID NO: 67796 - DNA, 2436 bp, Homo sapiens
atttcttttagtgtctcagggtaagggaaaggctaggtacctaccatgtatgtgcttattgttttaattctcatcactctttggagatgggaatttgtatccccttctacagatggagaagctgaggctcagagggttgaatgggctccccaggcttacacagctcgtgagacacacataagcaccctggtcagagtgatgtgtggcgctcaaggtccatgcagtctctttcctctgggagtttgactagcccagctctggggtccccatgtaagggcaggggcagggtggactgggctcctctcgaacccctctttggctgcccctgccagagccggccaggttgcagcgcggacacactcgcaggtcgctgtggccccagcctcgcctgacagaatgagcggctcggacgggggactggaggaggagccagagctcagcatcaccctcacgctgcggatgctgatgcacgggaaggaagtgggcagcatcatcgggaagaagggcgagactgtaaagcgaatccgggagcaggtgaggatggagtttgggggaggagcccagggcacctgatgtggaggggagatccctgccccactttctctctgaaccactccttctgggctgaccagtgagtcccccagagggtggcagttttgagccttgcctcaggcctggtgagtggggcaggcagacaagttccggcaagggagcagggaagatgccccgctgcccggcgctcattctatatctgcagagcagtgcccggatcaccatctccgagggctcctgccctgaacgcatcaccaccatcaccgggtctacagcagctgtcttccatgcagtctccatgattgctttcaaactggatgaggacctttgtgctgctcctgcaaatggtggaaatgtctccaggcctccagtgaccctgcgccttgtcatccctgccagtcagtgtggctcactgattgggaaggctggcaccaagatcaaggagatccgagagactacgggtgcccaggtacaggtggcaggggacctgctccccaactccacagagcgagctgttacggtatctggggtgcctgatgccatcatcctgtgtgtgcgccagatctgcgctgttatcctggagtccccacccaaaggagccactatcccctaccatccgagcctctccctaggtactgttcttctctctgccaaccagggcttctctgtccagggtcagtatggggctgtgaccccagctgaggtcaccaagctccagcagctctcaagccatgcggtcccctttgccacacccagcgtggtgccaggactggatcccggcacacagaccagctcacaggagttcttggttcccaacgatttgattggctgtgtgatcgggcgccagggcagcaagatcagcgagatccggcagatgtcaggggcacatatcaagatcgggaaccaagcagagggcgctggggagcggcatgtcaccatcactggctctccggtctccatcgccctggcccagtacctcatcactgcctgtctagagacggccaagtctacctctggggggacgcccagctcggcccccgcagacctgcctgcccccttctcgccacccctgacggccctgcccacagctccccctggcctgctgggcacaccctatgccatctccctctccaacttcatcggcctcaagcccatgcccttcttggctttaccacctgcttccccagggccgccgccgggcttggcggcctacactgccaagatggcagcagctaatgggagcaagaaggctgagcggcagaaattctccccctactgaggccagctgaggtacaggcaggggcaggcaggaccaccagcagggggctgcctctgcaccctacccgcccaaggagactccaccctggggtcccaaacgccgctaacgcccagacgcatggatgcaccccctaccctgcctccatctatgggagttctttctctcagagtgggggcagtttctggcccaggggtctgagctgcggcagccccagggcagggggccctacctcctcagctctgtgcttggatacagggagcagccaggagactccctagtgcccccaccatggcgggtgtcactcacgcactccccatcccttagggcttcctggcctactgcatccttgtgggagtcagggaggagggcccgttgggtagctggggccaggcttctctccccaccacctgcagatttcttgctgcttccactgatacccttttgactggaatgaactggctgggcttgtcagggggcaccccaaagagggggcactgccaggtagctgggggagtggcatggggcaggggcccagttctcagcagcagacactctgtacagttttttcaatccctgtttttgaataaatattctcagcgaccagg

SEQ ID NO: 67797 - DNA, 604 bp, Homo sapiens
atttcttttagtgtctcagggtaagggaaaggctaggtacctaccatgtatgtgcttattgttttaattctcatcactctttggagatgggaatttgtatccccttctacagatggagaagctgaggctcagagggttgaatgggctccccaggcttacacagctcgtgagacacacataagcaccctggtcagagtgatgtgtggcgctcaaggtccatgcagtctctttcctctgggagtttgactagcccagctctggggtccccatgtaagggcaggggcagggtggactgggctcctctcgaacccctctttggctgcccctgccagagccggccaggttgcagcgcggacacactcgcaggtcgctgtggccccagcctcgcctgacagaatgagcggctcggacgggggactggaggaggagccagagctcagcatcaccctcacgctgcggatgctgatgcacgggaaggaagtgggcagcatcatcgggaaggtaggtgcctagctctgctctgtacatccccctccagctgaggcttcagcccagggaaggaggctgtgacctctaagttaagagtgattatctgttttgtacc

SEQ ID NO: 67798 - DNA, 571 bp, Homo sapiens
tttccaaataggatccctgtcttctagctaggcaaaggtctcagagacgactgaagcccaatccccactttcgaaggagcccgccctccaggaagaggactaacagatccagacaggagcagcctgaaaggggaggcagatggggctttggatagcctcacactagcaatgctagtcccactgtgtcccacctctctgtgaccttgggcaggttactgatcctctccaggcatcaggttctcctgtgtagtgaattcatctgctcagctaaccagtatgttagctgagttccagctgagctcagtatgttctgagcaccttctctggcctggctctgaactgagccctggggacataaggagaaggcagcagccttggctcctgctccaaggggctcctgggcttggctgtccagagaagcagaaaccaagcacgtcatcacaagtgctttgatgggggaagtgcaggtagctgggggagtggcatggggcaggggcccagttctcagcagcagacactctgtacagttttttcaatccctgtttttgaataaatattctcagcgaccagg

SEQ ID NO: 67799 - DNA, 156 bp, Homo sapiens
gcggccgcctactactactactgctcgaattcaagcttctaacgatgtacgggtagctgggggagtggcatggggcaggggcccagttctcagcagcagacactctgtacagttttttcaatccctgtttttgaataaatattctcagcgaccagg

SEQ ID NO: 67800 - DNA, 2130 bp, Homo sapiens
agccgggctccgggccggccgggctccgcgcctgtcataacccctcattgttcgcagctgatgtcactcgcagttgtgagcggccgcctctcccggggacaatgtgggactgagcggcccagccgccgtgccgccgccgccgccgccgcaggacagccccagcgagcctctggagtccctgtggcagaactcaaatggaaggaggagcagctgcacccaggggagcagggtgtcacctccgttggatagagccggccaggttgcagcgcggacacactcgcaggtcgctgtggccccagcctcgcctgacagaatgagcggctcggacgggggactggaggaggagccagagctcagcatcaccctcacgctgcggatgctgatgcacgggaaggaagtgggcagcatcatcgggaagaagggcgagactgtaaagcgaatccgggagcagagcagtgcccggatcaccatctccgagggctcctgccctgaacgcatcaccaccatcaccgggtctacagcagctgtcttccatgcagtctccatgattgctttcaaactggatgaggacctttgtgctgctcctgcaaatggtggaaatgtctccaggcctccagtgaccctgcgccttgtcatccctgccagtcagtgtggctcactgattgggaaggctggcaccaagatcaaggagatccgagagactacgggtgcccaggtacaggtggcaggggacctgctccccaactccacagagcgagctgttacggtatctggggtgcctgatgccatcatcctgtgtgtgcgccagatctgcgctgttatcctggagtccccacccaaaggagccactatcccctaccatccgagcctctccctaggtactgttcttctctctgccaaccagggcttctctgtccagggtcagtatggggctgtgaccccagctgaggtcaccaagctccagcagctctcaagccatgcggtcccctttgccacacccagcgtggtgccaggactggatcccggcacacagaccagctcacaggagttcttggttcccaacgatttgattggctgtgtgatcgggcgccagggcagcaagatcagcgagatccggcagatgtcaggggcacatatcaagatcgggaaccaagcagagggcgctggggagcggcatgtcaccatcactggctctccggtctccatcgccctggcccagtacctcatcactgcctgtctagagacggccaagtctacctctggggggacgcccagctcggcccccgcagacctgcctgcccccttctcgccacccctgacggccctgcccacagctccccctggcctgctgggcacaccctatgccatctccctctccaacttcatcggcctcaagcccatgcccttcttggctttaccacctgcttccccagggccgccgccgggcttggcggcctacactgccaagatggcagcagctaatgggagcaagaaggctgagcggcagaaattctccccctactgaggccagctgaggtacaggcaggggcaggcaggaccaccagcagggggctgcctctgcaccctacccgcccaaggagactccaccctggggtcccaaacgccgctaacgcccagacgcatggatgcaccccctaccctgcctccatctatgggagttctttctctcagagtgggggcagtttctggcccaggggtctgagctgcggcagccccagggcagggggccctacctcctcagctctgtgcttggatacagggagcagccaggagactccctagtgcccccaccatggcgggtgtcactcacgcactccccatcccttagggcttcctggcctactgcatccttgtgggagtcagggaggagggcccgttgggtagctggggccaggcttctctccccaccacctgcagatttcttgctgcttccactgatacccttttgactggaatgaactggctgggcttgtcagggggcaccccaaagagggggcactgccaggtagctgggggagtggcatggggcaggggcccagttctcagcagcagacactctgtacagttttttcaatccctgtttttgaataaatattctcagcgaccagg

SEQ ID NO: 67801 - DNA, 2490 bp, Homo sapiens
agccgggctccgggccggccgggctccgcgcctgtcataacccctcattgttcgcagctgatgtcactcgcagttgtgagcggccgcctctcccggggacaatgtgggactgagcggcccagccgccgtgccgccgccgccgccgccgcaggacagccccagcgagagccggccaggttgcagcgcggacacactcgcaggtcgctgtggccccagcctcgcctgacagaatgagcggctcggacgggggactggaggaggagccagagctcagcatcaccctcacgctgcggatgctgatgcacgggaaggaagtgggcagcatcatcgggaagaagggcgagactgtaaagcgaatccgggagcagagcagtgcccggatcaccatctccgagggctcctgccctgaacgcatcaccaccatcaccgggtctacagcagctgtcttccatgcagtctccatgattgctttcaaactggatgaggacctttgtgctgctcctgcaaatggtggaaatgtctccaggcctccagtgaccctgcgccttgtcatccctgccagtcagtgtggctcactgattgggaaggctggcaccaagatcaaggagatccgagagactacgggtgcccaggtacaggtggcaggggacctgctccccaactccacagagcgagctgttacggtatctggggtgcctgatgccatcatcctgtgtgtgcgccagatctgcgctgttatcctggagtccccacccaaaggagccactatcccctaccatccgagcctctccctaggtactgttcttctctctgccaaccagggcttctctgtccagggtcagtatggggctgtgaccccagctgaggtcaccaagctccagcagctctcaagccatgcggtcccctttgccacacccagcgtggtgccaggactggatcccggcacacagaccagctcacaggagttcttggttcccaacgatttgattggctgtgtgatcgggcgccagggcagcaagatcagcgagatccggcagatgtcaggggcacatatcaagatcgggaaccaagcagagggcgctggggagcggcatgtcaccatcactggctctccggtctccatcgccctggcccagtacctcatcactgcctgggtgagccgccgggctgggcggcagtgggggagcaggtcacggttctcatgtgcccaagaaaggcaggggtggggagaggaagctggcctcctctctctgtctgggcccgacctctgcctctcctaaccctactccaattccccatggtctttgcctaattcaccctctgttgccccatctcccccctctatatccacctctcattctccattgctgtgtcttttccctgggtctctggccaccccatttctccctgcacctcgtgctatatctgcttgtcctttcttcccttcctcttccacctttcccatcttccccttattgttctctgttcactacctctctcttgcctttcatctaatctcatgcccatctctgccctcattgcccctctctcactcccactttcccctttgtctcccctctatatccctctctccagtctagagacggccaagtctacctctggggggacgcccagctcggcccccgcagacctgcctgcccccttctcgccacccctgacggccctgcccacagctccccctggcctgctgggcacaccctatgccatctccctctccaacttcatcggcctcaagcccatgcccttcttggctttaccacctgcttccccagggccgccgccgggcttggcggcctacactgccaagatggcagcagctaatgggagcaagaaggctgagcggcagaaattctccccctactgaggccagctgaggtacaggcaggggcaggcaggaccaccagcagggggctgcctctgcaccctacccgcccaaggagactccaccctggggtcccaaacgccgctaacgcccagacgcatggatgcaccccctaccctgcctccatctatgggagttctttctctcagagtgggggcagtttctggcccaggggtctgagctgcggcagccccagggcagggggccctacctcctcagctctgtgcttggatacagggagcagccaggagactccctagtgcccccaccatggcgggtgtcactcacgcactccccatcccttagggcttcctggcctactgcatccttgtgggagtcagggaggagggcccgttgggtagctggggccaggcttctctccccaccacctgcagatttcttgctgcttccactgatacccttttgactggaatgaactggctgggcttgtcagggggcaccccaaagagggggcactgccaggtagctgggggagtggcatggggcaggggcccagttctcagcagcagacactctgtacagttttttcaatccctgtttttgaataaatattctcagcgaccagg

SEQ ID NO: 67802 - DNA, 1850 bp, Homo sapiens
agccgggctccgggccggccgggctccgcgcctgtcataacccctcattgttcgcagctgatgtcactcgcagttgtgagcggccgcctctcccggggacaatgtgggactgagcggcccagccgccgtgccgccgccgccgccgccgcaggacagccccagcgagagccggccaggttgcagcgcggacacactcgcaggtcgctgtggccccagcctcgcctgacagaatgagcggctcggacgggggactggaggaggagccagagctcagcatcaccctcacgctgcggatgctgatgcacgggaaggaagtgggcagcatcatcgggaagaagggcgagactgtaaagcgaatccgggagcagagcagtgcccggatcaccatctccgagggctcctgccctgaacgcatcaccaccatcaccgggtctacagcagctgtcttccatgcagtctccatgattgctttcaaactggatgaggacctttgtgctgctcctgcaaatggtggaaatgtctccaggcctccagtgaccctgcgccttgtcatccctgccagtcagtgtggctcactgattgggaaggctggcaccaagatcaaggagatccgagagactacgggtgcccaggtacaggtggcaggggacctgctccccaactccacagagcgagctgttacggtatctggggtgcctgatgccatcatcctgtgtgtgcgccagatctgcgctgttatcctggagtccccacccaaaggagccactatcccctaccatccgagcctctccctaggtactgttcttctctctgccaaccagggcttctctgtccagggtcagtatggggctgtgaccccagctgaggtcaccaagctccagcagctctcaagccatgcggtcccctttgccacacccagcgtggtgccaggactggatcccggcacacagaccagctcacaggagttcttggttcccaacgatttgattggctgtgtgatcgggcgccagggcagcaagatcagcgagatccggcagatgtcaggggcacatatcaagatcgggaaccaagcagagggcgctggggagcggcatgtcaccatcactggctctccggtctccatcgccctggcccagtacctcatcactgcctgggccgccgccgggcttggcggcctacactgccaagatggcagcagctaatgggagcaagaaggctgagcggcagaaattctccccctactgaggccagctgaggtacaggcaggggcaggcaggaccaccagcagggggctgcctctgcaccctacccgcccaaggagactccaccctggggtcccaaacgccgctaacgcccagacgcatggatgcaccccctaccctgcctccatctatgggagttctttctctcagagtgggggcagtttctggcccaggggtctgagctgcggcagccccagggcagggggccctacctcctcagctctgtgcttggatacagggagcagccaggagactccctagtgcccccaccatggcgggtgtcactcacgcactccccatcccttagggcttcctggcctactgcatccttgtgggagtcagggaggagggcccgttgggtagctggggccaggcttctctccccaccacctgcagatttcttgctgcttccactgatacccttttgactggaatgaactggctgggcttgtcagggggcaccccaaagagggggcactgccaggtagctgggggagtggcatggggcaggggcccagttctcagcagcagacactctgtacagttttttcaatccctgtttttgaataaatattctcagcgaccagg

SEQ ID NO: 67803 - DNA, 2620 bp, Homo sapiens
  misc_feature (285)..(285): n is a, c, g, or t
caggcagtaagatcacacacaaggtgtcacttcacatggagggttgcacagcagctgggcaaaggcgctcctcacttcccagacaatggggcggctgggcagaggtgctcctcatttcccgggtggtgaaaatgggttatcttttaaaggccgtaccttcagaaatagggagagcttaacaggagatatttgggggcaatgattcacacctctttctataaaaggttgcctcctccccaggggccccttaaaggctgaatctctgtcattattctctaaggcatnggttctcaaatgacgcactgagggcatagtcactgaaatcgatatttggatgacttccaaattcatatcttcatatatcttcatccctgacttcctctgacctttagacttttgcataccccgcccatgcggcagctgggggaatgtctagcaagggcagccagcatgaggctggccaggatgctcggagagcacagtccctgcatccactgctcatctccagcctctggagtccctgtggcagaactcaaatggaaggaggagcagctgcacccaggggagcagggtgtcacctccgttggataggccatttccagcacatagaagagagattggaaaccaacgtgcagaactgccagtcccctgacacgctgtgccccacccactgcagcccagtgctgaatgaaccctgcccagaggtgtctgtagtgagcttctgccctagtgacttttgagccggccaggttgcagcgcggacacactcgcaggtcgctgtggccccagcctcgcctgacagaatgagcggctcggacgggggactggaggaggagccagagctcagcatcaccctcacgctgcggatgctgatgcacgggaaggaagtgggcagcatcatcgggaagaagggcgagactgtaaagcgaatccgggagcagagcagtgcccggatcaccatctccgagggctcctgccctgaacgcatcaccaccatcaccgggtctacagcagctgtcttccatgcagtctccatgattgctttcaaactggatgaggacctttgtgctgctcctgcaaatggtggaaatgtctccaggcctccagtgaccctgcgccttgtcatccctgccagtcagtgtggctcactgattgggaaggctggcaccaagatcaaggagatccgagagactacgggtgcccaggtacaggtggcaggggacctgctccccaactccacagagcgagctgttacggtatctggggtgcctgatgccatcatcctgtgtgtgcgccagatctgcgctgttatcctggagtccccacccaaaggagccactatcccctaccatccgagcctctccctaggtactgttcttctctctgccaaccagggcttctctgtccagggtcagtatggggctgtgaccccagctgaggtcaccaagctccagcagctctcaagccatgcggtcccctttgccacacccagcgtggtgccaggactggatcccggcacacagaccagctcacaggagttcttggttcccaacgatttgattggctgtgtgatcgggcgccagggcagcaagatcagcgagatccggcagatgtcaggggcacatatcaagatcgggaaccaagcagagggcgctggggagcggcatgtcaccatcactggctctccggtctccatcgccctggcccagtacctcatcactgcctgtctagagacggccaagtctacctctggggggacgcccagctcggcccccgcagacctgcctgcccccttctcgccacccctgacggccctgcccacagctccccctggcctgctgggcacaccctatgccatctccctctccaacttcatcggcctcaagcccatgcccttcttggctttaccacctgcttccccagggccgccgccgggcttggcggcctacactgccaagatggcagcagctaatgggagcaagaaggctgagcggcagaaattctccccctactgaggccagctgaggtacaggcaggggcaggcaggaccaccagcagggggctgcctctgcaccctacccgcccaaggagactccaccctggggtcccaaacgccgctaacgcccagacgcatggatgcaccccctaccctgcctccatctatgggagttctttctctcagagtgggggcagtttctggcccaggggtctgagctgcggcagccccagggcagggggccctacctcctcagctctgtgcttggatacagggagcagccaggagactccctagtgcccccaccatggcgggtgtcactcacgcactccccatcccttagggcttcctggcctactgcatccttgtgggagtcagggaggagggcccgttgggtagctggggccaggcttctctccccaccacctgcagatttcttgctgcttccactgatacccttttgactggaatgaactggctgggcttgtcagggggcaccccaaagagggggcactgccaggtagctgggggagtggcatggggcaggggcccagttctcagcagcagacactctgtacagttttttcaatccctgtttttgaataaatattctcagcgaccagg

SEQ ID NO: 67804 - DNA, 1923 bp, Homo sapiens
agccgggctccgggccggccgggctccgcgcctgtcataacccctcattgttcgcagctgatgtcactcgcagttgtgagcggccgcctctcccggggacaatgtgggactgagcggcccagccgccgtgccgccgccgccgccgccgcaggacagccccagcgagagccggccaggttgcagcgcggacacactcgcaggtcgctgtggccccagcctcgcctgacagaatgagcggctcggacgggggactggaggaggagccagagctcagcatcaccctcacgctgcggatgctgatgcacgggaaggaagtgggcagcatcatcgggaagaagggcgagactgtaaagcgaatccgggagcagagcagtgcccggatcaccatctccgagggctcctgccctgaacgcatcaccaccatcaccgggtctacagcagctgtcttccatgcagtctccatgattgctttcaaactggatgaggacctttgtgctgctcctgcaaatggtggaaatgtctccaggcctccagtgaccctgcgccttgtcatccctgccagtcagtgtggctcactgattgggaaggctggcaccaagatcaaggagatccgagagactacgggtgcccaggtacaggtggcaggggacctgctccccaactccacagagcgagctgttacggtatctggggtgcctgatgccatcatcctgtgtgtgcgccagatctgcgctgttatcctggagtccccacccaaaggagccactatcccctaccatccgagcctctccctaggtactgttcttctctctgccaaccagggcttctctgtccagggtcagtatggggctgtgaccccagctgaggtcaccaagctccagcagctctcaagccatgcggtcccctttgccacacccagcgtggtgccaggactggatcccggcacacagaccagctcacaggagttcttggttcccaacgatttgattggctgtgtgatcgggcgccagggcagcaagatcagcgagatccggcagatgtcaggggcacatatcaagatcgggaaccaagcagagggcgctggggagcggcatgtcaccatcactggctctccggtctccatcgccctggcccagtacctcatcactgcctgtctagagacggccaagtctacctctggggggacgcccagctcggcccccgcagacctgcctgcccccttctcgccacccctgacggccctgcccacagctccccctggcctgctgggcacaccctatgccatctccctctccaacttcatcggcctcaagcccatgcccttcttggctttaccacctgcttccccagggccgccgccgggcttggcggcctacactgccaagatggcagcagctaatgggagcaagaaggctgagcggcagaaattctccccctactgaggccagctgaggtacaggcaggggcaggcaggaccaccagcagggggctgcctctgcaccctacccgcccaaggagactccaccctggggtcccaaacgccgctaacgcccagacgcatggatgcaccccctaccctgcctccatctatgggagttctttctctcagagtgggggcagtttctggcccaggggtctgagctgcggcagccccagggcagggggccctacctcctcagctctgtgcttggatacagggagcagccaggagactccctagtgcccccaccatggcgggtgtcactcacgcactccccatcccttagggcttcctggcctactgcatccttgtgggagtcagggaggagggcccgttggggtagctgggggagtggcatggggcaggggcccagttctcagcagcagacactctgtacagttttttcaatccctgtttttgaataaatattctcagcgaccagg

SEQ ID NO: 67805 - DNA, 1843 bp, Homo sapiens
tctagagtatcccaatatctgtgaaatgtgactggtgcagagagccagagcttaatatatgcctcacgtcaaggatttaatttcacagcaaggaagtgttgatcatctatagagaagaaccggctgagactgattactcgcacattccagagaggcacaacagctagtcctgttcagtatctccgagaactcttgtcctgagctcataaacatcttaaccggctctaactatcatgctttgcatatcatcatcgctgattgctttaaatcttggattacgagcttttgcttaggtctagcgaattctagattctttctcctggtctctcactatccttgtcttagatatccctgccagtcagtgtggctcactgattgggaaggctggcaccaagatcaaggagatccgagagactacgggtgcccaggtacaggtggcaggggacctgctccccaactccacagagcgagctgttacggtatctggggtgcctgatgccatcatcctgtgtgtgcgccagatctgcgctgttatcctggagtccccacccaaaggagccactatcccctaccatccgagcctctccctaggtactgttcttctctctgccaaccagggcttctctgtccagggtcagtatggggctgtgaccccagctgaggtcaccaagctccagcagctctcaagccatgcggtcccctttgccacacccagcgtggtgccaggactggatcccggcacacagaccagctcacaggagttcttggttcccaacgatttgattggctgtgtgatcgggcgccagggcagcaagatcagcgagatccggcagatgtcaggggcacatatcaagatcgggaaccaagcagagggcgctggggagcggcatgtcaccatcactggctctccggtctccatcgccctggcccagtacctcatcactgcctgtctagagacggccaagtctacctctggggggacgcccagctcggcccccgcagacctgcctgcccccttctcgccacccctgacggccctgcccacagctccccctggcctgctgggcacaccctatgccatctccctctccaacttcatcggcctcaagcccatgcccttcttggctttaccacctgcttccccagggccgccgccgggcttggcggcctacactgccaagatggcagcagctaatgggagcaagaaggctgagcggcagaaattctccccctactgaggccagctgaggtacaggcaggggcaggcaggaccaccagcagggggctgcctctgcaccctacccgcccaaggagactccaccctggggtcccaaacgccgctaacgcccagacgcatggatgcaccccctaccctgcctccatctatgggagttctttctctcagagtgggggcagtttctggcccaggggtctgagctgcggcagccccagggcagggggccctacctcctcagctctgtgcttggatacagggagcagccaggagactccctagtgcccccaccatggcgggtgtcactcacgcactccccatcccttagggcttcctggcctactgcatccttgtgggagtcagggaggagggcccgttgggtagctggggccaggcttctctccccaccacctgcagatttcttgctgcttccactgatacccttttgactggaatgaactggctgggcttgtcagggggcaccccaaagagggggcactgccaggtagctgggggagtggcatggggcaggggcccagttctcagcagcagacactctgtacagttttttcaatccctgtttttgaataaatattctcagcgaccagg

SEQ ID NO: 67806 - DNA, 1918 bp, Homo sapiens
agccgggctccgggccggccgggctccgcgcctgtcataacccctcattgttcgcagctgatgtcactcgcagttgtgagcggccgcctctcccggggacaatgtgggactgagcggcccagccgccgtgccgccgccgccgccgccgcaggacagccccagcgagagccggccaggttgcagcgcggacacactcgcaggtcgctgtggccccagcctcgcctgacagaatgagcggctcggacgggggactggaggaggagccagagctcagcatcaccctcacgctgcggatgctgatgcacgggaaggaagtgggcagcatcatcgggaagaagggcgagactgtaaagcgaatccgggagcagagcagtgcccggatcaccatctccgagggctcctgccctgaacgcatcaccaccatcaccgggtctacagcagctgtcttccatgcagtctccatgattgctttcaaactggatgaggacctttgtgctgctcctgcaaatggtggaaatgtctccaggcctccagtgaccctgcgccttgtcatccctgccagtcagtgtggctcactgattgggaaggctggcaccaagatcaaggagatccgagagtccccacccaaaggagccactatcccctaccatccgagcctctccctaggtactgttcttctctctgccaaccagggcttctctgtccagggtcagtatggggctgtgaccccagctgaggtcaccaagctccagcagctctcaagccatgcggtcccctttgccacacccagcgtggtgccaggactggatcccggcacacagaccagctcacaggagttcttggttcccaacgatttgattggctgtgtgatcgggcgccagggcagcaagatcagcgagatccggcagatgtcaggggcacatatcaagatcgggaaccaagcagagggcgctggggagcggcatgtcaccatcactggctctccggtctccatcgccctggcccagtacctcatcactgcctgtctagagacggccaagtctacctctggggggacgcccagctcggcccccgcagacctgcctgcccccttctcgccacccctgacggccctgcccacagctccccctggcctgctgggcacaccctatgccatctccctctccaacttcatcggcctcaagcccatgcccttcttggctttaccacctgcttccccagggccgccgccgggcttggcggcctacactgccaagatggcagcagctaatgggagcaagaaggctgagcggcagaaattctccccctactgaggccagctgaggtacaggcaggggcaggcaggaccaccagcagggggctgcctctgcaccctacccgcccaaggagactccaccctggggtcccaaacgccgctaacgcccagacgcatggatgcaccccctaccctgcctccatctatgggagttctttctctcagagtgggggcagtttctggcccaggggtctgagctgcggcagccccagggcagggggccctacctcctcagctctgtgcttggatacagggagcagccaggagactccctagtgcccccaccatggcgggtgtcactcacgcactccccatcccttagggcttcctggcctactgcatccttgtgggagtcagggaggagggcccgttgggtagctggggccaggcttctctccccaccacctgcagatttcttgctgcttccactgatacccttttgactggaatgaactggctgggcttgtcagggggcaccccaaagagggggcactgccaggtagctgggggagtggcatggggcaggggcccagttctcagcagcagacactctgtacagttttttcaatccctgtttttgaataaatattctcagcgaccagg

SEQ ID NO: 67807 - DNA, 1464 bp, Homo sapiens
agccgggctccgggccggccgggctccgcgcctgtcataacccctcattgttcgcagctgatgtcactcgcagttgtgagcggccgcctctcccggggacaatgtgggactgagcggcccagccgccgtgccgccgccgccgccgccgcaggacagccccagcgagagccggccaggttgcagcgcggacacactcgcaggtcgctgtggccccagcctcgcctgacagaatgagcggctcggacgggggactggaggaggagccagagctcagcatcaccctcacgctgcggatgctgatgcacgggaaggaagtgggcagcatcatcgggaagaagggcgagactgtaaagcgaatccgggagcagagcagtgcccggatcaccatctccgagggctcctgccctgaacgcatcaccaccatcaccgggtctacagcagctgtcttccatgcagtctccatgattgctttcaaactggatgaggacctttgtgctgctcctgcaaatggtggaaatgtctccaggcctccagtgaccctgcgccttgtcatccctgccagtcagtgtggctcactgattgggaaggctggcaccaagatcaaggagatccgagagactacgggtgcccaggtacaggtggcaggggacctgctccccaactccacagagcgagctgttacggtatctggggtgcctgatgccatcatcctgtgtgtgcgccagatctgcgctgttatcctggagtccccacccaaaggagccactatcccctaccatccgagcctctccctaggtactgttcttctctctgccaaccagggcttctctgtccagggtcagtatggggctgtgaccccagctgaggtcaccaagctccagcagctctcaagccatgcggtcccctttgccacacccagcgtggtgccaggactggatcccggcacacagaccagctcacaggagttcttggttcccaacgatttgattggctgtgtgatcgggcgccagggcagcaagatcagcgagatccggcagatgtcaggggcacatatcaagatcgggaaccaagcagagggcgctggggagcggcatgtcaccatcactggctctccggtctccatcgccctggcccagtacctcatcactgcctgggccgccgccgggcttggcggcctacactgccaagatggcagcagctaatgggagcaagaatcagggaggagggcccgttgggtagctggggccaggcttctctccccaccacctgcagatttcttgctgcttccactgatacccttttgactggaatgaactggctgggcttgtcagggggcaccccaaagagggggcactgccaggtagctgggggagtggcatggggcaggggcccagttctcagcagcagacactctgtacagttttttcaatccctgtttttgaataaatattctcagcgaccagg

SEQ ID NO: 67808 - DNA, 2361 bp, Homo sapiens
agccgggctccgggccggccgggctccgcgcctgtcataacccctcattgttcgcagctgatgtcactcgcagttgtgagcggccgcctctcccggggacaatgtgggactgagcggcccagccgccgtgccgccgccgccgccgccgcaggacagccccagcgagagccggccaggttgcagcgcggacacactcgcaggtcgctgtggccccagcctcgcctgacagaatgagcggctcggacgggggactggaggaggagccagagctcagcatcaccctcacgctgcggatgctgatgcacgggaaggaagtgggcagcatcatcgggaagaagggcgagactgtaaagcgaatccgggagcagagcagtgcccggatcaccatctccgagggctcctgccctgaacgcatcaccaccatcaccgggtctacagcagctgtcttccatgcagtctccatgattgctttcaaactggatgaggacctttgtgctgctcctgcaaatggtggaaatgtctccaggcctccagtgaccctgcgccttgtcatccctgccagtcagtgtggctcactgattgggaaggctggcaccaagatcaaggagatccgagagtccccacccaaaggagccactatcccctaccatccgagcctctccctaggtactgttcttctctctgccaaccagggcttctctgtccagggtcagtatggggctgtgaccccagctgaggtcaccaagctccagcagctctcaagccatgcggtcccctttgccacacccagcgtggtgccaggactggatcccggcacacagaccagctcacaggagttcttggttcccaacgatttgattggctgtgtgatcgggcgccagggcagcaagatcagcgagatccggcagatgtcaggggcacatatcaagatcgggaaccaagcagagggcgctggggagcggcatgtcaccatcactggctctccggtctccatcgccctggcccagtacctcatcactgcctgggtgagccgccgggctgggcggcagtgggggagcaggtcacggttctcatgtgcccaagaaaggcaggggtggggagaggaagctggcctcctctctctgtctgggcccgacctctgcctctcctaaccctactccaattccccatggtctttgcctaattcaccctctgttgccccatctcccccctctatatccacctctcattctccattgctgtgtcttttccctgggtctctggccaccccatttctccctgcacctcgtgctatatctgcttgtcctttcttcccttcctcttccacctttcccatcttccccttattgttctctgttcactacctctctcttgcctttcatctaatctcatgcccatctctgccctcattgcccctctctcactcccactttcccctttgtctcccctctatatccctctctccagtctagagacggccaagtctacctctggggggacgcccagctcggcccccgcagacctgcctgcccccttctcgccacccctgacggccctgcccacagctccccctggcctgctgggcacaccctatgccatctccctctccaacttcatcggcctcaagcccatgcccttcttggctttaccacctgcttccccagggccgccgccgggcttggcggcctacactgccaagatggcagcagctaatgggagcaagaaggctgagcggcagaaattctccccctactgaggccagctgaggtacaggcaggggcaggcaggaccaccagcagggggctgcctctgcaccctacccgcccaaggagactccaccctggggtcccaaacgccgctaacgcccagacgcatggatgcaccccctaccctgcctccatctatgggagttctttctctcagagtgggggcagtttctggcccaggggtctgagctgcggcagccccagggcagggggccctacctcctcagctctgtgcttggatacagggagcagccaggagactccctagtgcccccaccatggcgggtgtcactcacgcactccccatcccttagggcttcctggcctactgcatccttgtgggagtcagggaggagggcccgttgggtagctggggccaggcttctctccccaccacctgcagatttcttgctgcttccactgatacccttttgactggaatgaactggctgggcttgtcagggggcaccccaaagagggggcactgccaggtagctgggggagtggcatggggcaggggcccagttctcagcagcagacactctgtacagttttttcaatccctgtttttgaataaatattctcagcgaccagg

SEQ ID NO: 67809 - DNA, 1418 bp, Homo sapiens
tttccaaataggatccctgtcttctagctaggcaaaggtctcagagacgactgaagcccaatccccactttcgaaggagcccgccctccaggaagaggactaacagatccagacaggagcagcctgaaaggggaggcagatggggctttggatagcctctccctaggtactgttcttctctctgccaaccagggcttctctgtccagggtcagtatggggctgtgaccccagctgaggtcaccaagctccagcagctctcaagccatgcggtcccctttgccacacccagcgtggtgccaggactggatcccggcacacagaccagctcacaggagttcttggttcccaacgatttgattggctgtgtgatcgggcgccagggcagcaagatcagcgagatccggcagatgtcaggggcacatatcaagatcgggaaccaagcagagggcgctggggagcggcatgtcaccatcactggctctccggtctccatcgccctggcccagtacctcatcactgcctgtctagagacggccaagtctacctctggggggacgcccagctcggcccccgcagacctgcctgcccccttctcgccacccctgacggccctgcccacagctccccctggcctgctgggcacaccctatgccatctccctctccaacttcatcggcctcaagcccatgcccttcttggctttaccacctgcttccccagggccgccgccgggcttggcggcctacactgccaagatggcagcagctaatgggagcaagaaggctgagcggcagaaattctccccctactgaggccagctgaggtacaggcaggggcaggcaggaccaccagcagggggctgcctctgcaccctacccgcccaaggagactccaccctggggtcccaaacgccgctaacgcccagacgcatggatgcaccccctaccctgcctccatctatgggagttctttctctcagagtgggggcagtttctggcccaggggtctgagctgcggcagccccagggcagggggccctacctcctcagctctgtgcttggatacagggagcagccaggagactccctagtgcccccaccatggcgggtgtcactcacgcactccccatcccttagggcttcctggcctactgcatccttgtgggagtcagggaggagggcccgttgggtagctggggccaggcttctctccccaccacctgcagatttcttgctgcttccactgatacccttttgactggaatgaactggctgggcttgtcagggggcaccccaaagagggggcactgccaggtagctgggggagtggcatggggcaggggcccagttctcagcagcagacactctgtacagttttttcaatccctgtttttgaataaatattctcagcgaccagg

SEQ ID NO: 67810 - DNA, 869 bp, Homo sapiens
agccgggctccgggccggccgggctccgcgcctgtcataacccctcattgttcgcagctgatgtcactcgcagttgtgagcggccgcctctcccggggacaatgtgggactgagcggcccagccgccgtgccgccgccgccgccgccgcaggacagccccagcgagagccggccaggttgcagcgcggacacactcgcaggtcgctgtggccccagcctcgcctgacagaatgagcggctcggacgggggactggaggaggagccagagctcagcatcaccctcacgctgcggatgctgatgcacgggaaggaagtgggcagcatcatcgggaagaagggcgagactgtaaagcgaatccgggagcagagcagtgcccggatcaccatctccgagggctcctgccctgaacgcatcaccaccatcaccgggtctacagcagctgtcttccatgcagtctccatgattgctttcaaactggatgaggacctttgtgctgctcctgcaaatggtggaaatgtctccaggcctccagtgaccctgcgccttgtcatccctgccagtcagtgtggctcactgattgggaaggctggcaccaagatcaaggagatccgagagactacgggtgcccaggtacaggtggcaggggacctgctccccaactccacagagcgagctgttacggtatctggggtgcctgatgccatcatcctgtgtgtgcgccagatctgcgctgttatcctggagtccccacccaaaggagccactatcccctaccatccgagcctctccctaggtactgttcttctctctgccaaccagatctgcctgtatcctgatccccacccactcgcctttagagatcctcta

SEQ ID NO: 67811 - DNA, 2603 bp, Homo sapiens
atttcttttagtgtctcagggtaagggaaaggctaggtacctaccatgtatgtgcttattgttttaattctcatcactctttggagatgggaatttgtatccccttctacagatggagaagctgaggctcagagggttgaatgggctccccaggcttacacagctcgtgagacacacataagcaccctggtcagagtgatgtgtggcgctcaaggtccatgcagtctctttcctctgggagtttgactagcccagctctggggtccccatgtaagggcaggggcagggtggactgggctcctctcgaacccctctttggctgcccctgccagagccggccaggttgcagcgcggacacactcgcaggtcgctgtggccccagcctcgcctgacagaatgagcggctcggacgggggactggaggaggagccagagctcagcatcaccctcacgctgcggatgctgatgcacgggaaggaagtgggcagcatcatcgggaagaagggcgagactgtaaagcgaatccgggagcaggtgaggatggagtttgggggaggagcccagggcacctgatgtggaggggagatccctgccccactttctctctgaaccactccttctgggctgaccagtgagtcccccagagggtggcagttttgagccttgcctcaggcctggtgagtggggcaggcagacaagttccggcaagggagcagggaagatgccccgctgcccggcgctcattctatatctgcagagcagtgcccggatcaccatctccgagggctcctgccctgaacgcatcaccaccatcaccgggtctacagcagctgtcttccatgcagtctccatgattgctttcaaactggatgaggacctttgtgctgctcctgcaaatggtggaaatgtctccaggcctccagtgaccctgcgccttgtcatccctgccagtcagtgtggctcactgattgggaaggctggcaccaagatcaaggagatccgagagaggtgaggggcgagatataccacccacagggaatccggggcaagggagcagttgtaagaggggtgttgggcttatggcgtcctccccacctagagagctctgagcctgggcagcccttttctgggttatgggagcagccagaagtggcccctgttctctgtttgcagactacgggtgcccaggtacaggtggcaggggacctgctccccaactccacagagcgagctgttacggtatctggggtgcctgatgccatcatcctgtgtgtgcgccagatctgcgctgttatcctggagtccccacccaaaggagccactatcccctaccatccgagcctctccctaggtactgttcttctctctgccaaccagggcttctctgtccagggtcagtatggggctgtgaccccagctgaggtcaccaagctccagcagctctcaagccatgcggtcccctttgccacacccagcgtggtgccaggactggatcccggcacacagaccagctcacaggagttcttggttcccaacgatttgattggctgtgtgatcgggcgccagggcagcaagatcagcgagatccggcagatgtcaggggcacatatcaagatcgggaaccaagcagagggcgctggggagcggcatgtcaccatcactggctctccggtctccatcgccctggcccagtacctcatcactgcctgtctagagacggccaagtctacctctggggggacgcccagctcggcccccgcagacctgcctgcccccttctcgccacccctgacggccctgcccacagctccccctggcctgctgggcacaccctatgccatctccctctccaacttcatcggcctcaagcccatgcccttcttggctttaccacctgcttccccagggccgccgccgggcttggcggcctacactgccaagatggcagcagctaatgggagcaagaaggctgagcggcagaaattctccccctactgaggccagctgaggtacaggcaggggcaggcaggaccaccagcagggggctgcctctgcaccctacccgcccaaggagactccaccctggggtcccaaacgccgctaacgcccagacgcatggatgcaccccctaccctgcctccatctatgggagttctttctctcagagtgggggcagtttctggcccaggggtctgagctgcggcagccccagggcagggggccctacctcctcagctctgtgcttggatacagggagcagccaggagactccctagtgcccccaccatggcgggtgtcactcacgcactccccatcccttagggcttcctggcctactgcatccttgtgggagtcagggaggagggcccgttgggtagctggggccaggcttctctccccaccacctgcagatttcttgctgcttccactgatacccttttgactggaatgaactggctgggcttgtcagggggcaccccaaagagggggcactgccaggtagctgggggagtggcatggggcaggggcccagttctcagcagcagacactctgtacagttttttcaatccctgtttttgaataaatattctcagcgaccagg

SEQ ID NO: 67812 - DNA, 2138 bp, Homo sapiens
agccgggctccgggccggccgggctccgcgcctgtcataacccctcattgttcgcagctgatgtcactcgcagttgtgagcggccgcctctcccggggacaatgtgggactgagcggcccagccgccgtgccgccgccgccgccgccgcaggacagccccagcgaggccatttccagcacatagaagagagattggaaaccaacgtgcagaactgccagtcccctgacacgctgtgccccacccactgcagcccagtgctgaatgaaccctgcccagaggtgtctgtagtgagcttctgccctagtgacttttggtaggtgggagtgtgcctcaattcccccctcaacccctgcctcaagcctttaccaggcagtggcaagacctgaccacacccgaggcctccctgccttcaaggcttcccatggctgctccagcttcctccccagctgctcttctgtgctccatccaccatctggctgctggacgaaagtgcctctcatatggaagccggccaggttgcagcgcggacacactcgcaggtcgctgtggccccagcctcgcctgacagaatgagcggctcggacgggggactggaggaggagccagagctcagcatcaccctcacgctgcggatgctgatgcacgggaaggaagtgggcagcatcatcgggaagaagggcgagactgtaaagcgaatccgggagcagagcagtgcccggatcaccatctccgagggctcctgccctgaacgcatcaccaccatcaccgggtctacagcagctgtcttccatgcagtctccatgattgctttcaaactggatgaggacctttgtgctgctcctgcaaatggtggaaatgtctccaggcctccagtgaccctgcgccttgtcatccctgccagtcagtgtggctcactgattgggaaggctggcaccaagatcaaggagatccgagaggtcaccaagctccagcagctctcaagccatgcggtcccctttgccacacccagcgtggtgccaggactggatcccggcacacagaccagctcacaggagttcttggttcccaacgatttgattggctgtgtgatcgggcgccagggcagcaagatcagcgagatccggcagatgtcaggggcacatatcaagatcgggaaccaagcagagggcgctggggagcggcatgtcaccatcactggctctccggtctccatcgccctggcccagtacctcatcactgcctgtctagagacggccaagtctacctctggggggacgcccagctcggcccccgcagacctgcctgcccccttctcgccacccctgacggccctgcccacagctccccctggcctgctgggcacaccctatgccatctccctctccaacttcatcggcctcaagcccatgcccttcttggctttaccacctgcttccccagggccgccgccgggcttggcggcctacactgccaagatggcagcagctaatgggagcaagaaggctgagcggcagaaattctccccctactgaggccagctgaggtacaggcaggggcaggcaggaccaccagcagggggctgcctctgcaccctacccgcccaaggagactccaccctggggtcccaaacgccgctaacgcccagacgcatggatgcaccccctaccctgcctccatctatgggagttctttctctcagagtgggggcagtttctggcccaggggtctgagctgcggcagccccagggcagggggccctacctcctcagctctgtgcttggatacagggagcagccaggagactccctagtgcccccaccatggcgggtgtcactcacgcactccccatcccttagggcttcctggcctactgcatccttgtgggagtcagggaggagggcccgttgggtagctggggccaggcttctctccccaccacctgcagatttcttgctgcttccactgatacccttttgactggaatgaactggctgggcttgtcagggggcaccccaaagagggggcactgccaggtagctgggggagtggcatggggcaggggcccagttctcagcagcagacactctgtacagttttttcaatccctgtttttgaataaatattctcagcgaccagg

SEQ ID NO: 67813 - DNA, 2374 bp, Homo sapiens
agccgggctccgggccggccgggctccgcgcctgtcataacccctcattgttcgcagctgatgtcactcgcagttgtgagcggccgcctctcccggggacaatgtgggactgagcggcccagccgccgtgccgccgccgccgccgccgcaggacagccccagcgagagccggccaggttgcagcgcggacacactcgcaggtcgctgtggccccagcctcgcctgacagaatgagcggctcggacgggggactggaggaggagccagagctcagcatcaccctcacgctgcggatgctgatgcacgggaaggaagtgggcagcatcatcgggaagaagggcgagactgtaaagcgaatccgggagcagagcagtgcccggatcaccatctccgagggctcctgccctgaacgcatcaccaccatcaccgggtctacagcagctgtcttccatgcagtctccatgattgctttcaaactggatgaggacctttgtgctgctcctgcaaatggtggaaatgtctccaggcctccagtgaccctgcgccttgtcatccctgccagtcagtgtggctcactgattgggaaggctggcaccaagatcaaggagatccgagagactacgggtgcccaggtacaggtggcaggggacctgctccccaactccacagagcgagctgttacggtatctggggtgcctgatgccatcatcctgtgtgtgcgccagatctgcgctgttatcctggagtccccacccaaaggagccactatcccctaccatccgagcctctccctaggtactgttcttctctctgccaaccagggcttctctgtccagggtcagtatggggctgtgaccccagctgaggtcaccaagctccagcagctctcaagccatgcggtcccctttgccacacccagcgtggtgccaggactggatcccggcacacagaccagctcacaggagttcttggttcccaacgatttgattggctgtgtgatcgggcgccagggcagcaagatcagcgagatccggcagatgtcaggggcacatatcaagatcgggaaccaagcagagggcgctggggagcggcatgtcaccatcactggctctccggtctccatcgccctggcccagtacctcatcactgcctgtctagagacggccaagtctacctctggggggacgcccagctcggcccccgcagacctgcctgcccccttctcgccacccctgacggccctgcccacagctccccctggcctgctgggcacaccctatgccatctccctctccaacttcatcggcctcaagcccatgcccttcttggctttaccacctgcttccccagggccgccgccgggcttggcggcctacactgccaagatggcagcagctaatgggagcaagaaggctgagcggcagaaattctccccctactgaggccagctgaggtacaggcaggggcaggcaggaccaccagcagggggctgcctctgcaccctacccgcccaaggagactccaccctggggtcccaaacgccgctaacgcccagacgcatggatgcaccccctaccctgcctccatctatgggagttctttctctcagagtgggggcagtttctggcccaggggtctgagctgcggcagccccagggcagggggccctacctcctcagctctgtgcttggatacagggagcagccaggagactccctagtgcccccaccatggcgggtgtcactcacgcactccccatcccttagggcttcctggcctactgcatccttgtgggagtcagggaggagggcccgttgggtagctggggccaggcttctctccccaccacctgcagatttcttgctgcttccactgatacccttttgactggaatgaactggctgggcttgtcagggggcaccccaaagagggggcactgccaggtagctgggggagtggcatggggcaggggcccagttctcagcagcagacactctgtacagttttttcaatccctgtttttgaataaatattctcagcgaccaggaaaaaaaaaaagaaaaaaaaaaaagaaaaaaaaaaaaaaaaaaaaaaaaaaaaaaaaaaaagagagaagaaaaaaaaaaaaaagggggggggggggggagaaaatcccctcccgggggggccgcacaaagacgagacgcccccgcggctaggtgggtgacaaaagagagggggcccaccgaaagagggagacggcataaatacgaccgcaaggagaaccgacgagggcggccggaaaagccaacaagagacggcgaagcgggcagaaaaaaagagcacggaggaacaaaacttgggggagagcagacacaacctacacgcgcgagaa

SEQ ID NO: 67814 - DNA, 2195 bp, Homo sapiens
agccgggctccgggccggccgggctccgcgcctgtcataacccctcattgttcgcagctgatgtcactcgcagttgtgagcggccgcctctcccggggacaatgtgggactgagcggcccagccgccgtgccgccgccgccgccgccgcaggacagccccagcgaggccatttccagcacatagaagagagattggaaaccaacgtgcagaactgccagtcccctgacacgctgtgccccacccactgcagcccagtgctgaatgaaccctgcccagaggtgtctgtagtgagcttctgccctagtgacttttgagccggccaggttgcagcgcggacacactcgcaggtcgctgtggccccagcctcgcctgacagaatgagcggctcggacgggggactggaggaggagccagagctcagcatcaccctcacgctgcggatgctgatgcacgggaaggaagtgggcagcatcatcgggaagaagggcgagactgtaaagcgaatccgggagcagagcagtgcccggatcaccatctccgagggctcctgccctgaacgcatcaccaccatcaccgggtctacagcagctgtcttccatgcagtctccatgattgctttcaaactggatgaggacctttgtgctgctcctgcaaatggtggaaatgtctccaggcctccagtgaccctgcgccttgtcatccctgccagtcagtgtggctcactgattgggaaggctggcaccaagatcaaggagatccgagagactacgggtgcccaggtacaggtggcaggggacctgctccccaactccacagagcgagctgttacggtatctggggtgcctgatgccatcatcctgtgtgtgcgccagatctgcgctgttatcctggagtccccacccaaaggagccactatcccctaccatccgagcctctccctaggtactgttcttctctctgccaaccagggcttctctgtccagggtcagtatggggctgtgaccccagctgaggtcaccaagctccagcagctctcaagccatgcggtcccctttgccacacccagcgtggtgccaggactggatcccggcacacagaccagctcacaggagttcttggttcccaacgatttgattggctgtgtgatcgggcgccagggcagcaagatcagcgagatccggcagatgtcaggggcacatatcaagatcgggaaccaagcagagggcgctggggagcggcatgtcaccatcactggctctccggtctccatcgccctggcccagtacctcatcactgcctgtctagagacggccaagtctacctctggggggacgcccagctcggcccccgcagacctgcctgcccccttctcgccacccctgacggccctgcccacagctccccctggcctgctgggcacaccctatgccatctccctctccaacttcatcggcctcaagcccatgcccttcttggctttaccacctgcttccccagggccgccgccgggcttggcggcctacactgccaagatggcagcagctaatgggagcaagaaggctgagcggcagaaattctccccctactgaggccagctgaggtacaggcaggggcaggcaggaccaccagcagggggctgcctctgcaccctacccgcccaaggagactccaccctggggtcccaaacgccgctaacgcccagacgcatggatgcaccccctaccctgcctccatctatgggagttctttctctcagagtgggggcagtttctggcccaggggtctgagctgcggcagccccagggcagggggccctacctcctcagctctgtgcttggatacagggagcagccaggagactccctagtgcccccaccatggcgggtgtcactcacgcactccccatcccttagggcttcctggcctactgcatccttgtgggagtcagggaggagggcccgttgggtagctggggccaggcttctctccccaccacctgcagatttcttgctgcttccactgatacccttttgactggaatgaactggctgggcttgtcagggggcaccccaaagagggggcactgccaggtagctgggggagtggcatggggcaggggcccagttctcagcagcagacactctgtacagttttttcaatccctgtttttgaataaatattctcagcgaccagg

SEQ ID NO: 67815 - DNA, 1996 bp, Homo sapiens
agccgggctccgggccggccgggctccgcgcctgtcataacccctcattgttcgcagctgatgtcactcgcagttgtgagcggccgcctctcccggggacaatgtgggactgagcggcccagccgccgtgccgccgccgccgccgccgcaggacagccccagcgagagccggccaggttgcagcgcggacacactcgcaggtcgctgtggccccagcctcgcctgacagaatgagcggctcggacgggggactggaggaggagccagagctcagcatcaccctcacgctgcggatgctgatgcacgggaaggaagtgggcagcatcatcgggaagaagggcgagactgtaaagcgaatccgggagcagagcagtgcccggatcaccatctccgagggctcctgccctgaacgcatcaccaccatcaccgggtctacagcagctgtcttccatgcagtctccatgattgctttcaaactggatgaggacctttgtgctgctcctgcaaatggtggaaatgtctccaggcctccagtgaccctgcgccttgtcatccctgccagtcagtgtggctcactgattgggaaggctggcaccaagatcaaggagatccgagagactacgggtgcccaggtacaggtggcaggggacctgctccccaactccacagagcgagctgttacggtatctggggtgcctgatgccatcatcctgtgtgtgcgccagatctgcgctgttatcctggagtccccacccaaaggagccactatcccctaccatccgagcctctccctaggtactgttcttctctctgccaaccagggcttctctgtccagggtcagtatggggctgtgaccccagctgaggtcaccaagctccagcagctctcaagccatgcggtcccctttgccacacccagcgtggtgccaggactggatcccggcacacagaccagctcacaggagttcttggttcccaacgatttgattggctgtgtgatcgggcgccagggcagcaagatcagcgagatccggcagatgtcaggggcacatatcaagatcgggaaccaagcagagggcgctggggagcggcatgtcaccatcactggctctccggtctccatcgccctggcccagtacctcatcactgcctgtctagagacggccaagtctacctctggggggacgcccagctcggcccccgcagacctgcctgcccccttctcgccacccctgacggccctgcccacagctccccctggcctgctgggcacaccctatgccatctccctctccaacttcatcggcctcaagcccatgcccttcttggctttaccacctgcttccccagggccgccgccgggcttggcggcctacactgccaagatggcagcagctaatgggagcaagaaggctgagcggcagaaattctccccctactgaggccagctgaggtacaggcaggggcaggcaggaccaccagcagggggctgcctctgcaccctacccgcccaaggagactccaccctggggtcccaaacgccgctaacgcccagacgcatggatgcaccccctaccctgcctccatctatgggagttctttctctcagagtgggggcagtttctggcccaggggtctgagctgcggcagccccagggcagggggccctacctcctcagctctgtgcttggatacagggagcagccaggagactccctagtgcccccaccatggcgggtgtcactcacgcactccccatcccttagggcttcctggcctactgcatccttgtgggagtcagggaggagggcccgttgggtagctggggccaggcttctctccccaccacctgcagatttcttgctgcttccactgatacccttttgactggggtagctgggggagtggcatggggcaggggcccagttctcagcagcagacactctgtacagttttttcaatccctgtttttgaataaatattctcagcgaccagg

SEQ ID NO: 67816 - DNA, 2387 bp, Homo sapiens
agccgggctccgggccggccgggctccgcgcctgtcataacccctcattgttcgcagctgatgtcactcgcagttgtgagcggccgcctctcccggggacaatgtgggactgagcggcccagccgccgtgccgccgccgccgccgccgcaggacagccccagcgaggccatttccagcacatagaagagagattggaaaccaacgtgcagaactgccagtcccctgacacgctgtgccccacccactgcagcccagtgctgaatgaaccctgcccagaggtgtctgtagtgagcttctgccctagtgacttttggtaggtgggagtgtgcctcaattcccccctcaacccctgcctcaagcctttaccaggcagtggcaagacctgaccacacccgaggcctccctgccttcaaggcttcccatggctgctccagcttcctccccagctgctcttctgtgctccatccaccatctggctgctggacgaaagtgcctctcatatggaagccggccaggttgcagcgcggacacactcgcaggtcgctgtggccccagcctcgcctgacagaatgagcggctcggacgggggactggaggaggagccagagctcagcatcaccctcacgctgcggatgctgatgcacgggaaggaagtgggcagcatcatcgggaagaagggcgagactgtaaagcgaatccgggagcagagcagtgcccggatcaccatctccgagggctcctgccctgaacgcatcaccaccatcaccgggtctacagcagctgtcttccatgcagtctccatgattgctttcaaactggatgaggacctttgtgctgctcctgcaaatggtggaaatgtctccaggcctccagtgaccctgcgccttgtcatccctgccagtcagtgtggctcactgattgggaaggctggcaccaagatcaaggagatccgagagactacgggtgcccaggtacaggtggcaggggacctgctccccaactccacagagcgagctgttacggtatctggggtgcctgatgccatcatcctgtgtgtgcgccagatctgcgctgttatcctggagtccccacccaaaggagccactatcccctaccatccgagcctctccctaggtactgttcttctctctgccaaccagggcttctctgtccagggtcagtatggggctgtgaccccagctgaggtcaccaagctccagcagctctcaagccatgcggtcccctttgccacacccagcgtggtgccaggactggatcccggcacacagaccagctcacaggagttcttggttcccaacgatttgattggctgtgtgatcgggcgccagggcagcaagatcagcgagatccggcagatgtcaggggcacatatcaagatcgggaaccaagcagagggcgctggggagcggcatgtcaccatcactggctctccggtctccatcgccctggcccagtacctcatcactgcctgtctagagacggccaagtctacctctggggggacgcccagctcggcccccgcagacctgcctgcccccttctcgccacccctgacggccctgcccacagctccccctggcctgctgggcacaccctatgccatctccctctccaacttcatcggcctcaagcccatgcccttcttggctttaccacctgcttccccagggccgccgccgggcttggcggcctacactgccaagatggcagcagctaatgggagcaagaaggctgagcggcagaaattctccccctactgaggccagctgaggtacaggcaggggcaggcaggaccaccagcagggggctgcctctgcaccctacccgcccaaggagactccaccctggggtcccaaacgccgctaacgcccagacgcatggatgcaccccctaccctgcctccatctatgggagttctttctctcagagtgggggcagtttctggcccaggggtctgagctgcggcagccccagggcagggggccctacctcctcagctctgtgcttggatacagggagcagccaggagactccctagtgcccccaccatggcgggtgtcactcacgcactccccatcccttagggcttcctggcctactgcatccttgtgggagtcagggaggagggcccgttgggtagctggggccaggcttctctccccaccacctgcagatttcttgctgcttccactgatacccttttgactggaatgaactggctgggcttgtcagggggcaccccaaagagggggcactgccaggtagctgggggagtggcatggggcaggggcccagttctcagcagcagacactctgtacagttttttcaatccctgtttttgaataaatattctcagcgaccagg

SEQ ID NO: 67817 - DNA, 1705 bp, Homo sapiens
agccgggctccgggccggccgggctccgcgcctgtcataacccctcattgttcgcagctgatgtcactcgcagttgtgagcggccgcctctcccggggacaatgtgggactgagcggcccagccgccgtgccgccgccgccgccgccgcaggacagccccagcgagagccggccaggttgcagcgcggacacactcgcaggtcgctgtggccccagcctcgcctgacagaatgagcggctcggacgggggactggaggaggagccagagctcagcatcaccctcacgctgcggatgctgatgcacgggaaggaagtgggcagcatcatcgggaagaagggcgagactgtaaagcgaatccgggagcagagcagtgcccggatcaccatctccgagggctcctgccctgaacgcatcaccaccatcaccgggtctacagcagctgtcttccatgcagtctccatgattgctttcaaactggatgaggacctttgtgctgctcctgcaaatggtggaaatgtctccaggcctccagtgaccctgcgccttgtcatccctgccagtcagtgtggctcactgattgggaaggctggcaccaagatcaaggagatccgagagactacgggtgcccaggtacaggtggcaggggacctgctccccaactccacagagcgagctgttacggtatctggggtgcctgatgccatcatcctgtgtgtgcgccagatctgcgctgttatcctggagtccccacccaaaggagccactatcccctaccatccgagcctctccctaggtactgttcttctctctgccaaccagggcttctctgtccagggtcagtatggggctgtgaccccagctgaggtcaccaagctccagcagctctcaagccatgcggtcccctttgccacacccagcgtggtgccaggactggatcccggcacacagaccagctcacaggagttcttggttcccaacgatttgattggctgtgtgatcgggcgccagggcagcaagatcagcgagatccggcagatgtcaggggcacatatcaagatcgggaaccaagcagagggcgctggggagcggcatgtcaccatcactggctctccggtctccatcgccctggcccagtacctcatcactgcctgtctagagacggccaagtctacctctggggggacgcccagctcggcccccgcagacctgcctgcccccttctcgccacccctgacggccctgcccacagctccccctggcctgctgggcacaccctatgccatctccctctccaacttcatcggcctcaagcccatgcccttcttggctttaccacctgcttccccagggccgccgccgggcttggcggcctacactgccaagatggcagcagctaatgggagcaagaaggctgagcggcagaaattctccccctactgcatccttgtgggagtcagggaggagggcccgttgggtagctggggccaggcttctctccccaccacctgcagatttcttgctgcttccactgatacccttttgactggaatgaactggctgggcttgtcagggggcaccccaaagagggggcactgccaggtagctgggggagtggcatggggcaggggcccagttctcagcagcagacactctgtacagttttttcaatccctgtttttgaataaatattctcagcgaccagg

SEQ ID NO: 67818 - DNA, 1516 bp, Homo sapiens
agccgggctccgggccggccgggctccgcgcctgtcataacccctcattgttcgcagctgatgtcactcgcagttgtgagcggccgcctctcccggggacaatgtgggactgagcggcccagccgccgtgccgccgccgccgccgccgcaggacagccccagcgagagccggccaggttgcagcgcggacacactcgcaggtcgctgtggccccagcctcgcctgacagaatgagcggctcggacgggggactggaggaggagccagagctcagcatcaccctcacgctgcggatgctgatgcacgggaaggaagtgggcagcatcatcgggaagaagggcgagactgtaaagcgaatccgggagcagagcagtgcccggatcaccatctccgagggctcctgccctgaacgcatcaccaccatcaccgggtctacagcagctgtcttccatgcagtctccatgattgctttcaaactggatgaggacctttgtgctgctcctgcaaatggtggaaatgtctccaggcctccagtgaccctgcgccttgtcatccctgccagtcagtgtggctcactgattgggaaggctggcaccaagatcaaggagatccgagagactacgggtgcccaggtacaggtggcaggggacctgctccccaactccacagagcgagctgttacggtatctggggtgcctgatgccatcatcctgtgtgtgcgccagatctgcgctgttatcctggagtccccacccaaaggagccactatcccctaccatccgagcctctccctaggtactgttcttctctctgccaaccagggcttctctgtccagggtcagtatggggctgtgaccccagctgaggtcaccaagctccagcagctctcaagccatgcggtcccctttgccacacccagcgtggtgccaggactggatcccggcacacagaccagctcacaggagttcttggttcccaacgatttgattggctgtgtgatcgggcgccagggcagcaagatcagcgagatccggcagatgtcaggggcacatatcaagatcgggaaccaagcagagggcgctggggagcggcatgtcaccatcactggctctccggtctccatcgccctggcccagtacctcatcactgcctgtctagagacggccaagtctacctctggggggacgcccagctcggcccccgcagacctgcctgcccccttctcgccacccctgacggccctgcccacagctccccctggcctgctgggcacaccctatgccatctccctctccaacttcatcggcctcaagcccatgcccttcttggctttaccacctgcttccccagggccgccgccgggcttggcggcctacactgccaagatggcagcagctaatgggagcaagaaggtagctgggggagtggcatggggcaggggcccagttctcagcagcagacactctgtacagttttttcaatccctgtttttgaataaatattctcagcgaccagg

SEQ ID NO: 67819 - DNA, 2424 bp, Homo sapiens
agccgggctccgggccggccgggctccgcgcctgtcataacccctcattgttcgcagctgatgtcactcgcagttgtgagcggccgcctctcccggggacaatgtgggactgagcggcccagccgccgtgccgccgccgccgccgccgcaggacagccccagcgaggtagggcgcgggccgggcggggcacggcgggccgcgaagtttgggggttcgcccgggggcagggagcccgcgcccagatccctcggttggggtcgcaggtttgtgagactgcgaggaacacgttctctgtcccacaccgctgaggcctgcacagagccggccaggttgcagcgcggacacactcgcaggtcgctgtggccccagcctcgcctgacagaatgagcggctcggacgggggactggaggaggagccagagctcagcatcaccctcacgctgcggatgctgatgcacgggaaggaagtgggcagcatcatcgggaagaagggcgagactgtaaagcgaatccgggagcaggtgaggatggagtttgggggaggagcccagggcacctgatgtggaggggagatccctgccccactttctctctgaaccactccttctgggctgaccagtgagtcccccagagggtggcagttttgagccttgcctcaggcctggtgagtggggcaggcagacaagttccggcaagggagcagggaagatgccccgctgcccggcgctcattctatatctgcagagcagtgcccggatcaccatctccgagggctcctgccctgaacgcatcaccaccatcaccgggtctacagcagctgtcttccatgcagtctccatgattgctttcaaactggatgaggacctttgtgctgctcctgcaaatggtggaaatgtctccaggcctccagtgaccctgcgccttgtcatccctgccagtcagtgtggctcactgattgggaaggctggcaccaagatcaaggagatccgagagactacgggtgcccaggtacaggtggcaggggacctgctccccaactccacagagcgagctgttacggtatctggggtgcctgatgccatcatcctgtgtgtgcgccagatctgcgctgttatcctggagtccccacccaaaggagccactatcccctaccatccgagcctctccctaggtactgttcttctctctgccaaccagggcttctctgtccagggtcagtatggggctgtgaccccagctgaggtcaccaagctccagcagctctcaagccatgcggtcccctttgccacacccagcgtggtgccaggactggatcccggcacacagaccagctcacaggagttcttggttcccaacgatttgattggctgtgtgatcgggcgccagggcagcaagatcagcgagatccggcagatgtcaggggcacatatcaagatcgggaaccaagcagagggcgctggggagcggcatgtcaccatcactggctctccggtctccatcgccctggcccagtacctcatcactgcctgtctagagacggccaagtctacctctggggggacgcccagctcggcccccgcagacctgcctgcccccttctcgccacccctgacggccctgcccacagctccccctggcctgctgggcacaccctatgccatctccctctccaacttcatcggcctcaagcccatgcccttcttggctttaccacctgcttccccagggccgccgccgggcttggcggcctacactgccaagatggcagcagctaatgggagcaagaaggctgagcggcagaaattctccccctactgaggccagctgaggtacaggcaggggcaggcaggaccaccagcagggggctgcctctgcaccctacccgcccaaggagactccaccctggggtcccaaacgccgctaacgcccagacgcatggatgcaccccctaccctgcctccatctatgggagttctttctctcagagtgggggcagtttctggcccaggggtctgagctgcggcagccccagggcagggggccctacctcctcagctctgtgcttggatacagggagcagccaggagactccctagtgcccccaccatggcgggtgtcactcacgcactccccatcccttagggcttcctggcctactgcatccttgtgggagtcagggaggagggcccgttgggtagctggggccaggcttctctccccaccacctgcagatttcttgctgcttccactgatacccttttgactggaatgaactggctgggcttgtcagggggcaccccaaagagggggcactgccaggtagctgggggagtggcatggggcaggggcccagttctcagcagcagacactctgtacagttttttcaatccctgtttttgaataaatattctcagcgaccagg

SEQ ID NO: 67820 - DNA, 1535 bp, Homo sapiens
agccgggctccgggccggccgggctccgcgcctgtcataacccctcattgttcgcagctgatgtcactcgcagttgtgagcggccgcctctcccggggacaatgtgggactgagcggcccagccgccgtgccgccgccgccgccgccgcaggacagccccagcgagagccggccaggttgcagcgcggacacactcgcaggtcgctgtggccccagcctcgcctgacagaatgagcggctcggacgggggactggaggaggagccagagctcagcatcaccctcacgctgcggatgctgatgcacgggaaggaagtgggcagcatcatcgggaagaagggcgagactgtaaagcgaatccgggagcagagcagtgcccggatcaccatctccgagggctcctgccctgaacgcatcaccaccatcaccgggtctacagcagctgtcttccatgcagtctccatgattgctttcaaactggatgaggacctttgtgctgctcctgcaaatggtggaaatgtctccaggcctccagtgaccctgcgccttgtcatccctgccagtcagtgtggctcactgattgggaaggctggcaccaagatcaaggagatccgagagactacgggtgcccaggtacaggtggcaggggacctgctccccaactccacagagcgagctgttacggtatctggggtgcctgatgccatcatcctgtgtgtgcgccagatctgcgctgttatcctggagtccccacccaaaggagccactatcccctaccatccgagcctctccctaggtactgttcttctctctgccaaccagggcttctctgtccagggtcagtatggggctgtgaccccagctgaggtcaccaagctccagcagctctcaagccatgcggtcccctttgccacacccagcgtggtgccaggactggatcccggcacacagaccagctcacaggagttcttggttcccaacgatttgattggctgtgtgatcgggcgccagggcagcaagatcagcgagatccggcagatgtcaggggcacatatcaagatcgggaaccaagcagagggcgctggggagcggcatgtcaccatcactggctctccggtctccatcgccctggcccagtacctcatcactgcctgtctagagacggccaagtctacctctggggggacgcccagctcggcccccgcagacctgcctgcccccttctcgccacccctgacggccctgcccacagctccccctggcctgctgggcacaccctatgccatctccctctccaacttcatcggcctcaagcccatgcccttcttggcccaccacctgcagatttcttgctgcttccactgatacccttttgactggaatgaactggctgggcttgtcagggggcaccccaaagagggggcactgccaggtagctgggggagtggcatggggcaggggcccagttctcagcagcagacactctgtacagttttttcaatccctgtttttgaataaatattctcagcgaccagg

SEQ ID NO: 67821 - DNA, 1498 bp, Homo sapiens
tgatagcgcatgcgaggcccccggtggtaaatcggccgaggctgcaccaagatcaagagatccgagagactacgggtgcccaggtacaggtggcaggggacctgctccccaactccacagagcgagctgttacggtatctggggtgcctgatgccatcatcctgtgtgtgcgccagatctgcgctgttatcctggagtccccacccaaaggagccactatcccctaccatccgagcctctccctaggtactgttcttctctctgccaaccagggcttctctgtccagggtcagtatggggctgtgaccccagctgaggtcaccaagctccagcagctctcaagccatgcggtcccctttgccacacccagcgtggtgccaggactggatcccggcacacagaccagctcacaggagttcttggttcccaacgatttgattggctgtgtgatcgggcgccagggcagcaagatcagcgagatccggcagatgtcaggggcacatatcaagatcgggaaccaagcagagggcgctggggagcggcatgtcaccatcactggctctccggtctccatcgccctggcccagtacctcatcactgcctgtctagagacggccaagtctacctctggggggacgcccagctcggcccccgcagacctgcctgcccccttctcgccacccctgacggccctgcccacagctccccctggcctgctgggcacaccctatgccatctccctctccaacttcatcggcctcaagcccatgcccttcttggctttaccacctgcttccccagggccgccgccgggcttggcggcctacactgccaagatggcagcagctaatgggagcaagaaggctgagcggcagaaattctccccctactgaggccagctgaggtacaggcaggggcaggcaggaccaccagcagggggctgcctctgcaccctacccgcccaaggagactccaccctggggtcccaaacgccgctaacgcccagacgcatggatgcaccccctaccctgcctccatctatgggagttctttctctcagagtgggggcagtttctggcccaggggtctgagctgcggcagccccagggcagggggccctacctcctcagctctgtgcttggatacagggagcagccaggagactccctagtgcccccaccatggcgggtgtcactcacgcactccccatcccttagggcttcctggcctactgcatccttgtgggagtcagggaggagggcccgttgggtagctggggccaggcttctctccccaccacctgcagatttcttgctgcttccactgatacccttttgactggaatgaactggctgggcttgtcagggggcaccccaaagagggggcactgccaggtagctgggggagtggcatggggcaggggcccagttctcagcagcagacactctgtacagttttttcaatccctgtttttgaataaatattctcagcgaccagg

SEQ ID NO: 67822 - DNA, 2001 bp, Homo sapiens
agccgggctccgggccggccgggctccgcgcctgtcataacccctcattgttcgcagctgatgtcactcgcagttgtgagcggccgcctctcccggggacaatgtgggactgagcggcccagccgccgtgccgccgccgccgccgccgcaggacagccccagcgagcctctggagtccctgtggcagaactcaaatggaaggaggagcagctgcacccaggggagcagggtgtcacctccgttggatagagccggccaggttgcagcgcggacacactcgcaggtcgctgtggccccagcctcgcctgacagaatgagcggctcggacgggggactggaggaggagccagagctcagcatcaccctcacgctgcggatgctgatgcacgggaaggaagtgggcagcatcatcgggaagaagggcgagactgtaaagcgaatccgggagcagagcagtgcccggatcaccatctccgagggctcctgccctgaacgcatcaccaccatcaccgggtctacagcagctgtcttccatgcagtctccatgattgctttcaaactggatgaggacctttgtgctgctcctgcaaatggtggaaatgtctccaggcctccagtgaccctgcgccttgtcatccctgccagtcagtgtggctcactgattgggaaggctggcaccaagatcaaggagatccgagagtccccacccaaaggagccactatcccctaccatccgagcctctccctaggtactgttcttctctctgccaaccagggcttctctgtccagggtcagtatggggctgtgaccccagctgaggtcaccaagctccagcagctctcaagccatgcggtcccctttgccacacccagcgtggtgccaggactggatcccggcacacagaccagctcacaggagttcttggttcccaacgatttgattggctgtgtgatcgggcgccagggcagcaagatcagcgagatccggcagatgtcaggggcacatatcaagatcgggaaccaagcagagggcgctggggagcggcatgtcaccatcactggctctccggtctccatcgccctggcccagtacctcatcactgcctgtctagagacggccaagtctacctctggggggacgcccagctcggcccccgcagacctgcctgcccccttctcgccacccctgacggccctgcccacagctccccctggcctgctgggcacaccctatgccatctccctctccaacttcatcggcctcaagcccatgcccttcttggctttaccacctgcttccccagggccgccgccgggcttggcggcctacactgccaagatggcagcagctaatgggagcaagaaggctgagcggcagaaattctccccctactgaggccagctgaggtacaggcaggggcaggcaggaccaccagcagggggctgcctctgcaccctacccgcccaaggagactccaccctggggtcccaaacgccgctaacgcccagacgcatggatgcaccccctaccctgcctccatctatgggagttctttctctcagagtgggggcagtttctggcccaggggtctgagctgcggcagccccagggcagggggccctacctcctcagctctgtgcttggatacagggagcagccaggagactccctagtgcccccaccatggcgggtgtcactcacgcactccccatcccttagggcttcctggcctactgcatccttgtgggagtcagggaggagggcccgttgggtagctggggccaggcttctctccccaccacctgcagatttcttgctgcttccactgatacccttttgactggaatgaactggctgggcttgtcagggggcaccccaaagagggggcactgccaggtagctgggggagtggcatggggcaggggcccagttctcagcagcagacactctgtacagttttttcaatccctgtttttgaataaatattctcagcgaccagg

SEQ ID NO: 67823 - DNA, 1526 bp, Homo sapiens
agccgggctccgggccggccgggctccgcgcctgtcataacccctcattgttcgcagctgatgtcactcgcagttgtgagcggccgcctctcccggggacaatgtgggactgagcggcccagccgccgtgccgccgccgccgccgccgcaggacagccccagcgagagccggccaggttgcagcgcggacacactcgcaggtcgctgtggccccagcctcgcctgacagaatgagcggctcggacgggggactggaggaggagccagagctcagcatcaccctcacgctgcggatgctgatgcacgggaaggaagtgggcagcatcatcgggaagaagggcgagactgtaaagcgaatccgggagcagagcagtgcccggatcaccatctccgagggctcctgccctgaacgcatcaccaccatcaccgggtctacagcagctgtcttccatgcagtctccatgattgctttcaaactggatgaggacctttgtgctgctcctgcaaatggtggaaatgtctccaggcctccagtgaccctgcgccttgtcatccctgccagtcagtgtggctcactgattgggaaggctggcaccaagatcaaggagatccgagagactacgggtgcccaggtacaggtggcaggggacctgctccccaactccacagagcgagctgttacggtatctggggtgcctgatgccatcatcctgtgtgtgcgccagatctgcgctgttatcctggagtccccacccaaaggagccactatcccctaccatccgagcctctccctaggtactgttcttctctctgccaaccagggcttctctgtccagggtcagtatggggctgtgaccccagctgaggtcaccaagctccagcagctctcaagccatgcggtcccctttgccacacccagcgtggtgccaggactggatcccggcacacagaccagctcacaggagttcttggttcccaacgatttgattggctgtgtgatcgggcgccagggcagcaagatcagcgagatccggcagatgtcaggggcacatatcaagatcgggaaccaagcagagggcgctggggagcggcatgtcaccatcactggctctccggtctccatcgccctggcccagtacctcatcactgcctgattgctgtctagagacggcaagtcctaactctggggggacgcccaagttcggctcccggagcactgactgcccacagttcacggcacccatgaagggcctgagacaacggaagcccctgactcgatgggaacacctatgccatcctctccagcgcaatcggccaagacatgcccactggttagcactgcaccccaggcggcggcagggactgaggcacaaggccagaaggggcgaactgagaaagaccggagagggcgaaaccccacggcgacagcagaagggggactgagcaacatagggctagacacgaaagaaccacggtcaacgcgaccgacgaggaccaacagacacagaaaacagggagacagagcg

SEQ ID NO: 67824 - DNA, 1241 bp, Homo sapiens
  misc_feature (21)..(21): n is a, c, g, or t
gagtgcccttttttttggccnactttctttctaccaatccaattccccatggtctttgcctaattcaccctctgttgccccatctcccccctctatatccacctctcattctccattgctgtgtcttttccctgggtctctggccaccccatttctccctgcacctcgtgctatatctgcttgtcctttcttcccttcctcttccacctttcccatcttccccttattgttctctgttcactacctctctcttgcctttcatctaatctcatgcccatctctgccctcattgcccctctctcactcccactttcccctttgtctcccctctatatccctctctccagtctagagacggccaagtctacctctggggggacgcccagctcggcccccgcagacctgcctgcccccttctcgccacccctgacggccctgcccacagctccccctggcctgctgggcacaccctatgccatctccctctccaacttcatcggcctcaagcccatgcccttcttggctttaccacctgcttccccagggccgccgccgggcttggcggcctacactgccaagatggcagcagctaatgggagcaagaaggctgagcggcagaaattctccccctactgaggccagctgaggtacaggcaggggcaggcaggaccaccagcagggggctgcctctgcaccctacccgcccaaggagactccaccctggggtcccaaacgccgctaacgcccagacgcatggatgcaccccctaccctgcctccatctatgggagttctttctctcagagtgggggcagtttctggcccaggggtctgagctgcggcagccccagggcagggggccctacctcctcagctctgtgcttggatacagggagcagccaggagactccctagtgcccccaccatggcgggtgtcactcacgcactccccatcccttagggcttcctggcctactgcatccttgtgggagtcagggaggagggcccgttgggtagctggggccaggcttctctccccaccacctgcagatttcttgctgcttccactgatacccttttgactggaatgaactggctgggcttgtcagggggcaccccaaagagggggcactgccaggtagctgggggagtggcatggggcaggggcccagttctcagcagcagacactctgtacagttttttcaatccctgtttttgaataaatattctcagcgaccagg

SEQ ID NO: 67825 - DNA, 1185 bp, Homo sapiens
  misc_feature (1180)..(1180): n is a, c, g, or t
agccgggctccgggccggccgggctccgcgcctgtcataacccctcattgttcgcagctgatgtcactcgcagttgtgagcggccgcctctcccggggacaatgtgggactgagcggcccagccgccgtgccgccgccgccgccgccgcaggacagccccagcgaggtagggcgcgggccgggcggggcacggcgggccgcgaagtttgggggttcgcccgggggcagggagcccgcgcccagatccctcggttggggtcgcaggtttgtgagactgcgaggaacacgttctctgtcccacaccgctgaggcctgcacagagccggccaggttgcagcgcggacacactcgcaggtcgctgtggccccagcctcgcctgacagaatgagcggctcggacgggggactggaggaggagccagagctcagcatcaccctcacgctgcggatgctgatgcacgggaaggaagtgggcagcatcatcgggaagaagggcgagactgtaaagcgaatccgggagcaggtgaggatggagtttgggggaggagcccagggcacctgatgtggaggggagatccctgccccactttctctctgaaccactccttctgggctgaccagtgagtcccccagagggtggcagttttgagccttgcctcaggcctggtgagtggggcaggcagacaagttccggcaagggagcagggaagatgccccgctgcccggcgctcattctatatctgcagagcagtgcccggatcaccatctccgagggctcctgccctgaacgcatcaccaccatcaccgggtctacagcagctgtcttccatgcagtctccatgattgctttcaaactggatgaggacctttgtgctgctcctgcaaatggtggaaatgtctccaggcctccagtgaccctgcgccttgtcatccctgccagtcagtgtggctcactgattgggaaggctggcaccaagatcaaggagatccgagaggcgaccttatccggcagttttcgggcgctcatcgtacaggtccctgggcacctttgccccgactcccctgaccgagatgttccggaaactgggccgcttcaagccatgattttgtgtgggggccaaatgggccttgctattggccagtccccacccaaagaagtctctgtccgggaccattttcancaatt

SEQ ID NO: 67826 - DNA, 813 bp, Homo sapiens
tccgcggcgcgacgctcccacggacttagctgggatgcagaatagaagctgggcctttgtctgactaccctgcaacagtcagccacagacgggaaggcagcgcaggaaactgaggccaaaggagccgcgcttcctcatgagcatgaagcggcaaagcctgaactagaagcttctaacgcctaaccgtcctcttgccgcaccaggacctacctctgcaaggcccttcctgactttttccttagaatgtgtgtatatgtgtctttttccttttctgatgctaagacacctcagaaacaccaatgttaagcagatttccatcgttggaggttaaaacacccgaatacaagtgttttcttgagtgtggcatctggtcagatgttttatgggttggtttgtttttaaaaaaaaaaaatttcctgttagatgggtggtaagaaccagtcagagtttgtaaacccaccaagcacgaggcggtcggaccgtccagattctggagtccagaagacaccaaacgttctcagaatgccgaacgcgggcgccacctggtgggactagaacgcttattgtcccaaatcagcatagcacacagttcccataaatcttaaaaattcccatccaaggctcatttccgtgtgactaaaagtcatattctctgttctcgtgactccaagtaaaaatgtccctaaagagccaaagtatcttcactgtataaactaataatctattggtttggggaattttattttttgtgatcaatgttactttagcctttctatgatatacatataaataaaaaagttttcttccatgaaa

SEQ ID NO: 67827 - DNA, 276 bp, Homo sapiens
aaggcgagaggcttctggagaaacccaccccaccaacgtcttgatcttggacttttagcctccagagctatgagaaaacaaatttctgttcttgaagccactcagcctgtgatactggcagccctagcaaactcatacacacatacattttaaactcggtttaatcctgtgaccattcacttatgttcagtttttaaatagtcctagtcttatgaccactgttaagttcaccaaaacaaaggccattggggaaaggggcctgtaactcttgattga

SEQ ID NO: 67828 - DNA, 479 bp, Homo sapiens
gcctgagcaatctgacgcagaggcacatgaggaatcagcacggaaccatcgacccacagggttaatcccaatgtcaatacctgctagatgtcagggatcccctgggctgctggcgagccatttgaaatgacccatctcctgccaccttggcctgctcctctgggccacctctctccacctgcacttgcttaccggaagacggcaaggccaccggtgcacttcgcagtgccaggagaaaggcgcctcatgctattagctcaaataaggaaaatcatgccgggaagattgaattttctgcagacttgtttaacctggtgatttctgagcacttggcgctggcagccacgggggagtgggctccagccggcactttatcagccacttctcaggactattcctaagcttattaaatcagcatgagtcactcccttgccttcctcacaagcatgaatcacgaatcatcaaaacccaagcaaaat

SEQ ID NO: 67829 - DNA, 375 bp, Homo sapiens
ttgtgaaactactagtaataaaagctcatcctgtttctcttcaaaaagcagaattacttgctttgccatgttctccctctgctctacctcttactattttgtctcatgttgtatttatgtacatgtaccactccttgaatacagggtgaactcctgaaaaagcctgttacccttaacattttaaacaaacaatccaagctcagtttcagaccctcattgtatccatcctggattgctggcttaggctcccaagggatcttcatttgcctcattttctttttcttttttgtccacaagaaactctcttacaaattttcattcgtgagtcatttcctcaaaaaacaaaaaacaaaaacaaaacaaacaaagaaacaa

SEQ ID NO: 67830 - DNA, 530 bp, Homo sapiens
catttgtatgcaacaccatttgggttaaatacaagttagatgacgaggtgctatctggccagatttaagtagattctatttccttggttctccctctccctgaggacctcttattttattgtcccctcttctaggttaattctcctttgatttgactttgttgagaaggaggttggacagtagattagcaaagttccaagtgcaaaattacagtgtgttagagtgtggggggaaaattagtcttatttttccctacatgggatacaacactgtgaattcaatcttcaactgaaggccctgcagttctcctaaaacatagttgtttgtttttctttaacaaagtttaagctagtgttaataaattaaaaaaaattgcttgtctgtctacttcagctttgttttatgcccatttcatattgttgtctgtgttgtaattcataacttttgataccatttctgatgtgtaaaattggttgtcttgtaaatatcttataaagagttcaattgtaaataaactattgtggctgtta

SEQ ID NO: 67831 - DNA, 405 bp, Homo sapiens
gaaatggtgtctcgctctgttgcctaggctgtagagcagtgagccaagatcgcaccactgcactccagcctgggtgacggagtgactccatcacacacacacaaaaaaaagcatgtacccctcaaccataaaattacatattccaagctcatttgactcttaaagttttgattattttaaagtcagactcttacaaagtatggaggcagggagggtttatgacagtctgggggttttagtttgatgtgatgtttaccttggaaagatatggaaatgattttgaaatttggagattctaaaaggatgtggatggggaaaggagtatgtgttttgttgattctgttaccaggaggttcccatactgtccatggaacccacagactcaggtagaaccggaaggtgaaa

SEQ ID NO: 67832 - DNA, 3001 bp, Homo sapiens
tgatgccatcaagtgttgcaggagaaacttcagtcttggctgttccttcttggagggaccactcagtagagcctctaagggacccaaatccttcagaccttttggagaacctggatgaacagtgtgttttcgaagcggcatgcaaaactggagctggatgagaagagaaggaaaagatgggatattcagaggatcagggaacaaagaattttacagcgactgcagctcagaatgtataaaaagaaaggaattcaggaatctgagcctgaggttacctcatttttccctgagccagatgatgttgaaagtttgatgattacccccttcttgcctgttgtagcatttggacgaccattaccaaaattaactccacagaattttgagctaccctggttggatgagcgtagccgatgcagattggagatccagaagaagcaaacacctcaccggacgtgtaggaaatagctgtgctggcaagaaccctgtcttcagatagttgtagcatgccattcccgagagtggcagagacctgtatatgtgacctttgtcctcacatatgttatcactcgctgataataccctttcatacttccttgactttgttttcattactctgatttcacaaaaactctttcattcggctaattgtgagttatggagggtgattgggatttcttttcccttttttgggaaatgggctctcaagctaaagctataggatggcagattcagaagtttcaggggtctgtttctatacatttgcctatgttaaaggggtaaaagggctctcttcattagacatgtggaagatgaagcagccccttcctttagagctgtgcctgcatggcactcttctcaccctggtacaccctccttatagtgggtatagtgatttttaaccctaaaataaaacaaacaacctcaccatgagctttaggaccagaagaggaatgacaagtgaagcgatgaagcaagccatcttcacagagtagaaaagacatcggagagttggtagataactgtctgaaaagatagttgttcatttgaaactattctgtgatacagtcatgtgggaagggatgtttggctgtgattattttttcagttaatggataacaatttctttactgctcaaaaaccaaaatctttggaaaagaaagtggggatggttagtttcagaacaagttacagctgtaaacaaaagcacttagtatttgggatggcatgccaaaacctgtataaatgtccttgtatcacatcacttctcaagtattccttcattgggcttcatccttttagcagaactcttggtggtgggatagagacttagggagggtagggggagagtgtggaaataggtgcttcctttggctggcaaatgtctacatcttgaaacaaacagatgtacctaatgagcttctccattcactttgtaaaaataatttgtatgtgtaccatcttggtcctctcccctcccgttttgttaaaatatcaggatagcactcccaggccactttggtctcagtgtaagatccctattaactatctgaaaggaaaatagagccaagacctctggtctcaaatatataggaattgcctttctttagtcttcaggactattgtgtgaaaacaagtaggggtctaatctcctagaaggtaggggcttttatccttaaagagaatatgtccccagattattagcacttttagaggagaagccaaggtatgtagggtgtgtggctggcccatcagtggagcacgaagagagaatgggataccattgtgggaagagaagaaaagttcctcaggggcctcccactgctaaagttttttgtgagatgttgatctgtgcttcctggatttgacttttaaaggaattattctggcagcacatgtagtattcttggatgatcttgctgctcttatttctccttttgtgtgtgtgtgtgtgtgtgtgtggctatgggttttcatttgtaactccatctgcttaggagagtgggctctctataagggaacctgctgtaaacttcattgcagcaaggatgtagagagaaataggacttaattccactaggggctctcatctcacaccttaaggaggagatttctagaaaaactgggccagattttctttgttctccatcattttaatgtggcaggctgttcagttttcttactcttacctatgtgatatttcttcgtaacgtgtccaaaaagaaaaaagacccaatcagtgtctcttgactttgttctttgatccctcagtttcttcttgatttcagcatgtgtcgggttcctaattttgggtatgagttagcaaatttaaccattgtgtttgtgccctacccaggggactccccagtttctgacttgaagtagactgagaagaatccacgaggtgctatctggccagatttaagtagattctatttccttggttctccctctccctgaggacctcttattttattgtcccctcttctaggttaattctcctttgatttgactttgttgagaaggaggttggacagtagattagcaaagttccaagtgcaaaattacagtgtgttagagtgtggggggaaaattagtcttatttttccctacatgggatacaacactgtgaattcaatcttcaactgaaggccctgcagttctcctaaaacatagttgtttgtttttctttaacaaagtttaagctagtgttaataaattaaaaaaaattgcttgtctgtctacttcagctttgttttatgcccatttcatattgttgtctgtgttgtaattcataacttttgataccatttctgatgtgtaaaattggttgtcttgtaaatatcttataaagagttcaattgtaaataaactattgtggctgttaaaaattgaacttctgcttcaatttattatatttattggcaaacaaacaattctgcttgtatatttgaaacattggaaaaagaaatccattttctcaataaaaaagaataacacatta

SEQ ID NO: 67833 - DNA, 2884 bp, Homo sapiens
tgatgccatcaagtgttgcaggagaaacttcagtcttggctgttccttcttggagggaccactcagtagagcctctaagggacccaaatccttcagaccttttggagaacctggatgaacagtgtgttttcgaagcggcatgcaaaactggagctggatgagaagagaaggaaaagatgggatattcagaggatcagggaacaaagaattttacagcgactgcagctcagaatgtataaaaagaaaggaattcaggaatctgagcctgaggttacctcatttttccctgagccagatgatgttgaaagtttgatgattacccccttcttgcctgttgtagcatttggacgaccattaccaaaattaactccacagaattttgagctaccctggttggatgagcgtagccgatgcagattggagatccagaagaagcaaacacctcaccggacgtgtaggaaatagctgtgctggcaagaaccctgtcttcagatagttgtagcatgccattcccgagagtggcagagacctgtatatgtgacctttgtcctcacatatgttatcactcgctgataataccctttcatacttccttgactttgttttcattactctgatttcacaaaaactctttcattcggctaattgtgagttatggagggtgattgggatttcttttcccttttttgggaaatgggctctcaagctaaagctataggatggcagattcagaagtttcaggggtctgtttctatacatttgcctatgttaaaggggtaaaagggctctcttcattagacatgtggaagatgaagcagccccttcctttagagctgtgcctgcatggcactcttctcaccctggtacaccctccttatagtgggtatagtgatttttaaccctaaaataaaacaaacaacctcaccatgagctttaggaccagaagaggaatgacaagtgaagcgatgaagcaagccatcttcacagagtagaaaagacatcggagagttggtagataactgtctgaaaagatagttgttcatttgaaactattctgtgatacagtcatgtgggaagggatgtttggctgtgattattttttcagttaatggataacaatttctttactgctcaaaaaccaaaatctttggaaaagaaagtggggatggttagtttcagaacaagttacagctgtaaacaaaagcacttagtatttgggatggcatgccaaaacctgtataaatgtccttgtatcacatcacttctcaagtattccttcattgggcttcatccttttagcagaactcttggtggtgggatagagacttagggagggtagggggagagtgtggaaataggtgcttcctttggctggcaaatgtctacatcttgaaacaaacagatgtacctaatgagcttctccattcactttgtaaaaataatttgtatgtgtaccatcttggtcctctcccctcccgttttgttaaaatatcaggatagcactcccaggccactttggtctcagtgtaagatccctattaactatctgaaaggaaaatagagccaagacctctggtctcaaatatataggaattgcctttctttagtcttcaggactattgtgtgaaaacaagtaggggtctaatctcctagaaggtaggggcttttatccttaaagagaatatgtccccagattattagcacttttagaggagaagccaaggtatgtagggtgtgtggctggcccatcagtggagcacgaagagagaatgggataccattgtgggaagagaagaaaagttcctcaggggcctcccactgctaaagttttttgtgagatgttgatctgtgcttcctggatttgacttttaaaggaattattctggcagcacatgtagtattcttggatgatcttgctgctcttatttctccttttgtgtgtgtgtgtgtgtgtgtgtggctatgggttttcatttgtaactccatctgcttaggagagtgggctctctataagggaacctgctgtaaacttcattgcagcaaggatgtagagagaaataggacttaattccactaggggctctcatctcacaccttaaggaggagatttctagaaaaactgggccagattttctttgttctccatcattttaatgtggcaggctgttcagttttcttactcttacctatgtgatatttcttcgtaacgtgtccaaaaagaaaaaagacccaatcagtgtctcttgactttgttctttgatccctcagtttcttcttgatttcagcatgtgtcgggttcctaattttgggtatgagttagcaaatttaaccattgtgtttgtgccctacccaggggactccccagtttctgacttgaagtagactgagaagaatccacgaggtgctatctggccagatttaagtagattctatttccttggttctccctctccctgaggacctcttattttattgtcccctcttctaggttaattctcctttgatttgactttgttgagaaggaggttggacagtagattagcaaagttccaagtgcaaaattacagtgtgttagagtgtggggggaaaattagtcttatttttccctacatgggatacaacactgtgaattcaatcttcaactgaaggccctgcagttctcctaaaacatagttgtttgtttttctttaacaaagtttaagctagtgttaataaattaaaaaaaattgcttgtctgtctacttcagctttgttttatgcccatttcatattgttgtctgtgttgtaattcataacttttgataccatttctgatgtgtaaaattggttgtcttgtaaatatcttataaagagttcaattgtaaataaactattgtggctgtta

SEQ ID NO: 67834 - DNA, 2900 bp, Homo sapiens
tgatgccatcaagtgttgcaggagaaacttcagtcttggctgttccttcttggagggaccactcagtagagcctctaagggacccaaatccttcagaccttttggagaacctggatgaacagtgtgttttcgaagcggcatgcaaaactggagctggatgagaagagaaggaaaagatgggatattcagaggatcagggaacaaagaattttacagcgactgcagctcagaatgtataaaaagaaaggaattcaggaatctgagcctgaggttacctcatttttccctgagccagatgatgttgaaagtttgatgattacccccttcttgcctgttgtagcatttggacgaccattaccaaaattaactccacagaattttgagctaccctggttggatgagcgtagccgatgcagattggagatccagaagaagcaaacacctcaccggacgtgtaggaaatagctgtgctggcaagaaccctgtcttcagatagttgtagcatgccattcccgagagtggcagagacctgtatatgtgacctttgtcctcacatatgttatcactcgctgataataccctttcatacttccttgactttgttttcattactctgatttcacaaaaactctttcattcggctaattgtgagttatggagggtgattgggatttcttttcccttttttgggaaatgggctctcaagctaaagctataggatggcagattcagaagtttcaggggtctgtttctatacatttgcctatgttaaaggggtaaaagggctctcttcattagacatgtggaagatgaagcagccccttcctttagagctgtgcctgcatggcactcttctcaccctggtacaccctccttatagtgggtatagtgatttttaaccctaaaataaaacaaacaacctcaccatgagctttaggaccagaagaggaatgacaagtgaagcgatgaagcaagccatcttcacagagtagaaaagacatcggagagttggtagataactgtctgaaaagatagttgttcatttgaaactattctgtgatacagtcatgtgggaagggatgtttggctgtgattattttttcagttaatggataacaatttctttactgctcaaaaaccaaaatctttggaaaagaaagtggggatggttagtttcagaacaagttacagctgtaaacaaaagcacttagtatttgggatggcatgccaaaacctgtataaatgtccttgtatcacatcacttctcaagtattccttcattgggcttcatccttttagcagaactcttggtggtgggatagagacttagggagggtagggggagagtgtggaaataggtgcttcctttggctggcaaatgtctacatcttgaaacaaacagatgtacctaatgagcttctccattcactttgtaaaaataatttgtatgtgtaccatcttggtcctctcccctcccgttttgttaaaatatcaggatagcactcccaggccactttggtctcagtgtaagatccctattaactatctgaaaggaaaatagagccaagacctctggtctcaaatatataggaattgcctttctttagtcttcaggactattgtgtgaaaacaagtaggggtctaatctcctagaaggtaggggcttttatccttaaagagaatatgtccccagattattagcacttttagaggagaagccaaggtatgtagggtgtgtggctggcccatcagtggagcacgaagagagaatgggataccattgtgggaagagaagaaaagttcctcaggggcctcccactgctaaagttttttgtgagatgttgatctgtgcttcctggatttgacttttaaaggaattattctggcagcacatgtagtattcttggatgatcttgctgctcttatttctccttttgtgtgtgtgtgtgtgtgtgtgtggctatgggttttcatttgtaactccatctgcttaggagagtgggctctctataagggaacctgctgtaaacttcattgcagcaaggatgtagagagaaataggacttaattccactaggggctctcatctcacaccttaaggaggagatttctagaaaaactgggccagattttctttgttctccatcattttaatgtggcaggctgttcagttttcttactcttacctatgtgatatttcttcgtaacgtgtccaaaaagaaaaaagacccaatcagtgtctcttgactttgttctttgatccctcagtttcttcttgatttcagcatgtgtcgggttcctaattttgggtatgagttagcaaatttaaccattgtgtttgtgccctacccaggggactccccagtttctgacttgaagtagactgagaagaatccacgaggtgctatctggccagatttaagtagattctatttccttggttctccctctccctgaggacctcttattttattgtcccctcttctaggttaattctcctttgatttgactttgttgagaaggaggttggacagtagattagcaaagttccaagtgcaaaattacagtgtgttagagtgtggggggaaaattagtcttatttttccctacatgggatacaacactgtgaattcaatcttcaactgaaggccctgcagttctcctaaaacatagttgtttgtttttctttaacaaagtttaagctagtgttaataaattaaaaaaaattgcttgtctgtctacttcagctttgttttatgcccatttcatattgttgtctgtgttgtaattcataacttttgataccatttctgatgtgtaaaattggttgtcttgtaaatatcttataaagagttccaagccaaactcccatggcctccatgactttttcaaaaaaaaaa

SEQ ID NO: 67835 - DNA, 2608 bp, Homo sapiens
tgatgccatcaagtgttgcaggagaaacttcagtcttggctgttccttcttggagggaccactcagtagagcctctaagggacccaaatccttcagaccttttggagaacctggatgaacagtgtgttttcgaagcggcatgcaaaactggagctggatgagaagagaaggaaaagatgggatattcagaggatcagggaacaaagaattttacagcgactgcagctcagaatgtataaaaagaaaggaattcaggaatctgagcctgaggttacctcatttttccctgagccagatgatgttgaaagtttgatgattacccccttcttgcctgttgtagcatttggacgaccattaccaaaattaactccacagaattttgagctaccctggttggatgagcgtagccgatgcagattggagatccagaagaagcaaacacctcaccggacgtgtaggaaatagctgtgctggcaagaaccctgtcttcagatagttgtagcatgccattcccgagagtggcagagacctgtatatgtgacctttgtcctcacatatgttatcactcgctgataataccctttcatacttccttgactttgttttcattactctgatttcacaaaaactctttcattcggctaattgtgagttatggagggtgattgggatttcttttcccttttttgggaaatgggctctcaagctaaagctataggatggcagattcagaagtttcaggggtctgtttctatacatttgcctatgttaaaggggtaaaagggctctcttcattagacatgtggaagatgaagcagccccttcctttagagctgtgcctgcatggcactcttctcaccctggtacaccctccttatagtgggtatagtgatttttaaccctaaaataaaacaaacaacctcaccatgagctttaggaccagaagaggaatgacaagtgaagcgatgaagcaagccatcttcacagagtagaaaagacatcggagagttggtagataactgtctgaaaagatagttgttcatttgaaactattctgtgatacagtcatgtgggaagggatgtttggctgtgattattttttcagttaatggataacaatttctttactgctcaaaaaccaaaatctttggaaaagaaagtggggatggttagtttcagaacaagttacagctgtaaacaaaagcacttagtatttgggatggcatgccaaaacctgtataaatgtccttgtatcacatcacttctcaagtattccttcattgggcttcatccttttagcagaactcttggtggtgggatagagacttagggagggtagggggagagtgtggaaataggtgcttcctttggctggcaaatgtctacatcttgaaacaaacagatgtacctaatgagcttctccattcactttgtaaaaataatttgtatgtgtaccatcttggtcctctcccctcccgttttgttaaaatatcaggatagcactcccaggccactttggtctcagtgtaagatccctattaactatctgaaaggaaaatagagccaagacctctggtctcaaatatataggaattgcctttctttagtcttcaggactattgtgtgaaaacaagtaggggtctaatctcctagaaggtaggggcttttatccttaaagagaatatgtccccagattattagcacttttagaggagaagccaaggtatgtagggtgtgtggctggcccatcagtggagcacgaagagagaatgggataccattgtgggaagagaagaaaagttcctcaggggcctcccactgctaaagttttttgtgagatgttgatctgtgcttcctggatttgacttttaaaggaattattctggcagcacatgtagtattcttggatgatcttgctgctcttatttctccttttgtgtgtgtgtgtgtgtgtgtgtggctatgggttttcatttgtaactccatctgcttaggagagtgggctctctataagggaacctgctgtaaacttcattgcagcaaggatgtagagagaaataggacttaattccactaggggctctcatctcacaccttaaggaggagatttctagaaaaactgggccagattttctttgttctccatcattttaatgtggcaggctgttcagttttcttactcttacctatgtgatatttcttcgtaacgtgtccaaaaagaaaaaagacccaatcagtgtctcttgactttgttctttgatccctcagtttcttcttgatttcagcatgtgtcgggttcctaattttgggtatgagttagcaaatttaaccattgtgtttgtgccctacccaggggactccccagtttctgacttgaagtagactgagaagaatccacgaggtgctatctggccagatttaagtagattctatttccttggttctccctctccctgaggacctcttattttattgtcccctcttctaggttaattctcctttgatttgactttgttgagaaggaggttggacagtagattagcaaagttcctaatgctttatactgggtactgagctctcaatcttaatctttgtcgtcgctctttcc

SEQ ID NO: 67836 - DNA, 381 bp, Homo sapiens
ggcgcacacctgtaatcccagctactcgggaggctgagacagggagaattgcttgaacccaggaggcagaggttgcagtgagccaagatcgcaccactgcactccagcctgggtgacggagtgactccatcacacacacacaaaaaaaagcatgtacccctcaaccataaaattacatattccaagctcatttgactcttaaagttttgattattttaaagtcagactcttacaaagtatggaggcagggagggtttatgacagtctgggggttttagtttgatgtgatgtttaccttggaaagatatggaaatgattttgaaatttggagattctaaaaggatgtggatggggaaaggagtatgtgttttgttgattctg

SEQ ID NO: 67837 - DNA, 562 bp, Homo sapiens
aagcatgtacccctcaaccataaaattacatattccaagctcatttgactcttaaagttttgattattttaaagtcagactcttacaaagtatggaggcagggagggtttatgacagtctgggggttttagtttgatgtgatgtttaccttggaaagatatggaaatgattttgaaatttggagattctaaaaggatgtggatggggaaaggagtatgtgttttgttgattctgttaccaggaggttcccatactgtccatggaacccacagactcaggtagaaccggaaggtgaaagattttacgttcctggaagctggaaattagttagtatatgtgtgtaactaatatatggtgataaatagcttatcagctgcttttctttacacagaacctggatgaacagtgtgttttcgaagcggcatgcaaaactggagctggatgagaagagaaggaaaaggtgaggccagagatgtccatcctggaaacaactgagccctaggacctaggacagagtatcagggaacctgacctccctttttcatgctgtggagaatcttgg

SEQ ID NO: 67838 - DNA, 3155 bp, Homo sapiens
ggcattttaggttcttttataccatagcaaggacactgaatatggcttcagggaggccatagaatggattcctatcacttggtaactttgtctcttctggggagagacctcttatcctagtgaatagttgtgcaactttggatttaagggtggttccacccctcctccctttctttttctctctcttttttttcagttccttcttggagggaccactcagtagagcctctaagggacccaaatccttcagaccttttggagaacctggatgaacagtgtgttttcgaagcggcatgcaaaactggagctggatgagaagagaaggaaaagatgggatattcagaggatcagggaacaaagaattttacagcgactgcagctcagaatgtataaaaagaaaggaattcaggaatctgagcctgaggttacctcatttttccctgagccagatgatgttgaaagtttgatgattacccccttcttgcctgttgtagcatttggacgaccattaccaaaattaactccacagaattttgagctaccctggttggatgagcgtagccgatgcagattggagatccagaagaagcaaacacctcaccggacgtgtaggaaatagctgtgctggcaagaaccctgtcttcagatagttgtagcatgccattcccgagagtggcagagacctgtatatgtgacctttgtcctcacatatgttatcactcgctgataataccctttcatacttccttgactttgttttcattactctgatttcacaaaaactctttcattcggctaattgtgagttatggagggtgattgggatttcttttcccttttttgggaaatgggctctcaagctaaagctataggatggcagattcagaagtttcaggggtctgtttctatacatttgcctatgttaaaggggtaaaagggctctcttcattagacatgtggaagatgaagcagccccttcctttagagctgtgcctgcatggcactcttctcaccctggtacaccctccttatagtgggtatagtgatttttaaccctaaaataaaacaaacaacctcaccatgagctttaggaccagaagaggaatgacaagtgaagcgatgaagcaagccatcttcacagagtagaaaagacatcggagagttggtagataactgtctgaaaagatagttgttcatttgaaactattctgtgatacagtcatgtgggaagggatgtttggctgtgattattttttcagttaatggataacaatttctttactgctcaaaaaccaaaatctttggaaaagaaagtggggatggttagtttcagaacaagttacagctgtaaacaaaagcacttagtatttgggatggcatgccaaaacctgtataaatgtccttgtatcacatcacttctcaagtattccttcattgggcttcatccttttagcagaactcttggtggtgggatagagacttagggagggtagggggagagtgtggaaataggtgcttcctttggctggcaaatgtctacatcttgaaacaaacagatgtacctaatgagcttctccattcactttgtaaaaataatttgtatgtgtaccatcttggtcctctcccctcccgttttgttaaaatatcaggatagcactcccaggccactttggtctcagtgtaagatccctattaactatctgaaaggaaaatagagccaagacctctggtctcaaatatataggaattgcctttctttagtcttcaggactattgtgtgaaaacaagtaggggtctaatctcctagaaggtaggggcttttatccttaaagagaatatgtccccagattattagcacttttagaggagaagccaaggtatgtagggtgtgtggctggcccatcagtggagcacgaagagagaatgggataccattgtgggaagagaagaaaagttcctcaggggcctcccactgctaaagttttttgtgagatgttgatctgtgcttcctggatttgacttttaaaggaattattctggcagcacatgtagtattcttggatgatcttgctgctcttatttctccttttgtgtgtgtgtgtgtgtgtgtgtggctatgggttttcatttgtaactccatctgcttaggagagtgggctctctataagggaacctgctgtaaacttcattgcagcaaggatgtagagagaaataggacttaattccactaggggctctcatctcacaccttaaggaggagatttctagaaaaactgggccagattttctttgttctccatcattttaatgtggcaggctgttcagttttcttactcttacctatgtgatatttcttcgtaacgtgtccaaaaagaaaaaagacccaatcagtgtctcttgactttgttctttgatccctcagtttcttcttgatttcagcatgtgtcgggttcctaattttgggtatgagttagcaaatttaaccattgtgtttgtgccctacccaggggactccccagtttctgacttgaagtagactgagaagaatccacgaggtgctatctggccagatttaagtagattctatttccttggttctccctctccctgaggacctcttattttattgtcccctcttctaggttaattctcctttgatttgactttgttgagaaggaggttggacagtagattagcaaagttccaagtgcaaaattacagtgtgttagagtgtggggggaaaattagtcttatttttccctacatgggatacaacactgtgaattcaatcttcaactgaaggccctgcagttctcctaaaacatagttgtttgtttttctttaacaaagtttaagctagtgttaataaattaaaaaaaattgcttgtctgtctacttcagctttgttttatgcccatttcatattgttgtctgtgttgtaattcataacttttgataccatttctgatgtgtaaaattggttgtcttgtaaatatcttataaagagttcaattgtaaataaactattgtggctgttaaaaattgaacttctgcttcaatttattatatttattggcaaacaaacaattctgcttgtatatttgaaacattggaaaaagaaatccattttctcaataaaaaagaataacacatta

SEQ ID NO: 67839 - DNA, 2947 bp, Homo sapiens
tgatgccatcaagtgttgcaggagaaacttcagtcttggctgttccttcttggagggaccactcagtagagcctctaagggacccaaatccttcagaccttttggagaacctggatgaacagtgtgttttcgaagcggcatgcaaaactggagctggatgagaagagaaggaaaagatgggatattcagaggatcagggaacaaagaattttacagcgactgcagctcagaatgtataaaaagaaaggaattcaggaatctgagcctgaggttacctcatttttccctgagccagatgatgttgaaagtttgatgattacccccttcttgcctgttgtagcatttggacgaccattaccaaaattaactccacagaattttgagctaccctggttggatgagcgtagccgatgcagattggagatccagaagaagcaaacacctcaccggacgtgtaggaaatagctgtgctggcaagaaccctgtcttcagatagttgtagcatgccattcccgagagtggcagagacctgtatatgtgacctttgtcctcacatatgttatcactcgctgataataccctttcatacttccttgactttgttttcattactctgatttcacaaaaactctttcattcggctaattgtgagttatggagggtgattgggatttcttttcccttttttgggaaatgggctctcaagctaaagctataggatggcagattcagaagtttcaggggtctgtttctatacatttgcctatgttaaaggggtaaaagggctctcttcattagacatgtggaagatgaagcagccccttcctttagagctgtgcctgcatggcactcttctcaccctggtacaccctccttatagtgggtatagtgatttttaaccctaaaataaaacaaacaacctcaccatgagctttaggaccagaagaggaatgacaagtgaagcgatgaagcaagccatcttcacagagtagaaaagacatcggagagttggtagataactgtctgaaaagatagttgttcatttgaaactattctgtgatacagtcatgtgggaagggatgtttggctgtgattattttttcagttaatggataacaatttctttactgctcaaaaaccaaaatctttggaaaagaaagtggggatggttagtttcagaacaagttacagctgtaaacaaaagcacttagtatttgggatggcatgccaaaacctgtataaatgtccttgtatcacatcacttctcaagtattccttcattgggcttcatccttttagcagaactcttggtggtgggatagagacttagggagggtagggggagagtgtggaaataggtgcttcctttggctggcaaatgtctacatcttgaaacaaacagatgtacctaatgagcttctccattcactttgtaaaaataatttgtatgtgtaccatcttggtcctctcccctcccgttttgttaaaatatcaggatagcactcccaggccactttggtctcagtgtaagatccctattaactatctgaaaggaaaatagagccaagacctctggtctcaaatatataggaattgcctttctttagtcttcaggactattgtgtgaaaacaagtaggggtctaatctcctagaaggtaggggcttttatccttaaagagaatatgtccccagattattagcacttttagaggagaagccaaggtatgtagggtgtgtggctggcccatcagtggagcacgaagagagaatgggataccattgtgggaagagaagtgcttcctggatttgacttttaaaggaattattctggcagcacatgtagtattcttggatgatcttgctgctcttatttctccttttgtgtgtgtgtgtgtgtgtgtgtggctatgggttttcatttgtaactccatctgcttaggagagtgggctctctataagggaacctgctgtaaacttcattgcagcaaggatgtagagagaaataggacttaattccactaggggctctcatctcacaccttaaggaggagatttctagaaaaactgggccagattttctttgttctccatcattttaatgtggcaggctgttcagttttcttactcttacctatgtgatatttcttcgtaacgtgtccaaaaagaaaaaagacccaatcagtgtctcttgactttgttctttgatccctcagtttcttcttgatttcagcatgtgtcgggttcctaattttgggtatgagttagcaaatttaaccattgtgtttgtgccctacccaggggactccccagtttctgacttgaagtagactgagaagaatccacgaggtgctatctggccagatttaagtagattctatttccttggttctccctctccctgaggacctcttattttattgtcccctcttctaggttaattctcctttgatttgactttgttgagaaggaggttggacagtagattagcaaagttccaagtgcaaaattacagtgtgttagagtgtggggggaaaattagtcttatttttccctacatgggatacaacactgtgaattcaatcttcaactgaaggccctgcagttctcctaaaacatagttgtttgtttttctttaacaaagtttaagctagtgttaataaattaaaaaaaattgcttgtctgtctacttcagctttgttttatgcccatttcatattgttgtctgtgttgtaattcataacttttgataccatttctgatgtgtaaaattggttgtcttgtaaatatcttataaagagttcaattgtaaataaactattgtggctgttaaaaattgaacttctgcttcaatttattatatttattggcaaacaaacaattctgcttgtatatttgaaacattggaaaaagaaatccattttctcaataaaaaagaataacacatta

SEQ ID NO: 67840 - DNA, 2949 bp, Homo sapiens
tgatgccatcaagtgttgcaggagaaacttcagtcttggctgttccttcttggagggaccactcagtagagcctctaagggacccaaatccttcagaccttttggagaacctggatgaacagtgtgttttcgaagcggcatgcaaaactggagctggatgagaagagaaggaaaagatgggatattcagaggatcagggaacaaagaattttacagcgactgcagctcagaatgtataaaaagaaaggaattcaggaatctgagcctgaggttacctcatttttccctgagccagatgatgttgaaagtttgatgattacccccttcttgcctgttgtagcatttggacgaccattaccaaaattaactccacagaattttgagctaccctggttggatgagcgtagccgatgcagattggagatccagaagaagcaaacacctcaccggacgtgtaggaaatagctgtgctggcaagaaccctgtcttcagatagttgtagcatgccattcccgagagtggcagagacctgtatatgtgacctttgtcctcacatatgttatcactcgctgataataccctttcatacttccttgactttgttttcattactctgatttcacaaaaactctttcattcggctaattgtgagttatggagggtgattgggatttcttttcccttttttgggaaatgggctctcaagctaaagctataggatggcagattcagaagtttcaggggtctgtttctatacatttgcctatgttaaaggggtaaaagggctctcttcattagacatgtggaagatgaagcagccccttcctttagagctgtgcctgcatggcactcttctcaccctggtacaccctccttatagtgggtatagtgatttttaaccctaaaataaaacaaacaacctcaccatgagctttaggaccagaagaggaatgacaagtgaagcgatgaagcaagccatcttcacagagtagaaaagacatcggagagttggtagataactgtctgaaaagatagttgttcatttgaaactattctgtgatacagtcatgtgggaagggatgtttggctgtgattattttttcagttaatggataacaatttctttactgctcaaaaaccaaaatctttggaaaagaaagtggggatggttagtttcagaacaagttacagctgtaaacaaaagcacttagtatttgggatggcatgccaaaacctgtataaatgtccttgtatcacatcacttctcaagtattccttcattgggcttcatccttttagcagaactcttggtggtgggatagagacttagggagggtagggggagagtgtggaaataggtgcttcctttggctggcaaatgtctacatcttgaaacaaacagatgtacctaatgagcttctccattcactttgtaaaaataatttgtatgtgtaccatcttggtcctctcccctcccgttttgttaaaatatcaggatagcactcccaggccactttggtctcagtgtaagatccctattaactatctgaaaggaaaatagagccaagacctctggtctcaaatatataggaattgcctttctttagtcttcaggactattgtgtgaaaacaagtaggggtctaatctcctagaaggtaggggcttttatcgtatgtagggtgtgtggctggcccatcagtggagcacgaagagagaatgggataccattgtgggaagagaagaaaagttcctcaggggcctcccactgctaaagttttttgtgagatgttgatctgtgcttcctggatttgacttttaaaggaattattctggcagcacatgtagtattcttggatgatcttgctgctcttatttctccttttgtgtgtgtgtgtgtgtgtgtgtggctatgggttttcatttgtaactccatctgcttaggagagtgggctctctataagggaacctgctgtaaacttcattgcagcaaggatgtagagagaaataggacttaattccactaggggctctcatctcacaccttaaggaggagatttctagaaaaactgggccagattttctttgttctccatcattttaatgtggcaggctgttcagttttcttactcttacctatgtgatatttcttcgtaacgtgtccaaaaagaaaaaagacccaatcagtgtctcttgactttgttctttgatccctcagtttcttcttgatttcagcatgtgtcgggttcctaattttgggtatgagttagcaaatttaaccattgtgtttgtgccctacccaggggactccccagtttctgacttgaagtagactgagaagaatccacgaggtgctatctggccagatttaagtagattctatttccttggttctccctctccctgaggacctcttattttattgtcccctcttctaggttaattctcctttgatttgactttgttgagaaggaggttggacagtagattagcaaagttccaagtgcaaaattacagtgtgttagagtgtggggggaaaattagtcttatttttccctacatgggatacaacactgtgaattcaatcttcaactgaaggccctgcagttctcctaaaacatagttgtttgtttttctttaacaaagtttaagctagtgttaataaattaaaaaaaattgcttgtctgtctacttcagctttgttttatgcccatttcatattgttgtctgtgttgtaattcataacttttgataccatttctgatgtgtaaaattggttgtcttgtaaatatcttataaagagttcaattgtaaataaactattgtggctgttaaaaattgaacttctgcttcaatttattatatttattggcaaacaaacaattctgcttgtatatttgaaacattggaaaaagaaatccattttctcaataaaaaagaataacacatta

SEQ ID NO: 67841 - DNA, 686 bp, Homo sapiens
tgatgccatcaagtgttgcaggagaaacttcagtcttggctgttccttcttggagggaccactcagtagagcctctaagggacccaaatccttcagaccttttggagaacctggatgaacagtgtgttttcgaagcggcatgcaaaactggagctggatgagaagagaaggaaaagatgggatattcagaggatcagggaacaaagaattttacagcgactgcagctcagaatgtataaaaagaaaggaattcaggaatctgagcctgaggttacctcatttttccctgagccagatgatgttgaaagtttgatgattacccccttcttgcctgttgtagcatttggacgaccattaccaaaattaactccacagaattttgagctaccctggttggatgagcgtagccgatgcagattggagatccagaagaagcaaacacctcaccggacgtgtaggaaatagctgtgctggcaagaaccctgtcttcagatagttgtagcatgccattcccgagagtggcagagacctgtatatgtgacctttgtcctcacatatgttatcactcgctgataataccctttcatacttccttgactttgttttcattactctgatttcacaaagtcaaggaagtatgaaaggggtcgacgcggcccggaaattagtagttataagcccaaccc

SEQ ID NO: 67842 - DNA, 470 bp, Homo sapiens
agtatatgaaaaaaaatctggtgtcatacacatatataattgggaaatggaagagtatttacacaggcttttttagatattcttcctttatactacatcaaaacttgataagttgcaatgttgtgaattggcccagggcttggccctctgaagatttgctgaaaatcactgacatgaagtagattaataggataaaaggcatatacatttatttaatgtgtatacacagcggcctttagaatgaagacccaaagatacagaagaaattgtctgtttttatgcttaagtttaacaaagaatgggcagccgtgtagagataggataggacaaaaagggcataatctaatgctagctgactgagtgaggaagcccagcaaggcctgtcagtgtctcctcagtatgagtgaattttgtgtactctgataatacattaaaatctgtttatgtactctgataacacattcaaatct

SEQ ID NO: 67843 - DNA, 266 bp, Homo sapiens
gtgatccacctgcctcggcttcccaaagtgccgggattacaggtgtgagccaccgcgcctggccttacttctttttctattagactgtttatgagatataatttttcatctattagttgggcagcaatcccgaagtttaaaaacacacttgtgttcagaggatgttaatgggcatataaattggcaaaaactcacgttcaaaatttaaaatgcacacactttaagacccagcaattccacgtcaaggaaatcattcatatacttcc

SEQ ID NO: 67844 - DNA, 566 bp, Homo sapiens
ttagtacaaacctgagctaggaaataataacagagagctctttgtgccactgagtcctggaacttccccatactaattttgagaaggctttcttgtaagtatgtgacagatactgtttcctccactttctgtttattgcatataaccactattcttgtatgtaagtacgtataacagtttctttactattcccattattcagcgtttataatctggtttgacatatcagtgttggtgctgagagggaaaggtatttctaggtaggataaaatggtgaaaagtgatttaacactgttgtatgcttgcttttggccaggaactatagggcagtgtatcttaaactttgagtcttgagaccctcttacactcaaattctccatatatgtaaagaattgaaaacgagcttttatttatgtgaggtatttaacaatattgcattagaagttaaaactgagaatttaaaaatttctgttctcggccgggcatggtagctcacacgtgtaatctcagcactttgggaggccgaggcgggtggaattgcttgaggccaggagttcaagaccagc

SEQ ID NO: 67845 - DNA, 445 bp, Homo sapiens
ctacgcccctgttccacaagccataattatagctttggtgggacaagagactgatctcagtaactttctcctgataagaccatcggccatggactggttctagccagcttacagaggctgcgcacttgagtgcttttgtctttttgacgtatggggcctaactgcgatatatttaaatattaagtctccaccccaaggtgaacatggatggtatataacatgcatgtttgttcgatatgcatatgtcaggaccccttccgtaaatattcgtagctcctccagtaacctgttgaccaatccattcaactaaaattcctatctcactcctccctccctcaaagtgcctgttaaggctttggctggaggctctgcttcctagccagtgggatggccagcctgcaggttgtaaccctttataaaagagaaataaagtctccttttcaaa

SEQ ID NO: 67846 - DNA, 3513 bp, Homo sapiens
  misc_feature (1943)..(1943): n is a, c, g, or t
  misc_feature (3416)..(3416): n is a, c, g, or t
tttttccttctgacaccttctactgtgttcttgccactccctcccatcacctgcatttcctttcttaggtttctccatcctgggcccatttgccacaggtcagaccagcacaggcccacgctagcacgttgcccaggggcctccttcccttgggtcaggcccacttctctttcttagtcagaagagccctccacaaagccctcagaagattaatgcatttttttttaatacttgagaggcatttggtaggttttacagatgcccagtgacaattgcaaaggttaatttactttgagcttaaatagctaccagcttcaagaaaagtttattggccactagttctccaattacattttatctttctttagattgatttttttttttattgtaaagaaactggcatgtttgttcatccatgtttggtctctctacctttaggatttaacttcataattcgctgagtcaaacaacgcaggcagagctaaatttatacagggtcaacttttagagagcccacagcagtatctggtaggtatcaaacctgaatttttgtgactctatttttctttgtttctaacttctctgtgtataatcctggtttctctgtaccttctcagttgctcctcctgcatccctcattaatacctttttcctaactatgtcccttaagatggagctcttgccttgcttttttctgacaaaatactttattagaaaagaccatccattcttataacaatagctgtaagcttttgggaagctaaaggctcccaaagttgtactctagcccagtcttctttcctgagcaagaatcctgtcttctaaaggccccggacccctcctcctcactgtttaggagacaccccaacacacccactccaggccatcacctttccctcactttttcccaactctgctggtggccttgacagccaccgagtcactcgaagttaaaagactgtgaaatcatagaacagtgaaaactcctccacacatgttctcatagcaaaaccatgacatggataaagcaggtattatcattcctagtttacagatgaagaaacagatgcagagagattaaattatcccaatcacaaagtaaatggcagatttttgctatttaaaactggccagggcgggggcagaaacaaacctaaataaacaacttgaatattcagtcaaatatttatggaatgattaaatacataatgacatttccacacagtgggatattattcagatgttaaggaaagttaatttgaagaacatttgatgatatagggaaatgttcacattataacattgtcaaagaaggctcaataatctgtgatccctgtttttctgtatgtacgtatatacataaatgtgcatacacacacacacacacacacccctatacatctacccctttgtatatggagagggggagaaatctcccctcacagtcacacacgtaaacacttgagattttttgttaatgctcgagcaaaataaaccactctgtgatgagtgcataggtaattttaattgtcttctttgtagtcttccagatttgtcttcagtgagtacatgcagctttcagctggtaatttgcttttataaacaatagccaagtgagctgcagtgcctgttccccagctcatcctcctgcaggcttgtcccaggcccctccgtcctctcccttgaaatttgctcttccatcaattccctgtgttccagtcctctgtggcccccctcactggctccgcccagccccctgcctggggtgatccagccttctgccctgttcaccccctgccctagcctcagcccttgctttctctggtgcctccacccccatcaccacctcctgctctgagcccacctggcctagcctttgtgggcctccatgccatgaacagggtcagagcttgtaaatatgaggcctacagactggccaaggncactgcagcatcccagtctaaacgcacccgtgggtgagcctgtggactcagccatcttggctttcttgaaactcagcgtcgctgctgctcgctggctggcagggggtccacttggcagctctgacccacatgccctctgcaacccttcctctgtccttgacctctattccagatatgagtgacattcacttcccacattttcatttacctatactaattttgtgtttttattactttttaaattagagggggatacaacgacatttaaaagcctgttgtaacgggattgttagcttttaggaggtattggtctgccaccaccaccgtcagtccatcgttccaaaaaaatttattattgaggagtggtgtgatattaaatataatgtgaatctatttctgaaggaattagactgaaatttaattgaagattccttgtgcatcttgaagctaaaaataagagatcatacggtggccccagaatcccttactcccctctagcctcccaagcagaggtagcccagtcaggaggcttctagaaaaggaagtgcccaccatttagattcacatttaacagaatttttaacccagttttaaattagccccaatcacccttaatagttggtattccccatcagccaggattttgtctatctttatttactttcttggtttatattatgaaaaatgatttatccttactccttttcaggtataaaattatacagtcaggtgctgcataatgatattttggacgtgatagtagtccctaggcttacaatggagctaaaaattccttgcacctgatgatgttttgacgatcttgaccctttgtcggcagagactaatgtatgtgtttttcttagtttttaacaaaaaagtttaaaaagtaaaagaaaaaaattaatagaaaaaagcttatagaataaagatataaaggaaaaaataatttttgtacagctatacaatgtgcttgtgttttaagctaagtgttacaacaaaagtcaaaaagtttttaaaaatttaaagtttataaagtaaaaaagtttcagtaagctaagggtaatttatcactgaagaaagaaaaatgttttttataagattaatgtagcctaggtgtacagtgttgataaagtctatagtagtgtacagttatgtcctgggcctccacattcactctccactcattcactgactcacctggaacaacttccagtcctgcaagctctattcatgctaagtgccttagagaagtagaccattttttatcttttatactgcatttttactgtaccttatacatgtttagatatacaaataccattgtgttacaggtgcctacagtattcagtacagtaacatacggtacaagtttgtagcctaggagcaaaatgctgtaccatatagcctaggtggtagtgggcttgaccatctaggtttgtataagtacaccgtatgatgttcacccaatggcanaatcccctaatgcatttctgagaacgtagccccatcaagtcactcatgactctatgttgactatgctttttcacgcttccagaaaagtcccctcatt

SEQ ID NO: 67847 - DNA, 479 bp, Homo sapiens
caaatcgactggcaccttaatcttgaacttccagtctccagagctgttgggttatctcagaagcagaacctgagacaagaaagtgagtggaagcagtttatttgggagaaagtcccaggaagcactggtagcttacactcttggatcactgactctgagggaagccaactaccctattgtgaagctacacaccagctctgaagtgagatccacaagatgattctgtgagccgtcacaaggaatgaaagcctccagacaacagctgcatgagacagttagaaagaggaccctctagcacctgtcaagtctctagatggcaaaacctgagccagaaccacccagctaagcttctcccaggttcttggctcacaaaagctgtgaaaagaaatgtttgttcttttaagccattgagttttggggtaatttgttaagtggcagtagataactattaataataaaattgtattagatttttcaaa

SEQ ID NO: 67848 - DNA, 450 bp, Homo sapiens
gtaacaatcttgaattctaaattcttcctattttagtttcctcatctgttaaatgtagtttttaaaaactaaaaagcaaacatactcataagtcttttgagggattgcaagaggaaaaaaaaaatatatatatatatattttattttttatttaaaaaggcaatccaggaggggtgcggtgctcatgcctgtaatcccagcactttgggaggccaaggcgggcggaccacctgaggtcaggagttcgagaccatcctggccaacatggtgaaaccccatctctactaaaaatacaaaaattagccgggtgtggtggcatgtgcctgtagtcccagctactcgggggctgaggcaggagaatcacatgaactgaggaggcagaggttgcagtgagcccagattgtgccattgcactccaccctaggagacagagcagactctgtttcaaga

SEQ ID NO: 67849 - DNA, 258 bp, Homo sapiens
gtccttcaaaaatgagattcaaagcataccactaaaggaaatcacttcatcacaaaagaagatggcaagagaggaagaaaggaataacggatctgcaaaacaaccagaagacaatgaacaaaatggcagtagttaattcttacttatcaataattaccatgaatgtaaatgaaagaaatgaacaagaaacaaataaatggaaagatatcccatgtttgtggattaaaataattaacattcttaaaatgttcatattac

SEQ ID NO: 67850 - DNA, 601 bp, Homo sapiens
gctacagctagagccataatggtcttgtcctaccatctgaaagacatgttgattgctagaatgtttctgtggttaacaagataattcctctgataagtgaacaccttcacttaaatgcaaaaattatgactcatagattattaatttgtcacaatttactaaccctatcattggcctattgatgtaagttattcttgtcacgcttcacctacccagacgctaaagcatgtaaagcaatagttaagtttattgttcatctgattgacctggagggcttgttaaatgccattactgggctctaccttatgttttcaattcagtagggctggagtgaggctcaataatttgtatttcaagtgttgctctggtgtggaccacactttgtgaaccctttaaagcttcttgtcagtcacatgtttgtaagcagcactgtcttcctctgttctcttatttctatagctgcacacccttaaggcttgccctagtgtcaaaagtggatgctagttttatgtcttttttctagaggaggaaaaaccataacctagagaagtatctttccctgcatacatagtacattgacagaatctggaagatgcccttt

SEQ ID NO: 67851 - DNA, 274 bp, Homo sapiens
ctgcctgggctcacagggactgcagggggtatgattcctattcccataccagctttgtcaaagcacttgtcccagaagtggatcccatccctaaaacccattttaggcagagttgtgacacaggtgactggcattgccccttcccttctacacaggcccactgtcctcattatcttttgggaaacactagatttctccttagtgctgccttcctgcctacagcccaacagattcaaactgcggtcccggctcaatatatatttgatttgagttt

SEQ ID NO: 67852 - DNA, 5065 bp, Homo sapiens
  misc_feature (964)..(964): n is a, c, g, or t
  misc_feature (994)..(994): n is a, c, g, or t
  misc_feature (5009)..(5009): n is a, c, g, or t
  misc_feature (5040)..(5040): n is a, c, g, or t
  misc_feature (5065)..(5065): n is a, c, g, or t
gaacaatttgcagactgtggagagatagccttcagtgtaaaatgaagatgcaattcctgagaacaaagggaaggtcccgggttttatagcaaaagtgcccactcaggttctcaatcaggtccatatagcaaatgaaggattgaaacacgattagttctgactagttggtgctgctgagccctgattggctgaggctggtgagttctaattggttggttcgcattagctctgaaagtccaaaagttgaatggaggcatgggttttccaggaactcagagcacatgtgtgacctccaatcagcaaatggttggttggctgtattttaaatttagacccggttagccactcaggatccatcttagaggattggctctttcatgttcacatttgttcacacttattttgaaattttcagtctatcagtattaatgtagtttctgattatttaaatatcacatgtcagaatgaactccttcaaactccataaggtcttaacccagaatttttagagtgctaaccagtattaataaagcagcaagaccagaggttgggttcttgtattgttgcttgaagcagtgttaaagatacaccgacatgactaaaatgcattgctgagtaaacaagcacggattttaaagtttaatatgattaatgcaacttgatgccaaactctgaatgtctcctaaggcttccaagttactgaaaagcagccaatatattttcccaagtcatagatttgatgcaatccatgtgccttttattttaacatatttgttgccgttttaaaagttgccgtctgaaaaagtgctgaaaaaatgaagaccttttacttctgccgaccagttagactgtgccttcttcttttttttttttttttttttgagacggagtttcactcttgttgcccgggctggagtgcaatggatcaatctcagctcaccgcaacctctgcctctcgggttcnagcgattctcctgcctcagcctcccaagtngctgggattacaggcatgcaccaccatgcctggctaattttgtatttttagtagacacagggtttctccatgttggtcaggctggtctcgaactcccgatctcaagcgatttgcccgcctcggcctcccgaagtgctgggattacaggtgtgagccactgcgccccgcctatgttactttctttattcattttagcagaacaaactacagacagagccgcttgtgattctactcttgtcataattatttatgctctgccatcctcctggtcatgttttgtcttcgaaaacacaaaaacagtttattagtagactttgctctgcatacatgggccatcctgtggttgtcctgtaaaataatacaagctagtagtactgaaacatttagtattcttcagggttttttattttgttttccgagtgtagttcagttgtaacccaccattcctcgtttaaaatacaattcttagtttccatctcaagaattcagaaaaggaatcttgcgttttaagtttataataatgacagagagaccatcttttcctgtgatttttcaaaatgggtaggaattatttgctccagcattttctacctactctctggagtctttagggcatgagtagttctagctagccagtttctggagtagctgtgaatgttaaccaaattctgtccaaaatgactataatttcctttcagtattttataatacacttttctactatcttaaagaaagtacttgaacaaaatttaaacttatcactgtctcctgttttataattgattaaagcactcagccccacttgagatgagtatgacttttgcctttatatagagagaccataagccctgagaagtttatatttttacagtctcataatataaattttttaaaactttttttgtttaaaacctttaaaggtttgctgtcttatttgcttcttgtgtctttttcagaatacctttcttaacagtccctatttttagtttaatttttcacttctgttttgctaaggctgtaaattggcaatcacgtttaatggagtcttaggaatcagtacactaagttaaggacctcacaggctttcaacataagctccaacatcaacaacatcccatcattttggttagctcactgccttgttcttggctatattccagagaggtcagaaattattgattcctatgcaacctgaattttgtcagatgtaaaaaggaatatttaaaatgaaaattgaatgtatttagatatagccacttttttttttttttttttttttgagatggggtcttgctctgtcacccaggctggagtacagtggcgcgatctcggctcactgcaagctccgcctcctgggttcatgccattctcctgcctcagcctccccagcagctgggacaacaggcgcacaccgccacacccggctaattttttgtatttttagtagagacagggtttcaccatgttagccaggatggtctcgatctcctgacctcgtgatccgcccgcctccgcctcccaaagtgctgggattacaggcatgagccaccgctcctggctagatataatcactttttattttccagttttttttaattatatgtttcccttagggtgagtcagatgtcatttattttcgagatccattcagaatgataaattggatacaattgtgaggttaattatttcaatgttttgaagatagctcagtcctttttttgtcatctgaggttttgggccctctgaaaaactaccagttggcaagccctctgctatagcatcacaaatgcaaccattgccattgtacttgtcattcttgccctattttgtgttaaaaaaaatatatatatataaacaccatttaggattaacatttatcttaactcttgatgcaattttcatccatttgctgtcattttcccaaaagaaagagtaatgaaaatttaatttgggaagacataacataatactaatcaaatattgtctatataacctatatatcaatcagatcattcctgattttatcttatgagttggaattttaacctcttacatgtttgaacaattgttattagaacaattgttgctagagaacagatttcctattgccagaaccttcagacagagagaatgtgtgcgcgtccacaagcttaaaattttacgtcagtgtttcaaaatgtttcttgaccatggggtattaattctgagtggtattatgagcggtaaaaagtaaaaccctgatagtttcctggatcagacctattagagttgtttagataacacactttgaattacttcctctcaggaaacattgaaactggaaatgttaaccagacacacatacggaagcacttagaatgcattgtttcttttgctattaaaaaaaaaaggaaaaaaattatgcaaataaattacatctgtagaaacctgaggagactatttggctctactgctaaagaaagagcatttatttatgagatttttcatctgtcactggcagtgaccacaaaattggtcagtacgttagttgtataatttattcagggctaattgctagcattaataatgacttcagagttggaagcatgggatacagattgtgctcacatatgttacacatttttatgtatgagagtaggagtaagttatttaagaagtacacacatacacgaaaatgtagacaaaactgttgaatgtgcccagatagtgacatttagtaaggagaactttgatctgtttaatctgtacgtgtactgtttgatatgagtctcaaaaactggtggacattatctttcagttcatttcctgtgcagtacttcactagacttatcatttcttaattctggaaggtgtatgtttataaagataaattaggaaaaatatagtaaatattgatttaaagggatagaaacacattttttgtttccggatccctgtctgcatcttatccctgtctccatctttattcaaatgggtgactcgccaagtttttcacaaagttctaataaaaaggaagtatagcagtgcagctgagagttttgcagactagactattctaaaattgtatattttgaattatttccatatgttcacatcctttgggatataattgtaatgatatttcaggctctattctggcattaagttttattctgggataacatagtcaataaaaatttgaacgatattcagtacagagaaggataatacttagaagtagtggtttgggcttcaacacagtaggagatgaaaacttagaaatctatgtgaaaatacagaggtgtgaaaggcaatgtgaaacacttaaaaaaagtaaaatgttttgttaataaaagtaatagtaacgatggcctccatttattgagagcctaccatgtgccaagcactgtgagcatttgtttacatacgttcacttagcctgcaaaatagatggtgatgttccattttataggtgaggaacctaaggctcaaaaaactaaaagcattttgtctgaagtcactacactgtaaaggcaagattgaaactcagcttgtagtttagctgatagtattgtatctgtcagtttccaaaggccatggttcttttcatccatctatacccagtatcagtaaacctttactgtaagaaacagagagcacgtattttagagtttgcaagccatacagtcactgttgcagctactcagcactgccatcatagcgtgaaaacagccatagactatttataaatgaatgggtgtggcagtgtcccaataaaactttatttacagaaccaagtggtgggccaggtgtggactgtgggtattagtttgctgacctttgatctatatttttgtaagtttaactagatgctggttgaaagtaaaagccttagggataaaccaaaggctaaaattgatagcagatgattcttggtgacctaagtcaagagaataaaataactgaaaccaggacccagacagagcagcctgttcctctagtcccagccacttgggaggctgagacaggaggatcncttgagcctaggagttcaagtacagcttgancagcatagcaagacccagtctcttn

SEQ ID NO: 67853 - DNA, 1741 bp, Homo sapiens
ctcggaagatgggcgggtgtgggaacagtggtacgcccccattcctgccttccagagagaacgtgcgacagcgttcctgctacacccggcagccggccgtaggggcgcgctggaaaggctgctgcgcgtgcacacgtgtgcagccttggagacagacttcggggtcgcgcgttctcgcgcgcgctctctagtggcttcggagggcagagctgacagaacaagagggcggggttggcggcgacggagagtgaagtcacttccgggctggggtgtttgtttggactggagaagggaggcggcgggcgaagcgcacgtcgagcgggggagcggcgctgcctgtggagatccgcggaggccgacaggattcgttggctgccgtccccgctgctgtgcattgggttaaaaacgacaaccaacatcagccatgaaagatccaagtcgcagcagtactagcccaagcatcatcaatgaagatgtgattattaacggtcattctcatgaagatgacaatccatttgcagagtacatgtggatggaaaatgaagaagaattcaacagacaaatagaagaggagttatgggaagaagaatttattgaacgctgtttccaagaaatgctggaagaggaagaagagcatgaatggtttattccagctcgagatctcccacaaactatggaccaaatccaagaccagtttaatgaccttgttatcagtgatggctcttctctggaagatcttgtggtcaagagcaatctgaatccaaatgcaaaggagtttgttcctggggtgaagtacggaaatatttgagtagacggggccctcttttggtggatgtagcacaatttccacactgtgaaggcagtattagaagacttaattgtaaaagctctcttgtcactgtgttacacttatgcattgccaaagtttttgttagtcttgcatgcttaataaaagtgctgagactgttactaagtaaaaagctgtcaaacatttactgaaaatagaattggccccatggcttgatgtgaagacagcaaggaaagaagcaccagtcaagttgtgaacaagcaccaaattaaaagacctaaaccttaccaaattgtctttttttgaggctaatctatcacttgttaatgtctaaactttaaaatcagtacatttaatttgagttccaactgttaagcatatttctcagacttaaatttgattatgtccccatcaaaaagaatctccattttctgaaggtctgttagttaatttgagataatttgttaaaggcaagtatgtcatattactgaggctacaagttagtcagcagatgagtgccagtccagccttttctggtatgttattgttagaaatattgagttctaatgttacatctgaggaagtatgtaatttgagaattgtaacttctaagggattcactgcatcatagctatgcctgtatggagtctaacatatgaccaataccaacccataatccagctgaacaaagatactgtaacattatgatttgagtggtgcttttccttgctttgttaaccatcacgagagtctgcagcacaacttttaacaaagctagaacagttttggcttcttaaacttcatatttgggtaggttaagctgccatacgtgttcagtgtgaatagtgtttaagttgaaaatattgtaaaaaaattatattttttcaaaaatatttaaaaaaataaataatagtagaactgaaaaaaaaaaaa

SEQ ID NO: 67854 - DNA, 1062 bp, Homo sapiens
  misc_feature (998)..(998): n is a, c, g, or t
ctcggaagatgggcgggtgtgggaacagtggtacgcccccattcctgccttccagagagaacgtgcgacagcgttcctgctacacccggcagccggccgtaggggcgcgctggaaaggctgctgcgcgtgcacacgtgtgcagccttggagacagacttcggggtcgcgcgttctcgcgcgcgctctctagtggcttcggagggcagagctgacagaacaagagggcggggttggcggcgacggagagtgaagtcacttccgggctggggtgtttgtttggactggagaagggaggcggcgggcgaagcgcacgtcgagcgggggagcggcgctgcctgtggagatccgcggaggccgacaggattcgttggctgccgtccccgctgctgtgcattgggttaaaaacgacaaccaacatcagccatgaaagatccaagtcgcagcagtactagcccaagcatcatcaatgaagatgtgattattaacggtcattctcatgaagatgacaatccatttgcagagtacatgtggatggaaaatgaagaagaattcaacagacaaatagaagaggagttatgggaagaagaatttattgaacgctgtttccaagaaatgctggaagaggaagaagagcatgaatggtttattccagctcgagatctcccacaaactatggaccaaatccaagaccagtttaatgaccttgttatcagtgatggctcttctctggaagatcttgtggtcaagagcaatctgaatccaaatgcaaaggagtttgttcctggggtgaagtacggaaatatttgagtagacggggccctcttttggtggatgtagcacaatttccacactgtgaaggcagtattagaagacttaattgtaaaagctctcttgtcactgtgttacacttatgcattgccaggtttggtagactggtgcgtacaaagtgtggcaggtctaacaacacggccccacctcggacgccccgctattaaangaacctatctatgtcgcacgctccccacaacctacgtcgagatcacacagtagggcaccagcac

SEQ ID NO: 67855 - DNA, 1089 bp, Homo sapiens
ctcggaagatgggcgggtgtgggaacagtggtacgcccccattcctgccttccagagagaacgtgcgacagcgttcctgctacacccggcagccggccgtaggggcgcgctggaaaggctgctgcgcgtgcacacgtgtgcagccttggagacagacttcggggtcgcgcgttctcgcgcgcgctctctagtggcttcggagggcagagctgacagaacaagagggcggggttggcggcgacggagagtgaagtcacttccgggctggggtgtttgtttggactggagaagggaggcggcgggcgaagcgcacgtcgagcgggggagcggcgctgcctgtggagatccgcggaggccgacaggattcgttggctgccgtccccgctgctgtgcattgggttaaaaacgacaaccaacatcagccatgaaagatccaagtcgcagcagtactagcccaagcatcatcaatgaagatgtgattattaacggtcattctcatgaagatgacaatccatttgcagagtacatgtggatggaaaatgaagaagaattcaacagacaaatagaagaggagttatgggaagaagaatttattgaacgctgtttccaagaaatgctggaagaggaagaagagcatgaatggtttattccagctcgagatctcccacaaactatggaccaaatccaagaccagtttaatgaccttgttatcagtgatggctcttctctggaagatcttgtggtaaaaagttatttttcatctttttaaaacctagtgcatcttttgcataagtggaaaagccagctcccatctatttaagaattctacatctctttccccttcagaaattgtgctgcttctggccgggcatgtggctcacgcctgtaatcccagcactttgggaggccgaggcaggcagttgacttgaggtcaggagtttgagaccagcctgaccaacatggagaaaccccatctctactaaaaataaaaaattagccgggcatggtagcacatgcctgtgatcccagctactcgggaggctgaggcaggagaatcgcttgaacccgggagacggaagttgtggtgag

SEQ ID NO: 67856 - DNA, 763 bp, Homo sapiens
ctcggaagatgggcgggtgtgggaacagtggtacgcccccattcctgccttccagagagaacgtgcgacagcgttcctgctacacccggcagccggccgtaggggcgcgctggaaaggctgctgcgcgtgcacacgtgtgcagccttggagacagacttcggggtcgcgcgttctcgcgcgcgctctctagtggcttcggagggcagagctgacagaacaagagggcggggttggcggcgacggagagtgaagtcacttccgggctggggtgtttgtttggactggagaagggaggcggcgggcgaagcgcacgtcgagcgggggagcggcgctgcctgtggagatccgcggaggccgacaggattcgttggctgccgtccccgctgctgtgcattggggatggaggttagggaatggagatttcctctaatgattcaaggctgtgcacgttgctccttaggaactcaaattgaggttaaaaacgacaaccaacatcagccatgaaagatccaagtcgcagcagtactagcccaagcatcatcaatgaagatgtgattattaacggtcattctcatgaagatgacaatccatttgcagagtacatgtggatggaaaatgaagaagaattcaacagacaaacaagttagttttttgtacaaacatgtttttatagtccattctggccctcaatatgattgtacttgtccctgaaatgtgtttatcttgtcctttatgtataaagtatgtagactgatgtgccac

SEQ ID NO: 67857 - DNA, 166 bp, Homo sapiens
catcacactctagagtcataaagtgataaacctgaataaagtgtagagtgcttatttaaggaaaagcctgctataaactccttaggaactcaaattgaggtaggtaatttcaccctcttttggtcagaatgagtttatagcaggcttttccttaaataagcactct

SEQ ID NO: 67858 - DNA, 1688 bp, Homo sapiens
ctcggaagatgggcgggtgtgggaacagtggtacgcccccattcctgccttccagagagaacgtgcgacagcgttcctgctacacccggcagccggccgtaggggcgcgctggaaaggctgctgcgcgtgcacacgtgtgcagccttggagacagacttcggggtcgcgcgttctcgcgcgcgctctctagtggcttcggagggcagagctgacagaacaagagggcggggttggcggcgacggagagtgaagtcacttccgggctggggtgtttgtttggactggagaagggaggcggcgggcgaagcgcacgtcgagcgggggagcggcgctgcctgtggagatccgcggaggccgacaggattcgttggctgccgtccccgctgctgtgcattgggttaaaaacgacaaccaacatcagccatgaaagatccaagtcgcagcagtactagcccaagcatcatcaatgaagatgtgattattaacggtcattctcatgaagatgacaatccatttgcagagtacatgtggatggaaaatgaagaagaattcaacagacaaatagaagaggagttatgggaagaagaatttattgaacgctgtttccaagaaatgctggaagaggaagaagagcatgaatggtttattccagctcgagatctcccacaaactatggaccaaatccaagaccagtttaatgaccttgttatcagtgatggctcttctctggaagatcttgtggtcaagagcaatctgaatccaaatgcaaaggagtttgttcctggggtgaagtacggaaatatttgagtagacggggccctcttttggtggatgtagcacaatttccacactgtgaaggcagtattagaagacttaattgtaaaagctctcttgtcactgtgttacacttatgcattgccaaagtttttgttagtcttgcatgcttaataaaagtgctgagactgttactaagtaaaaagctgtcaaacatttactgaaaatagaattggccccatggcttgatgtgaagacagcaaggaaagaagcaccagtcaagttgtgaacaagcaccaaattaaaagacctaaaccttaccaaattgtctttttttgaggctaatctatcacttgttaatgtctaaaacttaaatttgattatgtccccatcaaaaagaatctccattttctgaaggtctgttagttaatttgagataatttgttaaaggcaagtatgtcatattactgaggctacaagttagtcagcagatgagtgccagtccagccttttctggtatgttattgttagaaatattgagttctaatgttacatctgaggaagtatgtaatttgagaattgtaacttctaagggattcactgcatcatagctatgcctgtatggagtctaacatatgaccaataccaacccataatccagctgaacaaagatactgtaacattatgatttgagtggtgcttttccttgctttgttaaccatcacgagagtctgcagcacaacttttaacaaagctagaacagttttggcttcttaaacttcatatttgggtaggttaagctgccatacgtgttcagtgtgaatagtgtttaagttgaaaatattgtaaaaaaattatattttttcaaaaatatttaaaaaaataaataatagtagaactgaaaaaaaaaaaa

SEQ ID NO: 67859 - DNA, 1547 bp, Homo sapiens
ctcggaagatgggcgggtgtgggaacagtggtacgcccccattcctgccttccagagagaacgtgcgacagcgttcctgctacacccggcagccggccgtaggggcgcgctggaaaggctgctgcgcgtgcacacgtgtgcagccttggagacagacttcggggtcgcgcgttctcgcgcgcgctctctagtggcttcggagggcagagctgacagaacaagagggcggggttggcggcgacggagagtgaagtcacttccgggctggggtgtttgtttggactggagaagggaggcggcgggcgaagcgcacgtcgagcgggggagcggcgctgcctgtggagatccgcggaggccgacaggattcgttggctgccgtccccgctgctgtgcattgggttaaaaacgacaaccaacatcagccatgaaagatccaagtcgcagcagtactagcccaagcatcatcaatgaagatgtgattattaacggtcattctcatgaagatgacaatccatttgcagagtacatgtggatggaaaatgaagaagaattcaacagacaaatagaagaggagttatgggaagaagaatttattgaacgctgtttccaagaaatgctggaagaggaagaagagcatgaatggtttattccagctcgagatctcccacaaactatggaccaaatccaagaccagtttaatgaccttgttatcagtgatggctcttctctggaagatcttgtggtcaagagcaatctgaatccaaatgcaaaggagtttgttcctggggtgaagtacggaaatatttgagtagacggggccctcttttggtggatgtagcacaatttccacactgtgaaggcagtattagaagacttaattgtaaaagctctcttgtcactgtgttacacttatgcattgccaaagtttttgttagtcttgcatgcttaataaaagtgctgagactgttactaagtaaaaagctgtcaaacatttactgaaaatagaattggccccatggcttgatgtgaagacagcaaggaaagaagcaccagtcaagttgtgaacaagcaccaaattaaaagacctaaaccttaccaaattgtctttttttgaggctaatctatcacttgttaatgtctaaactttaaaatcagtacatttaatttgagttccaactgttaagcatatttctcagacttaaatttgattatgtccccatcaaaaagaatctccattttctgaaggtctgttagttaatttgagataatttgttaaaggcaagtatgtcatattactgaggctacaagttagtcagcagatgagtgccagtccagccttttctggtatgttattgttagaaatattgagttctaatgttacatctgaggaagtatgtaatttgagaattgtaacttctaagggattcactgcatcatagctatgcctgtatggagtctaacatatgaccaataccaacccataatccgttacagtatctttgttcagctggattctgggttggtattggtcatatgttagtacgtgc

SEQ ID NO: 67860 - DNA, 1687 bp, Homo sapiens
ctcggaagatgggcgggtgtgggaacagtggtacgcccccattcctgccttccagagagaacgtgcgacagcgttcctgctacacccggcagccggccgtaggggcgcgctggaaaggctgctgcgcgtgcacacgtgtgcagccttggagacagacttcggggtcgcgcgttctcgcgcgcgctctctagtggcttcggagggcagagctgacagaacaagagggcggggttggcggcgacggagagtgaagtcacttccgggctggggtgtttgtttggactggagaagggaggcggcgggcgaagcgcacgtcgagcgggggagcggcgctgcctgtggagatccgcggaggccgacaggattcgttggctgccgtccccgctgctgtgcattgggttaaaaacgacaaccaacatcagccatgaaagatccaagtcgcagcagtactagcccaagcatcatcaatgaagatgtgattattaacggtcattctcatgaagatgacaatccatttgcagagtacatgtggatggaaaatgaagaagaattcaacagacaaatagaagaggagttatgggaagaagaatttattgaacgctgtttccaagaaatgctggaagaggaagaagagcatgaatggtttattccagctcgagatctcccacaaactatggaccaaatccaagaccagtttaatgaccttgttatcagtgatggctcttctctggaagatcttgtggtcaagagcaatctgaatccaaatgcaaaggagtttgttcctggggtgaagtacggaaatatttgagtagacggggccctcttttggtggatgtagcacaatttccacactgtgaaggcagtattagaagacttaattgtaaaagctctcttgtcactgtgttacacttatgcattgccaaagtttttgttagtcttgcatgcttaataaaagtgctgagactgttactaagtaaaaagctgtcaaacatttactgaaaatagaattggccccatggcttgatgtgaagacagcaaggaaagaagcaccagtcaagttgtgaacaagcaccaaattaaaagacctaaaccttaccaaattgtctttttttgaggctaatctatcacttgttaatgtctaaactttaaaatcagtacatttaatttgagttccaactgttaagcatatttctcagacttaaatttgattatgtccccatcaaaaagaatctccattttctgaaggtctgttagttaatttgagataatttgttaaaggcaagtatgtcatattactgaggctacaagttagtcagcagatgagtgccagtccagccttttctggtatgttatttgtaacttctaagggattcactgcatcatagctatgcctgtatggagtctaacatatgaccaataccaacccataatccagctgaacaaagatactgtaacattatgatttgagtggtgcttttccttgctttgttaaccatcacgagagtctgcagcacaacttttaacaaagctagaacagttttggcttcttaaacttcatatttgggtaggttaagctgccatacgtgttcagtgtgaatagtgtttaagttgaaaatattgtaaaaaaattatattttttcaaaaatatttaaaaaaataaataatagtagaactgaaaaaaaaaaaa

SEQ ID NO: 67861 - DNA, 2377 bp, Homo sapiens
ctcggaagatgggcgggtgtgggaacagtggtacgcccccattcctgccttccagagagaacgtgcgacagcgttcctgctacacccggcagccggccgtaggggcgcgctggaaaggctgctgcgcgtgcacacgtgtgcagccttggagacagacttcggggtcgcgcgttctcgcgcgcgctctctagtggcttcggagggcagagctgacagaacaagagggcggggttggcggcgacggagagtgaagtcacttccgggctggggtgtttgtttggactggagaagggaggcggcgggcgaagcgcacgtcgagcgggggagcggcgctgcctgtggagatccgcggaggccgacaggattcgttggctgccgtccccgctgctgtgcattgggtgaggggtcctctcgggcagagtggcgacaggggtgcggaggtcgagggacagcaagtcggcgacggcagaggggcctaaagggttccctgggtggttggccaccgagtccattgcggcctccgttgttcattgcctctttccaccaagtctgagggatgagcttgggccgacttcgtctctgtcttctccgagacatggccgtcgcttttttttcattgtcattattaatgatttggatctcgcagctctctatccgggtcctcagtggcgcgagggttgccgggatagcactttctcctgttcctcattctcccggtcctttatccctccgccgggtaccctttcccctgcccccctcccaccgcctcggcaacaaagcttattgtttctacccactttacgcctgcgcgtcgccacgcgcagcccctacttgctgcgcgtgcgcgcctcagccgaggctggggtttggggagagaggggcggagggactggcgggctcttggcgtcttgggggaacgctgcaaccgtcgacgggcctgatcagaagatcgtctttctcccgtttcttcgccatcgctaccccttatttttggttgtattgcagctcatgccctggaaaaaagaacctttggggttaaaaacgacaaccaacatcagccatgaaagatccaagtcgcagcagtactagcccaagcatcatcaatgaagatgtgattattaacggtcattctcatgaagatgacaatccatttgcagagtacatgtggatggaaaatgaagaagaattcaacagacaaatagaagaggagttatgggaagaagaatttattgaacgctgtttccaagaaatgctggaagaggaagaagagcatgaatggtttattccagctcgagatctcccacaaactatggaccaaatccaagaccagtttaatgaccttgttatcagtgatggctcttctctggaagatcttgtggtcaagagcaatctgaatccaaatgcaaaggagtttgttcctggggtgaagtacggaaatatttgagtagacggggccctcttttggtggatgtagcacaatttccacactgtgaaggcagtattagaagacttaattgtaaaagctctcttgtcactgtgttacacttatgcattgccaaagtttttgttagtcttgcatgcttaataaaagtgctgagactgttactaagtaaaaagctgtcaaacatttactgaaaatagaattggccccatggcttgatgtgaagacagcaaggaaagaagcaccagtcaagttgtgaacaagcaccaaattaaaagacctaaaccttaccaaattgtctttttttgaggctaatctatcacttgttaatgtctaaactttaaaatcagtacatttaatttgagttccaactgttaagcatatttctcagacttaaatttgattatgtccccatcaaaaagaatctccattttctgaaggtctgttagttaatttgagataatttgttaaaggcaagtatgtcatattactgaggctacaagttagtcagcagatgagtgccagtccagccttttctggtatgttattgttagaaatattgagttctaatgttacatctgaggaagtatgtaatttgagaattgtaacttctaagggattcactgcatcatagctatgcctgtatggagtctaacatatgaccaataccaacccataatccagctgaacaaagatactgtaacattatgatttgagtggtgcttttccttgctttgttaaccatcacgagagtctgcagcacaacttttaacaaagctagaacagttttggcttcttaaacttcatatttgggtaggttaagctgccatacgtgttcagtgtgaatagtgtttaagttgaaaatattgtaaaaaaattatattttttcaaaaatatttaaaaaaataaataatagtagaactgaaaaaaaaaaaa

SEQ ID NO: 67862 - DNA, 1237 bp, Homo sapiens
atcctgcggcgtactagaggaccccccaagatgagaaattgagagaatcaacagacaaatagaagaggagttatgggaagaagaatttattgaacgctgtttccaagaaatgctggaagaggaagaagagcatgaatggtttattccagctcgagatctcccacaaactatggaccaaatccaagaccagtttaatgaccttgttatcagtgatggctcttctctggaagatcttgtggtcaagagcaatctgaatccaaatgcaaaggagtttgttcctggggtgaagtacggaaatatttgagtagacggggccctcttttggtggatgtagcacaatttccacactgtgaaggcagtattagaagacttaattgtaaaagctctcttgtcactgtgttacacttatgcattgccaaagtttttgttagtcttgcatgcttaataaaagtgctgagactgttactaagtaaaaagctgtcaaacatttactgaaaatagaattggccccatggcttgatgtgaagacagcaaggaaagaagcaccagtcaagttgtgaacaagcaccaaattaaaagacctaaaccttaccaaattgtctttttttgaggctaatctatcacttgttaatgtctaaactttaaaatcagtacatttaatttgagttccaactgttaagcatatttctcagacttaaatttgattatgtccccatcaaaaagaatctccattttctgaaggtctgttagttaatttgagataatttgttaaaggcaagtatgtcatattactgaggctacaagttagtcagcagatgagtgccagtccagccttttctggtatgttattgttagaaatattgagttctaatgttacatctgaggaagtatgtaatttgagaattgtaacttctaagggattcactgcatcatagctatgcctgtatggagtctaacatatgaccaataccaacccataatccagctgaacaaagatactgtaacattatgatttgagtggtgcttttccttgctttgttaaccatcacgagagtctgcagcacaacttttaacaaagctagaacagttttggcttcttaaacttcatatttgggtaggttaagctgccatacgtgttcagtgtgaatagtgtttaagttgaaaatattgtaaaaaaattatattttttcaaaaatatttaaaaaaataaataatagtagaactgaaaaaaaaaaaa

SEQ ID NO: 67863 - DNA, 1716 bp, Homo sapiens
ctcggaagatgggcgggtgtgggaacagtggtacgcccccattcctgccttccagagagaacgtgcgacagcgttcctgctacacccggcagccggccgtaggggcgcgctggaaaggctgctgcgcgtgcacacgtgtgcagccttggagacagacttcggggtcgcgcgttctcgcgcgcgctctctagtggcttcggagggcagagctgacagaacaagagggcggggttggcggcgacggagagtgaagtcacttccgggctggggtgtttgtttggactggagaagggaggcggcgggcgaagcgcacgtcgagcgggggagcggcgctgcctgtggagatccgcggaggccgacaggattcgttggctgccgtccccgctgctgtgcattgggttaaaaacgacaaccaacatcagccatgaaagatccaagtcgcagcagtactagcccaagcatcatcaatgaagatgtgattattaacggtcattctcatgaagatgacaatccatttgcagagtacatgtggatggaaaatgaagaagaattcaacagacaaaatttattgaacgctgtttccaagaaatgctggaagaggaagaagagcatgaatggtttattccagctcgagatctcccacaaactatggaccaaatccaagaccagtttaatgaccttgttatcagtgatggctcttctctggaagatcttgtggtcaagagcaatctgaatccaaatgcaaaggagtttgttcctggggtgaagtacggaaatatttgagtagacggggccctcttttggtggatgtagcacaatttccacactgtgaaggcagtattagaagacttaattgtaaaagctctcttgtcactgtgttacacttatgcattgccaaagtttttgttagtcttgcatgcttaataaaagtgctgagactgttactaagtaaaaagctgtcaaacatttactgaaaatagaattggccccatggcttgatgtgaagacagcaaggaaagaagcaccagtcaagttgtgaacaagcaccaaattaaaagacctaaaccttaccaaattgtctttttttgaggctaatctatcacttgttaatgtctaaactttaaaatcagtacatttaatttgagttccaactgttaagcatatttctcagacttaaatttgattatgtccccatcaaaaagaatctccattttctgaaggtctgttagttaatttgagataatttgttaaaggcaagtatgtcatattactgaggctacaagttagtcagcagatgagtgccagtccagccttttctggtatgttattgttagaaatattgagttctaatgttacatctgaggaagtatgtaatttgagaattgtaacttctaagggattcactgcatcatagctatgcctgtatggagtctaacatatgaccaataccaacccataatccagctgaacaaagatactgtaacattatgatttgagtggtgcttttccttgctttgttaaccatcacgagagtctgcagcacaacttttaacaaagctagaacagttttggcttcttaaacttcatatttgggtaggttaagctgccatacgtgttcagtgtgaatagtgtttaagttgaaaatattgtaaaaaaattatattttttcaaaaatatttaaaaaaataaataatagtagaactgaaaaaaaaaaaa

SEQ ID NO: 67864 - DNA, 851 bp, Homo sapiens
cggacgcgtggggtaaaaagctgtcaaacatttacttagtaacagtctcagcacttttattaagcatgcaagactgttactaagtaaaaagctgtcaaacatttactgaaaatagaattggccccatggcttgatgtgaagacagcaaggaaagaagcaccagtcaagttgtgaacaagcaccaaattaaaagacctaaaccttaccaaattgtctttttttgaggctaatctatcacttgttaatgtctaaactttaaaatcagtacatttaatttgagttccaactgttaagcatatttctcagacttaaatttgattatgtccccatcaaaaagaatctccattttctgaaggtctgttagttaatttgagataatttgttaaaggcaagtatgtcatattactgaggctacaagttagtcagcagatgagtgccagtccagccttttctggtatgttattgttagaaatattgagttctaatgttacatctgaggaagtatgtaatttgagaattgtaacttctaagggattcactgcatcatagctatgcctgtatggagtctaacatatgaccaataccaacccataatccagctgaacaaagatactgtaacattatgatttgagtggtgcttttccttgctttgttaaccatcacgagagtctgcagcacaacttttaacaaagctagaacagttttggcttcttaaacttcatatttgggtaggttaagctgccatacgtgttcagtgtgaatagtgtttaagttgaaaatattgtaaaaaaattatattttttcaaaaatatttaaaaaaataaataatagtagaactgaaaaaaaaaaaa

SEQ ID NO: 67865 - DNA, 746 bp, Homo sapiens
aaaaacagtccagacgtttgtttcatcaggacaccaaactctaaaaaagaagcaccagtcaagttgtgaacaagcaccaaattaaaagacctaaaccttaccaaattgtctttttttgaggctaatctatcacttgttaatgtctaaactttaaaatcagtacatttaatttgagttccaactgttaagcatatttctcagacttaaatttgattatgtccccatcaaaaagaatctccattttctgaaggtctgttagttaatttgagataatttgttaaaggcaagtatgtcatattactgaggctacaagttagtcagcagatgagtgccagtccagccttttctggtatgttattgttagaaatattgagttctaatgttacatctgaggaagtatgtaatttgagaattgtaacttctaagggattcactgcatcatagctatgcctgtatggagtctaacatatgaccaataccaacccataatccagctgaacaaagatactgtaacattatgatttgagtggtgcttttccttgctttgttaaccatcacgagagtctgcagcacaacttttaacaaagctagaacagttttggcttcttaaacttcatatttgggtaggttaagctgccatacgtgttcagtgtgaatagtgtttaagttgaaaatattgtaaaaaaattatattttttcaaaaatatttaaaaaaataaataatagtagaactgaaaaaaaaaaaa

SEQ ID NO: 67866 - DNA, 666 bp, Homo sapiens
ggccaacgttggtctcagctacaaattgtctttttttgaggctaatctatcacttgttaatgtctaaactttaaaatcagtacatttaatttgagttccaactgttaagcatatttctcagacttaaatttgattatgtccccatcaaaaagaatctccattttctgaaggtctgttagttaatttgagataatttgttaaaggcaagtatgtcatattactgaggctacaagttagtcagcagatgagtgccagtccagccttttctggtatgttattgttagaaatattgagttctaatgttacatctgaggaagtatgtaatttgagaattgtaacttctaagggattcactgcatcatagctatgcctgtatggagtctaacatatgaccaataccaacccataatccagctgaacaaagatactgtaacattatgatttgagtggtgcttttccttgctttgttaaccatcacgagagtctgcagcacaacttttaacaaagctagaacagttttggcttcttaaacttcatatttgggtaggttaagctgccatacgtgttcagtgtgaatagtgtttaagttgaaaatattgtaaaaaaattatattttttcaaaaatatttaaaaaaataaataatagtagaactgaaaaaaaaaaaa

SEQ ID NO: 67867 - DNA, 1744 bp, Homo sapiens
ctcggaagatgggcgggtgtgggaacagtggtacgcccccattcctgccttccagagagaacgtgcgacagcgttcctgctacacccggcagccggccgtaggggcgcgctggaaaggctgctgcgcgtgcacacgtgtgcagccttggagacagacttcggggtcgcgcgttctcgcgcgcgctctctagtggcttcggagggcagagctgacagaacaagagggcggggttggcggcgacggagagtgaagtcacttccgggctggggtgtttgtttggactggagaagggaggcggcgggcgaagcgcacgtcgagcgggggagcggcgctgcctgtggagatccgcggaggccgacaggattcgttggctgccgtccccgctgctgtgcattgggtgaggggtcctctcgggcagagtggcgacaggggtgcggaggtcgagggacagcaagtcggcgacggcagaggggcctaaagggttccctgggtggttggccaccgagtccattgcggcctccgttgttcattgcctctttccaccaagtctgagggatgagcttgggccgacttcgtctctgtcttctccgagacatggccgtcgcttttttttcattgtcattattaatgatttggatctcgcagctctctatccgggtcctcagtggcgcgagggttgccgggatagcactttctcctgttcctcattctcccggtcctttatccctccgccgggtaccctttcccctgcccccctcccaccgcctcggcaacaaagcttattgtttctacccactttacgcctgcgcgtcgccacgcgcagcccctacttgctgcgcgtgcgcgcctcagccgaggctggggtttggggagagaggggcggagggactggcgggctcttggcgtcttgggggaacgctgcaaccgtcgacgggcctgatcagaagatcgtctttctcccgtttcttcgccatcgctaccccttatttttggttgtattgcagctcatgccctggaaaaaagaacctttggggtactgggaacccttaccctaggagggcgttgagttagatgaactttaaggtcctcttaccttttaataattttctgtgcttactctcctccttccccaccatcgccaccagaaataaataaggcttgtggtgaacttaggtcttcaaaacatttgttgcagcagccagcagtgatattttttagggactcctaaaaggggtcttacctgcttccttttgtttcttttttccctgatttggcacccgtatcaactcataaaaaccccaaactctagaaagaatttggcttccaatttgccttggaaggtgtagcagctgacagcctttgacgtttatttcaacggaaagtagatgttcatgttgggtgtgctggctaatgttgaaacgtggtggcattgttttttcacagatttcattagcacagttagatcaggtgttggtttatattttcattaagtcgcttttgaaatttcttctggcgtaggttgtgtttgcaataagtaaaagttctctacaataatttttaatgagactccactatttgcttttgtgattctgtttccagttagtgaaagacaggatatttggggaaaattagtctgtttatactacttgtcagttgtgaacttgaataaaactttttcacacacacacaaaatcacaggataggtaacttgacaagaactatagaacccacttgtgtttcttt

SEQ ID NO: 67868 - DNA, 253 bp, Homo sapiens
tagtgtttaatttggtgcttgttcacaacttgactggtgcttttccttgctttgttaaccatcacgagagtctgcagcacaacttttaacaaagctagaacagttttggcttcttaaacttcatatttgggtaggttaagctgccatacgtgttcagtgtgaatagtgtttaagttgaaaatattgtaaaaaaattatattttttcaaaaatatttaaaaaaataaataatagtagaactgaaaaaaaaaaaa

SEQ ID NO: 67869 - DNA, 1231 bp, Homo sapiens
ctcggaagatgggcgggtgtgggaacagtggtacgcccccattcctgccttccagagagaacgtgcgacagcgttcctgctacacccggcagccggccgtaggggcgcgctggaaaggctgctgcgcgtgcacacgtgtgcagccttggagacagacttcggggtcgcgcgttctcgcgcgcgctctctagtggcttcggagggcagagctgacagaacaagagggcggggttggcggcgacggagagtgaagtcacttccgggctggggtgtttgtttggactggagaagggaggcggcgggcgaagcgcacgtcgagcgggggagcggcgctgcctgtggagatccgcggaggccgacaggattcgttggctgccgtccccgctgctgtgcattgggttaaaaacgacaaccaacatcagccatgaaagatccaagtcgcagcagtactagcccaagcatcatcaatgaagatgtgattattaacggtcattctcatgaagatgacaatccatttgcagagtacatgtggatggaaaatgaagaagaattcaacagacaaatagaagaggagttatgggaagaagaatttattgaacgctgtttccaagaaatgctggaagaggaagaagagcatgaatggtttattccagctcgagatctcccacaaactatggaccaaatccaagaccagtttaatgaccttgttatcagtgatggctcttctctggaagatcttgtggtcaagagcaatctgaatccaaatgcaaaggagtttgttcctggggtgaagtacggaaatatttgagtagacggggccctcttttggtggatgtagcacaatttccacactgtgaaggcagtattagaagacttaattgtaaaagctctcttgtcactgtgttacacttatgcattgccaaagtttttgttagtcttgcatgcttaataaaagtgctgagactgttactaagtaaaaagctgtcaaacatttactgaaaatagaattggccccatggcttgatgtgaagacagcaaggaaagaagcaccagtcaagttgtgaacaagcaccaaattaaaagacctaaaccttaccaaattgtctttttttgaggctaatctatcacttgttaatgtctaaactttaaaatctgtacatatattattttgatgtattaagagaatattgctgatttaaatttattatgcacacttcgatcgtccgcctat

SEQ ID NO: 67870 - DNA, 1163 bp, Homo sapiens
ctcggaagatgggcgggtgtgggaacagtggtacgcccccattcctgccttccagagagaacgtgcgacagcgttcctgctacacccggcagccggccgtaggggcgcgctggaaaggctgctgcgcgtgcacacgtgtgcagccttggagacagacttcggggtcgcgcgttctcgcgcgcgctctctagtggcttcggagggcagagctgacagaacaagagggcggggttggcggcgacggagagtgaagtcacttccgggctggggtgtttgtttggactggagaagggaggcggcgggcgaagcgcacgtcgagcgggggagcggcgctgcctgtggagatccgcggaggccgacaggattcgttggctgccgtccccgctgctgtgcattgggtgaggggtcctctcgggcagagtggcgacaggggtgcggaggtcgagggacagcaagtcggcgacggcagaggggcctaaagggttccctgggtggttggccaccgagtccattgcggcctccgttgttcattgcctctttccaccaagtctgagggatgagcttgggccgacttcgtctctgtcttctccgagacatggccgtcgcttttttttcattgtcattattaatgatttggatctcgcagctctctatccgggtcctcagtggcgcgagggttgccgggatagcactttctcctgttcctcattctcccggtcctttatccctccgccgggtaccctttcccctgcccccctcccaccgcctcggcaacaaagcttattgtttctacccactttacgcctgcgcgtcgccacgcgcagcccctacttgctgcgcgtgcgcgcctcagccgaggctggggtttggggagagaggggcggagggactggcgggctcttggcgtcttgggggaacgctgcaaccgtcgacgggcctgatcagaagatcgtctttctcccgtttcttcgccatcgctaccccttatttttggttgtattgcagctcatgccctggaaaaaagaacctttggggtactgggaacccttaccctaggagggcgttgagttagatgaactttaaggtcctcttaccttttaataattttctgtgcttactctcctccttccccaccatcgccaccagaaataaataaggcttgt

SEQ ID NO: 67871 - DNA, 1733 bp, Homo sapiens
ctcggaagatgggcgggtgtgggaacagtggtacgcccccattcctgccttccagagagaacgtgcgacagcgttcctgctacacccggcagccggccgtaggggcgcgctggaaaggctgctgcgcgtgcacacgtgtgcagccttggagacagacttcggggtcgcgcgttctcgcgcgcgctctctagtggcttcggagggcagagctgacagaacaagagggcggggttggcggcgacggagagtgaagtcacttccgggctggggtgtttgtttggactggagaagggaggcggcgggcgaagcgcacgtcgagcgggggagcggcgctgcctgtggagatccgcggaggccgacaggattcgttggctgccgtccccgctgctgtgcattgggttaaaaacgacaaccaacatcagccatgaaagatccaagtcgcagcagtactagcccaagcatcatcaatgaagatgtgattattaacggtcattctcatgaagatgacaatccatttgcagagtacatgtggatggaaaatgaagaagaattcaacagacaaatagaagaggagttatgggaagaagaatttattgaacgctgtttccaagaaatgctggaagaggaagaagagcatgaatggtttattccagctcgagatctcccacaaactatggaccaaatccaagaccagtttaatgaccttgttatcagtgatggctcttctctggaagatcttgtggtcaagagcaatctgaatccaaatgcaaaggagtttgttcctggggtgaagtacggaaatatttgagtagacggggccctcttttggtggatgtagcacaatttccacactgtgaaggcagtattagaagacttaattgtaaaagctctcttgtcactgtgttacacttatgcattgccaaagtttttgttagtcttgcatgcttaataaaagtgctgagactgttactaagtaaaaagctgtcaaacatttactgaaaatagaattggccccatggcttgatgtgaagacagcaaggaaagaagcaccagtcaagttgtgaacaagcaccaaattaaaagacctaaaccttaccaaattgtctttttttgaggctaatctatcacttgttaatgtctaaactttaaaatcagtacatttaatttgagttccaactgttaagcatatttctcagacttaaatttgattatgtccccatcaaaaagaatctccattttctgaaggtctgttagttaatttgagataatttgttaaaggcaagtatgtcatattactgaggctacaagttagtcagcagatgagtgccagtccagccttttctggtatgttattgttagaaatattgagttctaatgttacatctgaggaagtatgtaatttgagaattgtaacttctaagggattcactgcatcatagctatgcctgtatggagtctaacatatgaccaataccaacccataatccagctgaacaaagatactgtaacattatgatttgagtggtgcttttccttgctttgttaaccatcacgagagtctgcagcacaacttttaacaaagctagaacagttttggcttcttaaacttcatatttgggtaggttaagctgccatacgtgttcagtgtgaatagtgtttaagttgaaaatattgtaaaaaaattatattttttcaaaaatatttaaaaaaatagttttaagtagtcctgaaaa

SEQ ID NO: 67872 - DNA, 1606 bp, Homo sapiens
  misc_feature (1591)..(1595): n is a, c, g, or t
  misc_feature (1599)..(1599): n is a, c, g, or t
ctcggaagatgggcgggtgtgggaacagtggtacgcccccattcctgccttccagagagaacgtgcgacagcgttcctgctacacccggcagccggccgtaggggcgcgctggaaaggctgctgcgcgtgcacacgtgtgcagccttggagacagacttcggggtcgcgcgttctcgcgcgcgctctctagtggcttcggagggcagagctgacagaacaagagggcggggttggcggcgacggagagtgaagtcacttccgggctggggtgtttgtttggactggagaagggaggcggcgggcgaagcgcacgtcgagcgggggagcggcgctgcctgtggagatccgcggaggccgacaggattcgttggctgccgtccccgctgctgtgcattgggttaaaaacgacaaccaacatcagccatgaaagatccaagtcgcagcagtactagcccaagcatcatcaatgaagatgtgattattaacggtcattctcatgaagatgacaatccatttgcagagtacatgtggatggaaaatgaagaagaattcaacagacaaatagaagaggagttatgggaagaagaatttattgaacgctgtttccaagaaatgctggaagaggaagaagagcatgaatggtttattccagctcgagatctcccacaaactatggaccaaatccaagaccagtttaatgaccttgttatcagtgatggctcttctctggaagatcttgtggtcaagagcaatctgaatccaaatgcaaaggagtttgttcctggggtgaagtacggaaatatttgagtagacggggccctcttttggtggatgtagcacaatttccacactgtgaaggcagtattagaagacttaattgtaaaagctctcttgtcactgtgttacacttatgcattgccaaagtttttgttagtcttgcatgcttaataaaagtgctgagactgttactaagtaaaaagctgtcaaacatttactgaaaatagaattggccccatggcttgatgtgaagacagcaaggaaagaagcaccagtcaagttgtgaacaagcaccaaattaaaagacctaaaccttaccaaattgtctttttttgaggctaatctatcacttgttaatgtctaaactttaaaatcagtacatttaatttgagttccaactgttaagcatatttctcagacttaaatttgattatgtccccatcaaaaagaatctccattttctgaaggtctgttagttaatttgagataatttgttaaaggcaagtatgtcatattactgaggctacaagttagtcagcagatgagtgccagtccagccttttctggtatgttattgttagaaatattgagttctaatgttacatctgaggaagtatgtaatttgagaattgtaacttctaagggattcactgcatcatagctatgcctgtatggagtctaacatatgaccaataccaacccataatccagctgaacaaagatactgtaacattatgatttgagtggtgcttttccttgctttgttaaccatcacgagagtctgcagcacaactgttctagctttgttaaaannnnngagngcacgag

SEQ ID NO: 67873 - DNA, 1687 bp, Homo sapiens
ctcggaagatgggcgggtgtgggaacagtggtacgcccccattcctgccttccagagagaacgtgcgacagcgttcctgctacacccggcagccggccgtaggggcgcgctggaaaggctgctgcgcgtgcacacgtgtgcagccttggagacagacttcggggtcgcgcgttctcgcgcgcgctctctagtggcttcggagggcagagctgacagaacaagagggcggggttggcggcgacggagagtgaagtcacttccgggctggggtgtttgtttggactggagaagggaggcggcgggcgaagcgcacgtcgagcgggggagcggcgctgcctgtggagatccgcggaggccgacaggattcgttggctgccgtccccgctgctgtgcattgggttaaaaacgacaaccaacatcagccatgaaagatccaagtcgcagcagtactagcccaagcatcatcaatgaagatgtgattattaacggtcattctcatgaagatgacaatccatttgcagagtacatgtggatggaaaatgaagaagaattcaacagacaaatagaagaggagttatgggaagaagaatttattgaacgctgtttccaagaaatgctggaagaggaagaagagcatgaatggtttattccagctcgagatctcccacaaactatggaccaaatccaagaccagtttaatgaccttgttatcagtgatggctcttctctggaagatcttgtggtcaagagcaatctgaatccaaatgcaaaggagtttgttcctggggtgaagtacggaaatatttgagtagacggggccctcttttggtggatgtagcacaatttccacactgtgaaggcagtattagaagacttaattgtaaaagctctcttgtcactgtgttacacttatgcattgccaaagtttttgttagtcttgcatgcttaataaaagtgctgagactgttactaagtaaaaagctgtcaaacatttactgatcaagttgtgaacaagcaccaaattaaaagacctaaaccttaccaaattgtctttttttgaggctaatctatcacttgttaatgtctaaactttaaaatcagtacatttaatttgagttccaactgttaagcatatttctcagacttaaatttgattatgtccccatcaaaaagaatctccattttctgaaggtctgttagttaatttgagataatttgttaaaggcaagtatgtcatattactgaggctacaagttagtcagcagatgagtgccagtccagccttttctggtatgttattgttagaaatattgagttctaatgttacatctgaggaagtatgtaatttgagaattgtaacttctaagggattcactgcatcatagctatgcctgtatggagtctaacatatgaccaataccaacccataatccagctgaacaaagatactgtaacattatgatttgagtggtgcttttccttgctttgttaaccatcacgagagtctgcagcacaacttttaacaaagctagaacagttttggcttcttaaacttcatatttgggtaggttaagctgccatacgtgttcagtgtgaatagtgtttaagttgaaaatattgtaaaaaaattatattttttcaaaaatatttaaaaaaataaataatagtagaactgaaaaaaaaaaaa

SEQ ID NO: 67874 - DNA, 1818 bp, Homo sapiens
ctcggaagatgggcgggtgtgggaacagtggtacgcccccattcctgccttccagagagaacgtgcgacagcgttcctgctacacccggcagccggccgtaggggcgcgctggaaaggctgctgcgcgtgcacacgtgtgcagccttggagacagacttcggggtcgcgcgttctcgcgcgcgctctctagtggcttcggagggcagagctgacagaacaagagggcggggttggcggcgacggagagtgaagtcacttccgggctggggtgtttgtttggactggagaagggaggcggcgggcgaagcgcacgtcgagcgggggagcggcgctgcctgtggagatccgcggaggccgacaggattcgttggctgccgtccccgctgctgtgcattggggatggaggttagggaatggagatttcctctaatgattcaaggctgtgcacgttgctccttaggaactcaaattgaggttaaaaacgacaaccaacatcagccatgaaagatccaagtcgcagcagtactagcccaagcatcatcaatgaagatgtgattattaacggtcattctcatgaagatgacaatccatttgcagagtacatgtggatggaaaatgaagaagaattcaacagacaaatagaagaggagttatgggaagaagaatttattgaacgctgtttccaagaaatgctggaagaggaagaagagcatgaatggtttattccagctcgagatctcccacaaactatggaccaaatccaagaccagtttaatgaccttgttatcagtgatggctcttctctggaagatcttgtggtcaagagcaatctgaatccaaatgcaaaggagtttgttcctggggtgaagtacggaaatatttgagtagacggggccctcttttggtggatgtagcacaatttccacactgtgaaggcagtattagaagacttaattgtaaaagctctcttgtcactgtgttacacttatgcattgccaaagtttttgttagtcttgcatgcttaataaaagtgctgagactgttactaagtaaaaagctgtcaaacatttactgaaaatagaattggccccatggcttgatgtgaagacagcaaggaaagaagcaccagtcaagttgtgaacaagcaccaaattaaaagacctaaaccttaccaaattgtctttttttgaggctaatctatcacttgttaatgtctaaactttaaaatcagtacatttaatttgagttccaactgttaagcatatttctcagacttaaatttgattatgtccccatcaaaaagaatctccattttctgaaggtctgttagttaatttgagataatttgttaaaggcaagtatgtcatattactgaggctacaagttagtcagcagatgagtgccagtccagccttttctggtatgttattgttagaaatattgagttctaatgttacatctgaggaagtatgtaatttgagaattgtaacttctaagggattcactgcatcatagctatgcctgtatggagtctaacatatgaccaataccaacccataatccagctgaacaaagatactgtaacattatgatttgagtggtgcttttccttgctttgttaaccatcacgagagtctgcagcacaacttttaacaaagctagaacagttttggcttcttaaacttcatatttgggtaggttaagctgccatacgtgttcagtgtgaatagtgtttaagttgaaaatattgtaaaaaaattatattttttcaaaaatatttaaaaaaataaataatagtagaactgaaaaaaaaaaaa

SEQ ID NO: 67875 - DNA, 816 bp, Homo sapiens
ctcggaagatgggcgggtgtgggaacagtggtacgcccccattcctgccttccagagagaacgtgcgacagcgttcctgctacacccggcagccggccgtaggggcgcgctggaaaggctgctgcgcgtgcacacgtgtgcagccttggagacagacttcggggtcgcgcgttctcgcgcgcgctctctagtggcttcggagggcagagctgacagaacaagagggcggggttggcggcgacggagagtgaagtcacttccgggctggggtgtttgtttggactggagaagggaggcggcgggcgaagcgcacgtcgagcgggggagcggcgctgcctgtggagatccgcggaggccgacaggattcgttggctgccgtccccgctgctgtgcattgggttaaaaacgacaaccaacatcagccatgaaagatccaagtcgcagcagtactagcccaagcatcatcaatgaagatgtgattattaacggtcattctcatgaagatgacaatccatttgcagagtacatgtggatggaaaatgaagaagaattcaacagacaaatagaagaggagttatgggaagaagaatttattgaacgctgtttccaagaaatgctggaagaggaagaagagcatgaatggtttattccagctcgagatctcccacaaactatggaccaaatccaagaccagtttaatgaccttgttatcagtgatggctcttctctggaagatcttgtggtcaagagcaatctgaatccaaatgcaaaggagtttgttcctggggtgaagcgacgtcggatgaacacgtcgga

SEQ ID NO: 67876 - DNA, 642 bp, Homo sapiens
ctcggaagatgggcgggtgtgggaacagtggtacgcccccattcctgccttccagagagaacgtgcgacagcgttcctgctacacccggcagccggccgtaggggcgcgctggaaaggctgctgcgcgtgcacacgtgtgcagccttggagacagacttcggggtcgcgcgttctcgcgcgcgctctctagtggcttcggagggcagagctgacagaacaagagggcggggttggcggcgacggagagtgaagtcacttccgggctggggtgtttgtttggactggagaagggaggcggcgggcgaagcgcacgtcgagcgggggagcggcgctgcctgtggagatccgcggaggccgacaggattcgttggctgccgtccccgctgctgtgcattgggttaaaaacgacaaccaacatcagccatggcttttccttgctttgttaaccatcacgagagtctgcagcacaacttttaacaaagctagaacagttttggcttcttaaacttcatatttgggtaggttaagctgccatacgtgttcagtgtgaatagtgtttaagttgaaaatattgtaaaaaaattatattttttcaaaaatatttaaaaaaataaataatagtagaactgaaaaaaaaaaaa

SEQ ID NO: 67877 - DNA, 653 bp, Homo sapiens
gagcccagttaacaagaacaaaaagttgtttgtatattacagcaaactcacctgtgtatttgtatctttatataagcccagataacagtaaataaagagagcgcagagaatatttactggacagttttatatggctcataaaaagaaaccatctgctttgatcctcccaagaggatttttgctacctaaaaatgcagctgtcctgcttcttgaacagaaatgggtacatcttttctcccacaagaagagtaatagaaaatagattaatactctgggcttttgataatgggtaagcatactgaaatccatctctcaactttcttgtcccaaccccaacacagggacaattccttgggtatgcagttaagtaggccaccctgataaaagattccgtttgggtttatggtagcccttatatattaatgcagcacaagctcctggaaatgcattcaagttttaaggtccagcgttttaagtcaccagaacaggaaaaaaaaaaaaaaaaaagtctgttttcccccctccactgggctcctcctttgacttagaggccccagggagtacaacatggccagctgcattgccattcaatgagtgacacttagaagagaacctctgcataatgcgtgcctcccaagagaatacaggacagg

SEQ ID NO: 67878 - DNA, 449 bp, Homo sapiens
ttcctaggataactcaccaaaatgttctgattctgaattttcttgcttctagaataaggataataggatgtctgtttcacagatatatcctattaactgagtttaaattagattgtgtgtgtgactatacttaacttcaattttaacattaaaaatgtcatcctggccgggcgcggtggctcatgcctataatcccaacactttgtgggaggccgaggcaggtggattacaaggtcgggagatggagaccatcctggccaatacagtaaaaccccatctctactaaaaaaatacaaaaaattagccaggcatggtggcacgtgcctgtagctccagcaacttggaaggctgaggctggataatcgcttgaacctgggaggcagaggttgcagtgacccaagattgcgctactgtactccagcctgggtgacagagcgagactccatcta

SEQ ID NO: 67879 - DNA, 335 bp, Homo sapiens
gtgatccatccgcctcggcctccaaaagtgctgagattacagatgtgagccaccacgcatggcccaaggagaacgatattactccccatatcccagggggtgtatatccccctgtgatatggttcagaatatccggaaggaaagacagggatattacttcccatatcgcaaggggtgtgacatggttcgtaatatcccatgggggagagggtaatattactcttcgtattgtgaagggcatacactcccctgtgatacagttcataatattccggggagtagaggaagatattatgctccatatcgcgggtggcataagccccctgtggtttggt

SEQ ID NO: 67880 - DNA, 175 bp, Homo sapiens
ttttcctcatgttattatctggctagaagcttcggttttaattgtgattaaaaacatgatagtgagcaaacgtatcccatttgtgattttacatggaatgtttttagattttcatcaagaatgatgtttactgaggttttggctgataacatcattcatgtaaagagaattctct

SEQ ID NO: 67881 - DNA, 440 bp, Homo sapiens
gaaattagtgattctgccacttttcagttgtatcacttcgggcattcacttcatctctctgagccttaaatttctcatctatatgttgtggatagtcatgcctgtcttgactgcttggccaaataaaaactcaagttttaaattctgaaaccttagggttcaagagctggggagggagtttacatgttttctaatggagccattatctgttggaggcattcattcccctcaccagcatcctagacaaataccatcctcttgattcagttggaatgctgacatgcctgtggagctgccctcgggagatctgattgttagaaacgtcttcctatgccctctagtaacttttatctgtttcgcctctggactcaacaataaatttcattcctaaactgttacgcatattgacaaatactgtaaaaatatcatcactttaaaaa

SEQ ID NO: 67882 - DNA, 331 bp, Homo sapiens
aggttatttaagacaacaactagacaatggttattcttttcctgaaggtatgagcaaaacaaatttagaccctttcctctgattctcagtccatcccccgccaaacaatgacacagtttggcatatgacttctccaccactcttgagtgattgaactggaaagggtgctatgatcttcctgacagcgacctgcaaggagggagctctgttagtgccaccctcatccctcaggtgcgcttcataggcaaggctcactgctctcaagagacaactatgtaccctaagtgagtagcataacacataccatatgcattatttcattcactaagta

SEQ ID NO: 67883 - DNA, 310 bp, Homo sapiens
atttttttaatctaaaaatatagtttactgctgatatggtttgcctttgtgcctccacccaaatctcatctcaaattataatcccacatggagggagggacctggtgggaggtgactggatcataggggtggctccccccatgctgttctcaggatactgagttcttgcaagatctgatgctttaaaagtggcaaatgcaaattcctttggggaaaaacacttcaacccaggccttaagaaatccaaagtgcgatttctcatgaacaatccccaataaacactcaaagtcaacagcacagagaaacaagg

SEQ ID NO: 67884 - DNA, 396 bp, Homo sapiens
ataattttaattgtttcacatcgtatgttcccattcataagtgggaactaagctatgaggaatgacacaatggactttggggactggggggaaagggaaggagggagctgaaggataaaagactacacattgggtacagtgttcactgctcaggtggtgggtgcaccaaaatctcagaaatcaccactagagaacttattcatgtaaccaaacacctcctgttccccaaaaacctattgaaataaaaaaaaatttaagaaactaacaaattgtttgtttcagatgacaaggcagtttccttaacattgagaaattagagtgaaaaaaatgtgttagagattatgaccgaatctaataatagctatctatgtggacagtattacaaaaattaaccaa

SEQ ID NO: 67885 - DNA, 386 bp, Homo sapiens
gttaccaagtgttgggacagatatagagtagctgcttctctcgtatacggctgaagtgtaaattggtacaatcactactttgctgtatttattaaagttggtgatatgcacactctaagatcagaaattccatctcaggtttgtacctagcagaaatacatgcatgtatagtgcaggagacatgcaaaaaaaatgctgatagcagcattactcagaaacatcaaaaactagaaataatccaaattttcaaaagaaaaaaaaaagcaggagctgaatatggtggcgcatgctgtcatcccagctacttaggaggctgaggcaggagaactgcttgagtccaggagtttgagtccaccctgggcaacatggtgagatcatgtctctta

SEQ ID NO: 67886 - DNA, 433 bp, Homo sapiens
cgtgaccacccggaactggcgctggcccgagcgctgcgcgcagccccggttcccgcctgcgtttctcccgccacacctcccctcaagcagagggagccggttccgacctaggcctgcccagagaggggccccttcagcgcagtggtgggctgaagagctccttgagcatggccagagtgaacgcccatgccgaggaggcgctgagagcgagggagggctgctagcacgttgtcacctctcagaaggacatgaggaaaatatcttcctacaatgccccatgttccatctctgttgatgtttggttggagtaatgtagatggtcaccaaatatgttgcactattgattttcaacggaagagctccacagtgctattatctatccaacaaaaaggtggagtcacagagctatctgctgctcctaatattggagagc

SEQ ID NO: 67887 - DNA, 179 bp, Homo sapiens
attaatataaagaagctatatctatagaaaaaaatgtgaatgggcaactgaatttcatgaattatcaagaacaaatattatgtatgatgacataatgggaagttaggatttgcctcacaacttggttatgagaaattctataacctgttagaagagattaacacaaatcattaatggtt

SEQ ID NO: 67888 - DNA, 609 bp, Homo sapiens
cagtaccccttcacctttatatgctgtaaatctttgtaatgaatactctattaatgatatagatgactgaattgttggtaactatagtgtagtctagtgaagatgaattgtgtgagttgtatattttactgcattttagttttgaaaatgacttccccaccacctagaaacagctgaaatttgacttccttgggagaacactagcattaatgcaagtaagactgattttcccctaagtcttgttatatttgataaggagcattaatccccctggaaatagattagtaggatttcctaatgttgtgtagcaaacctatacttttttgtatttaaaaattaatgtgaaatatgcatcatacacaatattcaatctagattccagtccatggggggatttttcctaataggaattcagggtctaaacgtgtgtatattttggctcttctgtaaatctaatgttgtgatttttatatttgtttcgttttgtctgtgaactgaataatttatacaagaacacactccattgagaaacgttttgttttttgctcgtttgtatcgtctgtgtataacaagtaaaataaacctggtaaaaacgctaaaaaaaaaaat

SEQ ID NO: 67889 - DNA, 327 bp, Homo sapiens
gtttcgccgttttggccaggctggtttcaaactcctgacctcaggtgatccatcctccttggcctctcaaagtgctgggattacaggtgtgagccaccacacccgaccctctacaaactttatttctaacatctcagccattgacacgtaaaccacattatgccacacactttctagacacctataaatgaatcttaccaaagttccaactaaaagaattgctggttctaatagagacacatagcattacatgagctaaaatggaaaaagaaactttagaaaaagcaaacaatctttctactgttacctttgtccattaagatccag

SEQ ID NO: 67890 - DNA, 441 bp, Homo sapiens
agctaatttttgtacttttagtagagacggggtttcactatgctggccaggctggtctggaactccccacctcaagcaatctgcccacctcggcctcccaaagtgttgggattataggcatgagccaccgcgcctggcctaaaaaaaaaaaaaaaaatctttttttataaaaaatttgattcatagtttttttaaatacaacgagtacattgaacatgcttcacattcagaacatgaagtcttttaaatgaatataggtagaacttccaacttccaggctttgtaacagaaatcatattaaagactcagtagcaagcctaatcctcaaatcccccatctgttaacctgataatcctcatgtgtaaacttatttaagaagctaactcctgagccacctgtattctgagcattgcaataaagatgtgaagattttaatattac

SEQ ID NO: 67891 - DNA, 406 bp, Homo sapiens
gataggacctactactctgtaatcatccatgggcaacagacaagggctgtcagaggacccaacagacggaagccagtgctagaagacagaactagtttcctcaaaaaaaaaaatcagtcaaagccaggaacggtgtggctcatgctgtcatcccagcactttgggagcctgaggcaggaggatcacttgaggccaggagttcaagaccagcctgggcaacacagggagaccctagaaaaaaattaaaagttgttttaattgaaaacaaatcagtcaaacaaattactggtatgctttaaaaataactgtgtgacagaagaattacttgaacccaggaggcggaggctgcagtgagctaagatcacaccactgcacaccagcctaggtgacagagtaagactccgcc

SEQ ID NO: 67892 - DNA, 884 bp, Homo sapiens
cagaccagagcgtgccatgtgaaatttcagaacaccacagatgaagtaaggaagaccagaaaggttccaagagggaaaaagcagccacatataaagtgtgaaaaatggaattgctttgcacccttccacagcaacattggaagctaaaagaaatggaagcattgccttcaaaactcagggtgaaataattcttcaacctaaaattctaaacttagccaaactgtaagtgtgcaagtaaaggctgaataccaacagatgtgcaagaaagaggaggaagccaagattatctttctcagagacttcttagaaatgtactttcttagaaagtttaggaggatatacttcaccaggacaagggcatgatcccagaaagaggaaaatgaagccagcaggaagatccagctcagaatggcacaggtctagagggacagtgagggaagactaagacagcagtcagtatgtgatggcactgcccttccaggaggaccaggggaacaagtgaggggctctgtaagagctcacgactctgtcagagcggggaagaaacagctctgaaattcagtttcctaaaccttttgtagaaatgagaagaaagaaactgtaagatccatgagtgtaagggtttttgagttttctgtttgtttcccctgtgcccagaatagtgtctagcacacaggggcgcagtatgtgctcttttaatgacttaattaaaggaaacccagttaccagaaagagagaactcacctcgcttgtggagagtagggctcccagagaggagtgaggcaggagatggctgtgtttaatttagagacttttcgtgacatttcactttaaaactatccacatgtattatattggttaaattacttttgtaagaaaatgtg

SEQ ID NO: 67893 - DNA, 747 bp, Homo sapiens
ctatctaccagctccaatgagcttgctgaggatgggtatgaccccagtctaaggggaaagaatctaaaacacaagtaaacctgtttaaaggccagatctccagatggagatccaagcagatggcgcctaaggtttgcccttgaaaactaccaaggaagccacagagagggatctttggaccttctggaaaatggtaaggccccaggtagattatggctcctctgccctggaggctgagccgcccctctggttacctcacatcttctggtttcttctgagtgggacttgatctcatttctgcattcacagcaaggtggaactgtctggcaagagcttaaattaggacctgtggtggggactttaataggcaggtggaggtttgagatccagtgagatgccagagattagtcaataggtgaggaaagatttggcccaaatcaaaagagctaaaaaaaaaataataaaataaaaataaaaataaaatagttgaacaaataaggttcatgaaaaaaaaagaaaagaaagaaaaggtaaagaaaagaaatccatgataaaatatcaaactttttaataaaaacaagtctggccctgtacttggatgaccccacctggcttgtctaaccctaatcccagccccagttttaataaaactgtatttacaaaataggcagctgggacgtggaccagagataccaatttgattttttttaaatattacattaaaatattacatcatgtgtcttcaaa

SEQ ID NO: 67894 - DNA, 242 bp, Homo sapiens
acgactggctgatttttaaatttttttgtagagattgagtaccaaccactatgttgcctagtcttatcttgaactcctggcctcaagcattgtctcacctcagcctcccaaagtgttgggattacatgcatgaaccgtcacaccagagtagaaatacagttgttgacagtttttttcctggtttgtgtctgcatattatgaaatactcttttcagtgcctataaatattttaagtttgaacc

SEQ ID NO: 67895 - DNA, 262 bp, Homo sapiens
ttttctccataattatatgtttttattatcataggaaaaataaatgaccaagaaattaggtttaccaatgcagtgaactggtaattttatttttaatgtatatattaaatcctaaatgcaaacctctattacgttgtgttattttataccttacattgttttgaaaggaattgaggtatcttttgaccaggtcagagaaccatttcagtatattcaaaataatatgaacaatatgaactcagaaaacacttggccagataac

SEQ ID NO: 67896 - DNA, 2534 bp, Homo sapiens
  misc_feature (276)..(276): n is a, c, g, or t
  misc_feature (1299)..(1299): n is a, c, g, or t
  misc_feature (1383)..(1383): n is a, c, g, or t
  misc_feature (1767)..(1767): n is a, c, g, or t
  misc_feature (2511)..(2511): n is a, c, g, or t
gtggggtcggggggttggttgggtgcagtaccccgggcgttcactgcctgtgacaggagcagattgggggcgctatctggggctgtgctgcttgtggtccgggtggggggcgggtttgatggggcactatttggtgctgcaacacccgtggcagggatgggttgtggacactatcgagtgtccaccacgggtggtttgggggtgctatcagggtaacactgcctgcagcagtctctgggtgtgttgtgggcacaatctgggggctaagcttgtggngagggggggcaggttaggggtggtatggggggaggctgcactgctgctgccagcagcaggttgtggaggtggccatgacagtggtggcctctgaggaaggggcccttctcctcttcctggactcaaggttctagagggtgaacaacttctgctcgtgttggagcgcagagggtgcacagagttttcacggcaatcctctgaccactgcagggccttcgcacccaccatggttacccggcccttgccctcttgctctgtgttgtggagaccatctgggagccccaggcatggagtagtgggcaccacgggggctcagggtcctgtgggtggaggagtcaggaatgggaactggtacttgggtggggaggactggctgggtctgagtttctgctattcttgctccccagggagccccgggcactgtggtgtctccagtccccaccccaggtcaggaggccagcttggtctaggaggagaggctggactttggagggtgggtgtgagagccttcgccaaaactggccccagccacccagtggccagcatgacaaggtgaggctctaacactgtcactttctgcatcctgttgtaggtttttctggcattgtctgcccagctgctccaagccaggctgatgaaggaggtgtcccctgtggtgagctggaggttggagcctgaatatggcacagctctgtgattcatctcctatggttgtggcagccatggtgatggagacggcagctcaacaggagcggtaggagggtacctgtggaggccaagtggtaggagccttggagggtgggcaggtgcatggagggtgacagcagcgctggttcctttggcgtcagtgctaatggtggcagcagcagcaagtctaggggccaggaagggggagtaggagggctttggggcctggcccagcctgggatgtgtaagaagctgctggttctgtaccacaggcctcagtgatggtggaggtgcagccagggcaaggaggagtcctcccccttctcctgcagtctntggagggtgccctccttctgctggcatctgagccaggtgtgagtggcagcattgttttgttcttaacagaatttaggggcttangatttgtgtatctttttgtttttggttgtgataaaccttaagggacaaaaggcttctttcctgggttttggtgttgtgggatccccccatgtaagataaagggtgctttcttggcaagctgtgtgttggagggagttcaccaaggggaagaaagggaacctctcaggagggtggctgctgtggcaggtcccctgcctctgggcaccctttgggccacctagtttcccctgtggaagaggggaggcttagaccagtaccacttgtatcatcaaagaggcatcctcctgggccagttgatttgaccttcccacttcttcagcccacctgcccatggtgtcacctggggaaagtggaaccttaggccacaggggcagaggcttctcnggcaggctgattgctgtagcagattctgttctgcctgctgctcaggagggcttctatggccaggaagtgatgctgggactcttctgttggtgttctgctgcctccgtgttgtctctggcttctcacggactctcagatgtgtgaaggcaaaaaggtttcctggctagtttgcgtggtgtggttgggatcacttttgctacatgcctctcaggcaccctagtgggggaaaagggaattttagatttaaggagaatgtgtctatgttggctgcttattgttagcaaatttctgaacaattctattctaaatggtcgcctcttgttgagtagactccagctccattggagaagagatgagcttacctgggctgtgttttcttgctagcttgagggttgaaaacactaggattttgtctccttttccagttgagttagggaagtgacatgcattgccacaaaacaatttcttcagttctggagtccttagacagtcatcttactagcaccttccagcattctcctttcagtgagataataagggagggttcctaatctaaaaggaaacatggatggtgttcttatgttgtatgacaagaaatatgaaataattctgaaaaatttagtcattcttcttttaaatttagaaacccgttttttatatttataatatttaaagccattaaaagttaagatgtcataattaaaataatcttttaacattaattagcatttagcagatgaccanaataaattatttttaattatgct

SEQ ID NO: 67897 - DNA, 189 bp, Homo sapiens
tgcggccgcgtcgacccaactatccaagtgttattgggggttttagttgatacaaacaatgcaaccaactatccaagtgttataccaactaaaacccccaataaaccttgaacagtgggttgcattgtttgtatgtagatctttttacattatatggtaatgtacactactgatatagttcacagtcga

SEQ ID NO: 67898 - DNA, 1662 bp, Homo sapiens
gtgctgcagccgctgccgccgattccggatctcattgccacgcgcccccgacgaccgcccgacgtgcattcccgattccttttggttccaagtccaatatggcaactctaaaggatcagctgatttataatcttctaaaggaagaacagaccccccagaataagattacagttgttggggttggtgctgttggcatggcctgtgccatcagtatcttaatgaaggacttggcagatgaacttgctcttgttgatgtcatcgaagacaaattgaagggagagatgatggatctccaacatggcagccttttccttagaacaccaaagattgtctctggcaaagactataatgtaactgcaaactccaagctggtcattatcacggctggggcacgtcagcaagagggagaaagccgtcttaatttggtccagcgtaacgtgaacatatttaaattcatcattcctaatgttgtaaaatacagcccgaactgcaagttgcttattgtttcaaatccagtggatatcttgacctacgtggcttggaagataagtggttttcccaaaaaccgtgttattggaagtggttgcaatctggattcagcccgattccgttacctgatgggggaaaggctgggagttcacccattaagctgtcatgggtgggtccttggggaacatggagattccagtgtgcctgtatggagtggaatgaatgttgctggtgtctctctgaagactctgcacccagatttagggactgataaagataaggaacagtggaaagaggttcacaagcaggtggttgagagtgcttatgaggtgatcaaactcaaaggctacacatcctgggctattggactctctgtagcagatttggcagagagtataatgaagaatcttaggcgggtgcacccagtttccaccatgattaagggtctttacggaataaaggatgatgtcttccttagtgttccttgcattttgggacagaatggaatctcagaccttgtgaaggtgactctgacttctgaggaagaggcccgtttgaagaagagtgcagatacactttgggggatccaaaaggagctgcaattttaaagtcttctgatgtcatatcatttcactgtctaggctacaacaggattctaggtggaggttgtgcatgttgtcctttttatctgatctgtgattaaagcagtaatattttaagatggactgggaaaaacatcaactcctgaagttagaaataagaatggtttgtaaaatccacagctatatcctgatgctggatggtattaatcttgtgtagtcttcaactggttagtgtgaaatagttctgccacctctgacgcaccactgccaatgctgtacgtactgcatttgccccttgagccaggtggatgtttaccgtgtgttatataacttcctggctccttcactgaacatgcctagtccaacattttttcccagtgagtcacatcctgggatccagtgtataaatccaatatcatgtcttgtgcataattcttccaaaggatcttattttgtgaactatatcagtagtgtacattaccatataatgtaaaaagatctacatacaaacaatgcaaccaactatccaagtgttataccaactaaaacccccaataaaccttgaacagtg

SEQ ID NO: 67899 - DNA, 581 bp, Homo sapiens
  misc_feature (518)..(518): n is a, c, g, or t
  misc_feature (559)..(559): n is a, c, g, or t
  misc_feature (565)..(565): n is a, c, g, or t
tgactgggaatcaaacctgggctgcagtcatgaaagcagaatcttagctggtagaccacagagtggagtgcttttttgtaaatccttcaggagatccaagcaggcagtttgagcatataaaggatttcaactcatttcagatctgatcacagctggaatgctgtttagctaatttcctgcatgttaatatttcaaagatatgatgagatttgtatctgcaagggattgtgaagtccagcagggcatttgaaggatattgtctgggccggcctcgcttcccaaagtgctgggataacaggcatgagccaccgcgtctggccatatctagtcatttaaattacatacgataactacaattttaactcttaggaacgctaatttacagtgaaatctggaggaagtaattttggagctgttttatgccagtatttataggatggaaaaccatttccataatttttataaaggtggttccctcaattattttggtttattaacaggatctaaatataatttangctttccaacaccctttaactccggccatttatggggtacnccatgncttaatttacctgggc

SEQ ID NO: 67900 - DNA, 734 bp, Homo sapiens
tggagaccatgcgcaggcgcggtgcactgtgcgcgggcaccacggcggtttttcgacgctggcggtggacgcaggcagcatggaccacggttgctgggcggatggggagcgtctatggtcagttgccttagaagtggtgagatgggaagctgcagttggaagaccctggaggatgcctgacaaggggatgtctgacacatgattggagctctttttgaaatgtttcttgcccttcctggagcagaggagccattatttatgcaggtacatcgaagtcttttgacctccatacagtgattatgcctgtcatcgctggtggtatcctggcggccttgctcctgctgatagttgtcgtgctctgtctttacttcaaaatacacaacgcgctaaaagctgcaaaggaacctgaagctgtggctgtaaaaaatcacaacccagacaaggtgtggtgggccaagaacagccaggccaaaaccattgccacggagtcttgtcctgccctgcagtgctgtgaaggatatagaatgtgtgccagttttgattccctgccaccttgctgttgcgacataaatgagggcctctgagttaggaaaggtgggcacaaaaatcttcatgagcaatacttcttagtagattgttttgttattcaaatcaagttctagtgtttttatgtgagattatataatttacagtgttgttttatatacttttgaataaatgtacactattaaaaa

SEQ ID NO: 67901 - DNA, 704 bp, Homo sapiens
tggagaccatgcgcaggcgcggtgcactgtgcgcgggcaccacggcggtttttcgacgctggcggtggacgcaggcagcatggaccacggttgctgggcggatggggagcgtctatggtcagttgccttagaagtggtgagatgggaagctgcagttggaagaccctggaggatgcctgacaaggggatgtctgacacatgattggagctctttttgaaatgtttcttgcccttcctggagcagaggagccattatttatgcagtgattatgcctgtcatcgctggtggtatcctggcggccttgctcctgctgatagttgtcgtgctctgtctttacttcaaaatacacaacgcgctaaaagctgcaaaggaacctgaagctgtggctgtaaaaaatcacaacccagacaaggtgtggtgggccaagaacagccaggccaaaaccattgccacggagtcttgtcctgccctgcagtgctgtgaaggatatagaatgtgtgccagttttgattccctgccaccttgctgttgcgacataaatgagggcctctgagttaggaaaggtgggcacaaaaatcttcatgagcaatacttcttagtagattgttttgttattcaaatcaagttctagtgtttttatgtgagattatataatttacagtgttgttttatatacttttgaataaatgtacactattaaaaa

SEQ ID NO: 67902 - DNA, 1080 bp, Homo sapiens
gtgtcagcgctgcttggctgtcactggacctcactaagtttaccatcaggtgtttaattcagcaccttggccaagactccctctgtcctgggcactgtaggctgcagattctgtgggggaggctgcatgaacgagctctgccttgtgctcatgtggaggacgggctggattgatctcttcttgcctgaattgggagctctcaggatattcctccatttgtttctggaggccttggggaaaatgactggggctctagatctcagggacagctgaaccgtgtgaaaaacctggggaacagtggacaagggagggtaggtcagataagattgcattttggggagaagaccctttaagtaccagagagattggttgtcagatgcaattgtgtccccattctaaggagttcacaatggcacatcccggagcctgggacacagccaaatgcagcaccttcccatcattcctgcatctcgggggcctgcagtgaccagttgggtgaccttgcttgcaaaatcactcactcttgcttttgtaacctcagtttacatttatagcaatcatagaagaggaaaggattcgagaggaacttgggatgggggagagagctttaatgtagggctggtgttcatgtttgactggcttcagcactaaactccccagataccccccaacagttctaacaaaagggctgagaagaaaaattctaagcctgtgctttgtgtgtgtcttttctcaagagctgcaaaggaacctgaagctgtggctgtaaaaaatcacaacccagacaaggtgtggtgggccaagaacagccaggccaaaaccattgccacggagtcttgtcctgccctgcagtgctgtgaaggatatagaatgtgtgccagttttgattccctgccaccttgctgttgcgacataaatgagggcctctgagttaggaaaggtgggcacaaaaatcttcatgagcaatacttcttagtagattgttttgttattcaaatcaagttctagtgtttttatgtgagattatataatttacagtgttgttttatatacttttgaataaatgtacactattaaaaa

SEQ ID NO: 67903 - DNA, 607 bp, Homo sapiens
tggagaccatgcgcaggcgcggtgcactgtgcgcgggcaccacggcggtttttcgacgctggcggtggacgcaggcagcatggaccacggttgctgggcggatggggagcgtctatggtcagttgccttagaagtggtgagatgggaagctgcagttggaagaccctggaggatgcctgacaaggggatgtctgacacatgattggagctctttttgaaatgtttcttgcccttcctggagcagaggagccattatttatgcagagctgcaaaggaacctgaagctgtggctgtaaaaaatcacaacccagacaaggtgtggtgggccaagaacagccaggccaaaaccattgccacggagtcttgtcctgccctgcagtgctgtgaaggatatagaatgtgtgccagttttgattccctgccaccttgctgttgcgacataaatgagggcctctgagttaggaaaggtgggcacaaaaatcttcatgagcaatacttcttagtagattgttttgttattcaaatcaagttctagtgtttttatgtgagattatataatttacagtgttgttttatatacttttgaataaatgtacactattaaaaa

SEQ ID NO: 67904 - DNA, 1688 bp, Homo sapiens
  misc_feature (1)..(3): n is a, c, g, or t
nnncacatgcgtgcacgtgcacacacacctacacttttgtatatattcaagggatccattgtagctgaaaccaatccaatatctcttccaatattttaccaatcccttctagagattatctagttctaccatctcattttacagatgaggaaattgaggcccaattaagactagaatctagattctcttactcccagtttaatgtccactcaggacttcatcttaagcacttcttcactatagaaagcatgggacaactcacccagagtatacttctttgtctctattcactggctggcttcaaaacaacacaaaagcatctaacttggaggacaatgtcatctggagcatctccagccacttccttcccccactctgatatggtgtgacagaggtacaactggctgggagcctgccttctggccctctccctatgaccaagtagagtgaccactgccagactttagctgatctctatatgtagtcgaccaaatgacctgggaagcatcaaggcaccctcacaactgtgtttccccagagagttttagccagaaaaatacagagtctttggggatttgggcctttgttgttttgaaagtgggaagtaggagaaagaacagggagagaagtaggtagggtgtgaagagaagtataattttatctcatttctttctctgagagatctaagaagtcaagagacacaagagatccagtgtaacttgattttattaatgtttgcattctgtccttcatgtaaccttacgctggagtattggacctggatcaccatcctctctgtcagaattgcgtctcactgatgaacattttcatttcccaggagtggttgatcatgcatcttggcaaatttccctcatttctctttacagtccccattcctgacctttgagaaacagtcatcaaagtgtagaagtaaagtcttttaaaatgcctttccagatggacccttagaactctttcaaagatatttgtaaatattcactctaaatgtaatagaaataaaaagctgtagatcttcattacagaaaaaccattagctcaagattgaagagctcacagtcttaggcacagtttcatcttacgctgtcattatttagatcccaagaaagagagggtgggattggctatcccacagtatagcggggaggagggcagtgcaggaaaggacattgattcctagtaaaagatccattaaaaaacagaaataagaatgaagtaccagaacgtaatttatcatccctttatgctacagaagaaaacttgcaagacagtgtaaggtttccctggaacttgttagaaatgtcatctagacgttgagccaggaacacaatcaagcaacctttcaggatatagccaggccccaagcctcttcagaactgggaataatgttttgaattgaaacagaggtgtaaagcagagaggtcagagcagatcaatactggttatgggtgatgagatccagacagaacagtccccagaaaaataactgtcttacaacgagggggtgtgatggatgtgttattttgttttttttgagtctagtagtattactgtctgaaactggtcagtttttaggggcaacttcaaaatgttatttgtgtctttcttgtaaatacctgccaagattaatacccaatcaaatgccatgacttggaaataaacaaatattc

SEQ ID NO: 67905 - DNA, 1888 bp, Homo sapiens
  misc_feature (1)..(3): n is a, c, g, or t
nnncacatgcgtgcacgtgcacacacacctacacttttgtatatattcaagggatccattgtagctgaaaccaatccaatatctcttccaatattttaccaatcccttctagagattatctagttctaccatctcattttacagatgaggaaattgaggcccaattaagactagaatctagattctcttactcccagtttaatgtccactcaggacttcatcttaagcacttcttcactatagaaagcatgggacaactcacccagagtatacttctttgtctctattcactggctggcttcaaaacaacacaaaagcatctaacttggaggacaatgtcatctggagcatctccagccacttccttcccccactctgatatggtgtgacagaggtacaactggctgggagcctgccttctggccctctccctatgaccaagtagagtgaccactgccagactttagctgatctctatatgtagtcgaccaaatgacctgggaagcatcaaggcaccctcacaactgtgtttccccagagagttttagccagaaaaatacagagtctttggggatttgggcctttgttgttttgaaagtgggaagtaggagaaagaacagggagagaagtaggtagggtgtgaagagaagtataattttatctcatttctttctctgagagatctaagaagtcaagagacacaagagatccagtgtaacttgattttattaatgtttgcattctgtccttcatgtaaccttacgctggagtattggacctggatcaccatcctctctgtcagaattgcgtctcactgatgaacattttcatttcccaggagtggttgatcatgcatcttggcaaatttccctcatttctctttacagtccccattcctgacctttgagaaacagtcatcaaagtgtagaagtaaagtcttttaaaatgcctttccagatggacccttagaactctttcaaagatatttgtaaatattcactctaaatgtaatagaaataaaaagctgtagatcttcattacagaaaaaccattagctcaagattgaagagctcacagtcttaggcacagtttcatcttacgctgtcattatttagatcccaagaaagagagggtgggattggctatcccacagtatagcggggaggagggcagtgcaggaaaggacattgattcctagtaaaagatccattaaaaaacagaaataagaatgaagtaccagaacgtaatttatcatccctttatgctacagaagaaaacttgcaagacagtgtaaggtttccctggaacttgttagaaatgtcatctagacgttgagccaggaacacaatcaagcaacctttcaggatatagccaggccccaagcctcttcagaactgggaataatgttttgaattgaaacagaggtgtaaagcagagaggtcagagcagatcaatactggttatgggtgatgagatccagacagaacagtccccagaaaaataactgtcttacaacgagggggtgtgatggatgtgttattttgttttttttgagtctagtagtattactgtctgaaactggtcagtttttaggggcaacttcaaaatgttatttgtgtctttcttgtaaatacctgccaagattaatacccaatcaaatgccatgacttggaaataaacaaatattcatttcttatctataattaccttttggtgtaatcctttcaacttgtgtaaataggatataacagaataacaccaatagttgttttaagatagactgaaaaacccaaaatgcccatatttaattataactctgacagtagtgtgtttctgagaaaaattgtttataataaacagaaccaagtgtatgaatacatcataggca

SEQ ID NO: 67906 - DNA, 582 bp, Homo sapiens
cgagctatttgctatccaaggaattaaccatggagttgcatgtcatagtagcaattgtgggtttgtttgcaggatcctgtcaagaagacatggtaaacctcatcatgatcaagaatgagactttgcttgcatccaggcattcagttaagaaatgatgttttcccaaccaaggctagcttcccaaaagttgtttgatagtatacaggcatgagatggtgtgactctaactcattagatgccttcgtcttttcagtcatcatgtgatggaaagaaagctatcaacttcattcctgagacttcctgcaacacagctcctgatacacatctggtcagaaccatggtacccctccacaatccacgccaggaaattggatgtctactccctgcctttcttcccattgtttggggacttttccttagttcagctgaagacggggtccttgtcacacggccacgaaaatttaggcttgcagattatttgaaggaaatccaaacaaaagctttagaagaaacacctggaaaaatagtatctccactttgaaaatgcagaaatacaggcataatacaatggtgaaatttatt

SEQ ID NO: 67907 - DNA, 479 bp, Homo sapiens
aaagagctctaggggaacctgagggcttgggtggaagactggagagccaggaggagcaaggagcaggaagcaagtaaagaagccggcccaaacccatcaagaccaagatgatgacatgagtgacctctgattgtcctcactgctacactcccaccagccccctgacggtttacagatgccatggcaacatcaggaagttaccctctatgctctaaaaacgggagacacgtgagttgtttccagttttggtgacgaatgcccaaattcataggcgatgataaataatgtgccagacgttgatgtgcaagttttggtgtgaggtgtggattcattcattcaacaaatatttacggaacgaacacctcctgcgtgccaggctccattccaagcactgggggttgcagcggcgaacaaaacagacccaaatgcctgccctggtgggccaggaaggcagaaataaagatgaagagttggtcaag

SEQ ID NO: 67908 - DNA, 280 bp, Homo sapiens
gtaagtgataaaggatattagtttaattcatttggctatactataactctctggaagaagtagactagttaaatcttataagaggtaagtattttgtgcttgtttataaggatattataagtaatttcaagacaaattgaagatatattatacatgtatgtataaatgcatatgcttatcttcaccttacagatctgtggtatttaggtttgtgaaaataatgcaacttggtgccagttacggaaacatacactgaatgtatgtaagtttttcctcagtg

SEQ ID NO: 67909 - DNA, 395 bp, Homo sapiens
gattgtagggagaatcaaatgacataatggtcatgaaaatatatttctaagttgtaatctgtatatgtaataaggtgttactagtaattgaacatttatatatattctgtaacaggttgtaaacttttaaaagagatctagtacaccaggcttaatggactattttttgaaagacacatcaaaaactgttgacaataattgcctctaggtagagacatgagagtgatgggaaggaggcagacttatttttcactcaatttccttttgtatctcttgaattaatactatatatacacatgacgcatttaatttaaaccaatacaattcaataactatttgagaagttaaagaaaaaagatatatttattctgaataataaattgaaaataatctaa

SEQ ID NO: 67910 - DNA, 2828 bp, Homo sapiens
cccacgcgtccgctcgacaagagcacctgcggagccacgcactgagtgtccacagatccaaccgtccaatcatctgcaagggctgcaggagaacattcacgagtcacctgtcccaggggctgcggcgcttcgggctgtgtgacagctgcacctgcgttacagacacacccgatgatgatgatgatttgatgcccatcaaccttagcttggtggaggcttcatctgaaagccaagaaaagagcgacacagacaatgactggccaatctatgtggagtcgggtgaggaaaatgaccctgctggagatgattctgatgacaaaccacaaattcagcctaacttatcagaccgagagacacttacgtagcaataaattggtggggaagaggaggttttaaaacttgttagtgctcgttctgttgttgaaagataccatttgtccaattttgtggaaccctgagaggaacattttttcactgttattatatgtgcatttttattagactatctgatagaggttggattttgtgactcaaaggacagataacctttttgtgtggtgcccttggtttctgagggctttgctggccactccttaattctgagtgagtcaaagcaggccctgaggtctcctgtttttcttgctgtgtgtccaaactctggttaggagaaagataagaaaatctccaggcttgtttttatattgattcagtcctctgcattcctttgttatcatcctctttctctaaaaaccattaagttttgggatcaagtttacctttgccaagcctttcctaatgaattccacattaaattttctggcaaagtattaaagagaaaccttcattgatataaagcaggcagggcggtctggctacatgatcataaaaggtactccctaaatctagaacaattttaaaggcttggaatacttatgggcagacgaacatgggaatgatctgaaaggctcattatggcatcctgacttgcccagttgaattaaattttaagttagccctgagaagggaggctatgaccccaggtctggatggtttccctgtctggtttggcatttgacgattctacacatacaacctgttctgttatcataaaacaactcatttgggcaaaactcaaaatgctcccctactttttccagcaatttccaaaagctggagctgtgtaacttggaaatgtagctgcctctggcattcttttacttagtttatgctgatgtagggcaggtgagcccaaaaattggggcttagcccagaggagttcttggcttcacccaggaaagaattcaagggcaagccagtggtgttagacagcagcttgtattgaagcagcagtgcccaacagcagctaaggggccgctcctcgtggagcagggctacaccataggcagtgtgcccagagtagtagctcagaggcaggtcggcacttatatttatacccacttttagttacatgcaaattaaggggcagattatgcagcaatatttaggaaaatggtggtaacttccaagccgctgggtggttgccatgataaggggcagtgacttccaggtgttgccatggcaatggtaattgacatggcacagtgataagtgtttcttatggaaatctgcttcctgcaccaccctcccaccaccgccctgttttagctagtcctcaatttggtccatgtccgagtccggcctttggagttgagtcctgccttctacctccttgcctagaactttaattggagggaaagtataagcccataatgccaagtaacatttctaaaatgttcatcttttaaaagatcttcatgagggaaagggaaggttagtagcagaacaggtttttaaaagcagtctacctttcgcccactttccagccacacaattattgtaacaaaagaggctgaactctttaaagggctaaagggcaggcagtgttaggaattcggaatgtaattgaaggcaatttccataattttgtcttatgttaaaatatccaaaatggattttaaaagaaatcttcttgtcttcctttaagtgtagttgtctttcaaaaggtggtaaaagtcacttttatttctacctcttgaacaacaaaaaagtcaaaaacattataaattggcttgtaaatgttagccaaagcattagacaggtgtttaagtcgtacttctcaatagtagttaaaactggaacagtgcaactcaaactctggcccacagagaggccctgttctgtaaactgttttctaccagtctgctacaaggaaagtcagaaattaagaatacacatatagaaatgttgataacactttgacattgctgtgactcatggctttgtcttcttgagtgaggtatggaccagttcagttctggtcagctagagggccacatggtgcagaggttggataccagcctgtacagcaggaccacgtattggtctgcagtagaatggaaaatttaaaacttctcttatcacaggtagttcgataaatatcattcttggctgtgtgcggtggctcacgcctataatcccagcactttgggaggccaaggcagatggaacacttgaggtcaggagttcgataccagcctgaccaacatggcgaaaccccgtctctagcaaaaatacaaaaattagtcaggagtggtggcatgtgcctgtaatcccagctactcaggaggctgtggcgagaggaacacttgagcctggaaaaggttgcagtgagctggaatcgtgccactccactccagcctgggcaacagtgtgagaccttgtctcaaaaaaataataataaaataaataaataaaagaaaaatattcta

SEQ ID NO: 67911 - DNA, 558 bp, Homo sapiens
acagaacagtagggctgacgaaccacgttcagttgcttgaatcccatcatttagtacatcagttccaaacacacagcaagaaacaaagggagagatctgcagttggttgacactgcaggatctggtgccttcagggtggaaggaccacagccctgggtcctgggctatgcaatgttcacaatccgtctctgtctgcccatcagtctcccctgctaacggtgtggttaccaggaccagtcaaatagtcaaacaaggaggcttagcagatggaagctgcccagaaactgcacatccttgtcctaccaaagaaacacaagagcacgatcacctggccagtatctggggctcgccagctgacctgcggagtggctgtgggctttgtttgcatttcttgagcagagcacatatggtcccatctatctttgtcattcatttctcttattttctccagcagaattgaatggtcttaaaagagtgaacatgtattgcagatgccgtgagagctatgatggtgaaactgctgatcttcctagtactttaaaaaagactttctacaaa

SEQ ID NO: 67912 - DNA, 680 bp, Homo sapiens
agatggcagcagtacagtccagcttcggctcggcatcagagggagaccgtggaaagagggggagagggagactgtggggagggagagggagagggagagcctgtttctaataaatatacaaaatcagcaaggcatggtggcacgcacctgtaatcccagctacttgggagggtgcagcaggagaatcgcttgaacccaggaggcagaggttgcagtgagctgagatcgtgctattgcactccagcctgggcaacgagagtgaaactccatctcaaaaaaaaaaaaaacacgaaaataaaacggcatttagagttgaaagcttcgccttcctctctggatggtgagtcctcactctcccagcagcccacacctctgcctcaaacctccatggctcccaagagtctggataaagctaaggagtctcaacgcaccccaagtcctgggggtagtcagcccctctcacccctccctcatcctctcacacaagagttgtttactgttcctccagttatgcctggtcacgcagacactctgctgctcaaatgccctcaccccatcctcagcctgctcccaggccacctccctccagaatccaccctgcctgccaggtggccatagggaccctcgccatactgtctgcttgtggcagtgccctccggcctggggggtcttccagagca

SEQ ID NO: 67913 - DNA, 445 bp, Homo sapiens
ggcagagataggtgggacatcctgggtctctgagcccacctgttacccaacctgccccagtctcccaaaaagacttctgttaggctaactccttactttccagtggcccagagatagatctgagagttggaagtagcaacagcctgaggaacgcgtatcagtgctgggaaatgttttgtcatcattggggaaaattttgttaatactatggctcttatgcttcccactcttcccttcctccatcattagcattttggtcatagcttaatctccctgagtccttaaccttgaaattcatgctcattagaatagagacagagactagagggattttgtcccatatttggttcagttactccttgacttgcatttcccccaaatagtacaactttgtaattaatttctctcccaggacaccaaaacctagcagtagaaatgtgtgtgt

SEQ ID NO: 67914 - DNA, 198 bp, Homo sapiens
taaaaccagtgtttccacaggccagcactgttggcaccgttagcatgcattgttagcataaactgttgcttttcctgatagtcaaaggagggaaatgctaacagaatggataatcaagggaaaagacaagaaaacggacgtaaaatgtacccaaggaattactatgtactgaaataaaattttttttgtttggttttt

SEQ ID NO: 67915 - DNA, 398 bp, Homo sapiens
gttgccagaatcctgttggcttcatttgagatattttgaggttgttggcatcaggcattttgttcattttgtattgatactgagataactttttaaaaagtaatctggaattacacaccctaaatatcaaccatagaaaacattttttcttcttaaggaatggtctctgcagaaatgttttagaacgtattctgaatttttcacaaactcttccttgaatgcctgctgattgaatggatacaggtcgtacaggcaaatacacgctatttccatagtactgagtatattggactaaatctaggcaaaaagctgcctaaaatttatactgtaattggtcagctttatattatggcagccttctcgggggaggaacattgatttctagtgactgccactga

SEQ ID NO: 67916 - DNA, 855 bp, Homo sapiens
gtgctccaagctgatgttatatggaatcctgtgttggtaaatctctgagatgttagtgccggcacggtactgcacaaggaaaggcaaacccacacctgggatgtgggtggatcccagatgagacaaatcactgccctttccaggagagggtgttctgatataatcagcttaccactaggtggctggttgacagccccaaggcatggcaccagatggaagcccagtgttgctgtctgttcattcccggtagataatcgtcagtggtcatgactggatcatgctgctgagaggctcttggccacgatggtcaccctatccagaggtctgctgtgtggacactggggctggtgaggacagaggctagccaatatctgttggtcgacttatcccagtgcttggtttttagtgccccatggtgagcattggtttgcaaaacaaaggcctgtaccccatgcctgttcccaaggcccatctgtctgcctctcacctagaccttgttccctccaggatcctgaccagccgtttgtgcctgcctaggaccctgttatcctcagcacaggcaacttgttttcccccccacacagagctgaccagataccctgcccagggctctgctccacctctgtctttcaggctgttcctatgtgaggctgtagtgaggcctgcaccagtataccaagcaacccatccacaaatcaggtctgcgtttccccctaagttgtagtgaatccccatgaagtgatggcgggagtgaggtgaggacgtcattggtcaacagaggtgcgtgtcatgggggattgggccacatgttgtgtgctgtgtcctctagacatgcttgggttcggtcgtagaggt

SEQ ID NO: 67917 - DNA, 1062 bp, Homo sapiens
agtggctcagtactagaaattaaagaccctttgtgtgaaggtttaagcccatgccacacaggctggagacctgcttcaaagtggatggccttgggaggaattaagatcccgccctattatgggatgcctctgcactgacatttcaattgtgttttcctggttcccggccacttgatctctcctctcctctatctcccacttccccggctccggctcaaacactggtgagtgatgaactgaatggagactgactacattcaactgagtctaccaagccctgcctgagcactgtgatttgattcttggcctccctccctgaggccttgcagccagattagtcaagtctctggagcccaaagcacacacattcctggcttattccttcaggcaaatcatcacttgaggtcgcataagcccctgactatggcagtgccaattataacaagcatggcttgctgacctcctaattgtatgaaaccaattacattatgcttgttgttcattcaacaataagcagcttttgtgcccactaaattgaggcatactactaaatttggtgagtgtaacttggcaatacttctccaactcattaactgcctaaagctttttcaataaagaatacctttgtgcctcttgccttcagagaatgttactttcttgtgtgtattttcctgcccatttcattatatcttacttatgatctttctgcgcaatgtttctccatatgcctcagggcccttatttgcactaaattcttttttctgttctctttttgattcaaaattccagcacaataaaaagaataaagatgtggataaatctaaataagtactgactgcctaaaacaataatagtaaagtattttgggatttataaaatatttagaattaaaatacatgagaataatagcatatatagtttggcaggaagaggaatagagtttaaatattttaaggtccttgaatcacgcaggaagagttaaaagtactaattgatcttaaattttgataagtcatggatgcatgttcaaatgatctgtaggaaaaacaataaaggaatggt

SEQ ID NO: 67918 - DNA, 209 bp, Homo sapiens
tactttgaattctattttattttgggaccttttggttctgttccaagatcttggggttttatcatttaaaagtgaaaagttaactttgtaattgaaatgtcttgcagcttttgcttatacatattccacaattgagtatattattattgttgaggagcttaaagggagcagcctttacttaaaaaatataattgagttagactagacca

SEQ ID NO: 67919 - DNA, 1263 bp, Homo sapiens
  misc_feature (72)..(72): n is a, c, g, or t
catcaccttagctgtatcccagcggttttgataggttgtgtcattactgtcattcgattagaagaatttttnatttctatcttgatttcatttttgactcaatgctcattcaggagcaggttatttaatttccatgtatttgcatggttttgaaggttccttttggagttgatgtccagttttattccactgtggtctgagagtgcttgatataatttcaattttcttaaatttattgaggctcattttatggcctatcatatggtctgtcttggagaaagttccatgtgctgttgaataggatgtgtattctgtggttgttagatgaaatgttgtgtatatatctgttaaatccatttgttccaaggtatagtttaaattcactgtttctttgttgactttctgtcttgatgacctgtctattgctgtcagcggagtattgaagtccccactattattgtgttgctgtctgtcttatttcttaggtttattagtaaatgttttataaatttgggagctccattgttaggtgcatatatgtttaggactgtgatattttcctgttggacaaggccttttaccattatataatgtccctctttgtctcttttaactgctgttgctttaaagtttgtttcgtctgatatgagagtatctaccccagctcgcttttggtgtccatttgcatgaaatgcctttttccacccctttatgtgagtccttgtatgttaggtgagtctactgaagacagcagatagttggttgattagttcttatccattctgcagttctttatcttttaagtggagcatttaggccatttacattcagtgttagtattgaaatgcaaggtactgttgtattcatcatgctttttgttgcctgtgtactttgggtttttgtttgtatgtttgtttttgctttttaacttgtgttttagttttataggtcctgtgtgatttatgctttaaggaagttctgggccaggcacagtggctcacacctgtaatcccagcattttgggaggccaaggtgggcggatcacctgaggtcaggagttcaagaccagcctgcccaacatagtgaaaccctgtctctactaaaaacacaaaaattagctgggcatggtcgtgggcacctgtagtcccagctactcggtaggctgaggcatgagaattgcttgaacctgggaggcagaggttgcagtgagctgagatcatgccactgcactccagcctgggcaacagagcaagactccatctc

SEQ ID NO: 67920 - DNA, 218 bp, Homo sapiens
tgaggatgacttttgtccaacttcacaacagtatgatgcggatcttactgttacccaggatgaagtactgtggcatgatcacagctccctgaagcctcaacctctccaagctcaggtgatttcttccacctcagcctccaaagtagctgggactacaggcatgcgccactacacccagctaatttttttgtgtgttttggagagatagggtttcatca

SEQ ID NO: 67921 - DNA, 1991 bp, Homo sapiens
  misc_feature (1361)..(1361): n is a, c, g, or t
  misc_feature (1543)..(1543): n is a, c, g, or t
  misc_feature (1782)..(1782): n is a, c, g, or t
agcggatttcctctttcttactcttctatctccctactctccttcagcatcctcgcacaatgaactcttggggccgttttattctctgaggttagcaaggagtcatctactagccattcaggaggccagctgggaagacaaaataggcaccccaaactcagcaacttcataacaccttcctctccccgcctgaagccttaaactgcatcaagtcaaagaaacctggggcaaatccttaacatgtttttgactgcagtaaatccacagccactctctactccgagctggcagattgagaccaagtattcaacgaaagtgctcactggaaattggatggaagagaggagaaagttcaccagagacactgacaagacaccccaatccatttacagaaaagaatacatccccttcccagaccacagaccagaccagatctccaggtggtatgggaagaggaaagttgaggggctaccttacaaacacctgatcacccaccaccaggagcccccacatcgctacctgatcagcacctatgacgaccattacaaccggcatggttacaacccggggctgcctccactccgcacttggaatggacagaagttgctgtggctgccagagaagtctgactttccccttcttgctccccctacaaactatggactctatgagcagctcaagcagagacagctcacacccaaggctggcctgaagcagagcacttatacttcatcctaccccagaccaccgttgtgcgctatgtcctggagggagcatgcggtcccggtccctccccatcgcctgcatcctctcccacacttctgagagctgccaccccaggagcagctcagatagaatcagctggagaccacagcatcactggacttgccagacaacaagtggcgcagataaactcagagtacgagatctggcccgtcaaaggtgctctcagaatcatcatctgcatttggcggtacctgtcccccctcaaaacccacaggttcctttcttttccatccaacaattaaagatctttgacactattgcagggctatgtacgtgcacaagacagattcagactgtcagagaaaacaggaagggcccttaagttctaccctgttgtttcacaagaggggaaactgaggcccggagaggtaatgtgacttgctgaagagtctactcccatggaggaaatgaatctgatgatgaaacccatcatgaaaactccacagaatgactgaatgtggttcccaggagggcagtgctgcagagctggcaatggggaaggaccccagcttgtctgtcattgccaaggcagaggaaggcgtgctctggccccacggggctcagaagaagggganaacacatggcatttcctttgtctctgagctcgcaaatctttgtgtttttttttttgttttttttttttgagacggagtgtcgctctccagccttggtgacagagtgagactccatcccaaaaacaacaacaacaacaacaaacttacactaacggtagctgatgagctaaaaaaaaaatcgngtaaaaaaaccccataatgttttaagtaagtttacaaatttatgttgggccacattcagcctgcaggcggagggttggacaagcttgtgcgaaagtaaaggatgtcatgagagcaacgggcaggggttgacggatgatgaatgaagacctggcctgcctaggtagggccagggagaatcaggtaggtcaaggccagaaagctgagggagattacccagctgaagggacaggttgggagngaagagagggtggcttgggccatgggggcagcacgtttgaagtctctgacttgggaagaagctgagcaaattccttaaaagtccagaaagaccatgcattggtctcctattgctgctggaacaaaataccacaaactcagtgccctaaagcaacacatgtttatttgacagttcttattataaatgtgaataaatgcacatttattcag

SEQ ID NO: 67922 - DNA, 1963 bp, Homo sapiens
  misc_feature (30)..(30): n is a, c, g, or t
  misc_feature (1333)..(1333): n is a, c, g, or t
  misc_feature (1515)..(1515): n is a, c, g, or t
  misc_feature (1754)..(1754): n is a, c, g, or t
aagatagatcaactctccctaaaggctganagtgaactcttggggccgttttattctctgaggttagcaaggagtcatctactagccattcaggaggccagctgggaagacaaaataggcaccccaaactcagcaacttcataacaccttcctctccccgcctgaagccttaaactgcatcaagtcaaagaaacctggggcaaatccttaacatgtttttgactgcagtaaatccacagccactctctactccgagctggcagattgagaccaagtattcaacgaaagtgctcactggaaattggatggaagagaggagaaagttcaccagagacactgacaagacaccccaatccatttacagaaaagaatacatccccttcccagaccacagaccagaccagatctccaggtggtatgggaagaggaaagttgaggggctaccttacaaacacctgatcacccaccaccaggagcccccacatcgctacctgatcagcacctatgacgaccattacaaccggcatggttacaacccggggctgcctccactccgcacttggaatggacagaagttgctgtggctgccagagaagtctgactttccccttcttgctccccctacaaactatggactctatgagcagctcaagcagagacagctcacacccaaggctggcctgaagcagagcacttatacttcatcctaccccagaccaccgttgtgcgctatgtcctggagggagcatgcggtcccggtccctccccatcgcctgcatcctctcccacacttctgagagctgccaccccaggagcagctcagatagaatcagctggagaccacagcatcactggacttgccagacaacaagtggcgcagataaactcagagtacgagatctggcccgtcaaaggtgctctcagaatcatcatctgcatttggcggtacctgtcccccctcaaaacccacaggttcctttcttttccatccaacaattaaagatctttgacactattgcagggctatgtacgtgcacaagacagattcagactgtcagagaaaacaggaagggcccttaagttctaccctgttgtttcacaagaggggaaactgaggcccggagaggtaatgtgacttgctgaagagtctactcccatggaggaaatgaatctgatgatgaaacccatcatgaaaactccacagaatgactgaatgtggttcccaggagggcagtgctgcagagctggcaatggggaaggaccccagcttgtctgtcattgccaaggcagaggaaggcgtgctctggccccacggggctcagaagaagggganaacacatggcatttcctttgtctctgagctcgcaaatctttgtgtttttttttttgttttttttttttgagacggagtgtcgctctccagccttggtgacagagtgagactccatcccaaaaacaacaacaacaacaacaaacttacactaacggtagctgatgagctaaaaaaaaaatcgngtaaaaaaaccccataatgttttaagtaagtttacaaatttatgttgggccacattcagcctgcaggcggagggttggacaagcttgtgcgaaagtaaaggatgtcatgagagcaacgggcaggggttgacggatgatgaatgaagacctggcctgcctaggtagggccagggagaatcaggtaggtcaaggccagaaagctgagggagattacccagctgaagggacaggttgggagngaagagagggtggcttgggccatgggggcagcacgtttgaagtctctgacttgggaagaagctgagcaaattccttaaaagtccagaaagaccatgcattggtctcctattgctgctggaacaaaataccacaaactcagtgccctaaagcaacacatgtttatttgacagttcttattataaatgtgaataaatgcacatttattcag

SEQ ID NO: 67923 - DNA, 397 bp, Homo sapiens
  misc_feature (20)..(20): n is a, c, g, or t
gatctggccgtcagccgcgngccgctgggaactccactcggggaactcctttccaagctgacctcagttttctcacaagaacccagttagctgatgttttattgtaattgtcttaatttgctaagaacaagtaataagtaaatttttggaattccactcctgagctcaagcgatctgcccaactcagcctcctaaagtgctggaattacaggtgggagccaccactcccggctccactttgaattttgatttgaagagtaatatatagtatttgacactgagaaaaactgcattcaactgttcttcatccttgatgctcctatagaaatagttgtgaaaaaaagggaattccagcagcacaaggacgtcacccatacaggaaggaagggagggcagt

SEQ ID NO: 67924 - DNA, 574 bp, Homo sapiens
aaatcagctcggtccgtatccgtgtccggggttgggcctcctcttgggccaaccgctccagtccagcggtttctagctggacccctttctcctccagcatcagctctaccatgtccaaggggagtcccaggtctccacacagtgacaaggaccaagccttccacgtgcgccttatagcctctcaacttcttgcttgggatctccaacctcaccgcggctcgaaatggaccccaactgctcctgcgccactggtggctcctgcacctgcactggctcctgcaaatgcaaagagtgcaaatgcacctcctgcaagaagagctgctgctcctgctgccccatgagctgtgccaagtgtgcccagggctgcatctgcaaaggggcatcagagaagtgcagctgctgtgcctgatgtccggacagccctgctcgaagatatagaaagagtgacctgcacaaacttggaattttttttccatacaaccctgacccatttactgtattttttttaatgaaatatgtgaatgataataaaagttgctgacttaaaaagaaagataaggggggcccgggaccc

SEQ ID NO: 67925 - DNA, 3565 bp, Homo sapiens
  misc_feature (105)..(105): n is a, c, g, or t
  misc_feature (1189)..(1189): n is a, c, g, or t
  misc_feature (1363)..(1363): n is a, c, g, or t
  misc_feature (1680)..(1680): n is a, c, g, or t
catgccagttacttcctcaggaaaatattttcttgccttcttctttcagtatggttttaaatttgggaacagtggataacccaagtgtcccacaggccaaggtanattccaatggcagcatgatccctgcacccaaagccagcccctaaagcctaccccttgtgcacccgcagcctggtaagtgagcttggctgcttgtgaggagctacaagtgaaagagaagttattttaaataaatcccaaagtttgaggcagactgtccaggactgttcccaggaagaagcaggagttacccacaggaaaagtctctgacctggtcccctcaggcccagctacctgcgcccaccagcagtgaaggttgatgtactggcccagcatctccacctcccccatgcaaccaggtccctggtaccgtgtctcccgttgcatgtctggcttctgcctgtgctcctcctgccacgagcatcctccctgtccctcctcattccaccgtgtctctcctgcacacatagcctctgtcccagggcgatttatccacttgagtacaggagctgctcagacctctcagcccagccctctgtgactgccccagccccatcctaccccacccaaagctgccttcctggctgtaggagctccctcgtctagccaaggccctatgggtccccatccgaggatccacaagcaatgacttcccaaatgacctccactgcaagaagaatccttaccactgtttccagagccgtgaacgatgctgtgatggcccaggtctcagcaccaccctctgtgacctaaaaagaaaagctcaatttccatctgtcttctttcccaggaccaaggggacacagtaatgtgaagtcaaatacttaaccgagcaaagggccagtattgttatcagtcaaggacaaacctcccacctcacagacagccaagcagtgagggaaagacagacagacataggtaggaaggtgctctgcaggcacaaggcccagagaagcccctctccgggaacttcccctgctccttccaggaacagtgagcccagtgagcagccccagccagctcttcaaggccttcaaggggtctttccatgactgagtcacctccaggagctcacctgacccccagagaagacctaccccaggcagctccgtgccctggcttctccccatgccccaaatcccccccngccatccctcctggtcctcgtctacatcaagggcctcttcccctcttcctcccagctctcaggacaggtgactgggagaccttgaaccctcagcctcttcctttaaaaaaaacaaaacaaaacaaaactgtgggccatttatttgggattttggagttgtttggtttttgtttntatatcttaatagttcgaaagtaagaagggagccctgctatggatgttaagtccaaattactcggttagtgggagcaaaacctatgacttccaaggggatgaggagaggttcagaggacaggaggagcctcccccattgaaaaaaaaaaatgggtcaggacattccctggatgaggacaatgctaggggtggcatctcacatggctgctgctattcctggtgcttccccacacttttgacagatggagtccttctcctaccgcctcctgccacctcaccctacaggcattctctatgtaggaaacaagagccttatnttatagagtggggagctgagacacagcctcaggtaacactgacacagctcccgaatgaggctgggacactctgcaaacctctcctcatggtgctaagggtggcatgctcttgacaggaaacctaaatgaccactcctctcatttggaaagtaatccactgcagtaaaagtttcagacatgcaagagagagttttttttttttttactacaaatttttgctcccccataaaattatttttttattagagggagtatccaagttttaaaagtatatagaattttttggttgtaagagaaatacatactcattaggatcccgattaaattccttgagtagactggtgcctaccagaaagcaaagcaaagttaaacaaaacgaaacaaaatccttcatatacaaaaagaactttctgtttgtattggcagaggtagtgaggtgattcaggtaggctgaaaatcctgggttgcgggagcctcactttattccattcccacccgctttgatgtctatgcttggctctctgggctgcccctggtactgccgaatcctacacatctcttatcagctttcctcaaactttaaggaggctctgtgagggatgggtcatgggaagacccaagctttccctccgccaggattgcaaaagcaagtagacttggtctatgcagctcttcttccagcaatttctttatttggaattagaacttcctttgttagtatctttgatcttttgactcaagcacattttggaagggctcccttacaaaagtagaatttaaaacagaggatacagttaaagagcaacccaaaggacgcttaagaaaccgagaccacttcaccaaacaggactaaggaacactttcgtgcacagaagtcagccgcaatccaggcacaggacgaagatgggatacacgtgctcatctgtctgtcctcctttcctctccctccccgacgttctagttagcttgttgacttgttaaaccttctgttcttaaaatgaaaagctagcttacctcaaagaatcttgtttccattcggaaaccaacgattttgtgttttagaatggacagccctcccctcaccactccctaccttggcctggtgtccttgagacatacggtctttgcttagtcgtgtgttggctgctttgagcaggaacaaggcctccaggccctgaggtgggaaggaaggattggatgccactgccctcctccccactttagcatgtaggggccagcccatctcttccagcagggtcctgctgagttaccatagcaaccagcaactccagggtaccacaacagacaatggctcagcgagccgacgtgtggggatgatgcaggggttttggcccagccagaggacccagagttgagcttcaaatgctagagaaggggagaaacaggatggaagggtggtttaaggaactggcaggggtctttgagtcacatagagaagccgttgaaggaggtagggcaggttatctctgttccagtcacccccttccagccccatcccacttctgtttcaaactaaagctcccacctcgaacattgaccctttgttagaacaaagcaaagcatatctttagacaacagtgttaaaatgagcctcaaatgtatgtggatgagatctctaagaagagggtcttctggttttgatttttaaagaagagtatcctagtaaaatattaaaaaaaaattaaaaagtttttaaaaaggaaacctatgctatttaaattggagcccagttgtaacttggtaaaggcaagcttctgtacctttgttataattaattgtatacctgtgtatgtaaatataaggcattcctattttgcagttcagaacaaaaaaaacttatttgtaatatagaataaagtttatt

SEQ ID NO: 67926 - DNA, 1136 bp, Homo sapiens
  misc_feature (105)..(105): n is a, c, g, or t
  misc_feature (1113)..(1113): n is a, c, g, or t
catgccagttacttcctcaggaaaatattttcttgccttcttctttcagtatggttttaaatttgggaacagtggataacccaagtgtcccacaggccaaggtanattccaatggcagcatgatccctgcacccaaagccagcccctaaagcctaccccttgtgcacccgcagcctggtaagtgagcttggctgcttgtgaggagctacaagtgaaagagaagttattttaaataaatcccaaagtttgaggcagactgtccaggactgttcccaggaagaagcaggagttacccacaggaaaagtctctgacctggtcccctcaggcccagctacctgcgcccaccagcagtgaaggttgatgtactggcccagcatctccacctcccccatgcaaccaggtccctggtaccgtgtctcccgttgcatgtctggcttctgcctgtgctcctcctgccacgagcatcctccctgtccctcctcattccaccgtgtctctcctgcacacatagcctctgtcccagggcgatttatccacttgagtacaggagctgctcagacctctcagcccagccctctgtgactgccccagccccatcctaccccacccaaagctgccttcctggctgtaggagctccctcgtctagccaaggccctatgggtccccatccgaggatccacaagcaatgacttcccaaatgacctccactgcaagaagaatccttaccactgtttccagagccgtgaacgatgctgtgatggcccaggtctcagcaccaccctctgtgacctaaaaagaaaagctcaatttccatctgtcttctttcccaggaccaaggggacacagtaatgtgaagtcaaatacttaaccgagcaaagggccagtattgttatcagtcaaggacaaacctcccacctcacagacagccaagcagtgagggaaagacagacagacataggtaggaaggtgctctgcaggcacaaggcccagagaagcccctctccgggaacttcccctgctccttccaggaacagtgagcccagtgagcagccccagccagctcttcaagggtccttccatagtgacgccccccaaggacatctggaatgtnactggtgcccaggtgtacttgag

SEQ ID NO: 67927 - DNA, 3595 bp, Homo sapiens
  misc_feature (105)..(105): n is a, c, g, or t
  misc_feature (1189)..(1189): n is a, c, g, or t
  misc_feature (1363)..(1363): n is a, c, g, or t
  misc_feature (1680)..(1680): n is a, c, g, or t
catgccagttacttcctcaggaaaatattttcttgccttcttctttcagtatggttttaaatttgggaacagtggataacccaagtgtcccacaggccaaggtanattccaatggcagcatgatccctgcacccaaagccagcccctaaagcctaccccttgtgcacccgcagcctggtaagtgagcttggctgcttgtgaggagctacaagtgaaagagaagttattttaaataaatcccaaagtttgaggcagactgtccaggactgttcccaggaagaagcaggagttacccacaggaaaagtctctgacctggtcccctcaggcccagctacctgcgcccaccagcagtgaaggttgatgtactggcccagcatctccacctcccccatgcaaccaggtccctggtaccgtgtctcccgttgcatgtctggcttctgcctgtgctcctcctgccacgagcatcctccctgtccctcctcattccaccgtgtctctcctgcacacatagcctctgtcccagggcgatttatccacttgagtacaggagctgctcagacctctcagcccagccctctgtgactgccccagccccatcctaccccacccaaagctgccttcctggctgtaggagctccctcgtctagccaaggccctatgggtccccatccgaggatccacaagcaatgacttcccaaatgacctccactgcaagaagaatccttaccactgtttccagagccgtgaacgatgctgtgatggcccaggtctcagcaccaccctctgtgacctaaaaagaaaagctcaatttccatctgtcttctttcccaggaccaaggggacacagtaatgtgaagtcaaatacttaaccgagcaaagggccagtattgttatcagtcaaggacaaacctcccacctcacagacagccaagcagtgagggaaagacagacagacataggtaggaaggtgctctgcaggcacaaggcccagagaagcccctctccgggaacttcccctgctccttccaggaacagtgagcccagtgagcagccccagccagctcttcaaggccttcaaggggtctttccatgactgagtcacctccaggagctcacctgacccccagagaagacctaccccaggcagctccgtgccctggcttctccccatgccccaaatcccccccngccatccctcctggtcctcgtctacatcaagggcctcttcccctcttcctcccagctctcaggacaggtgactgggagaccttgaaccctcagcctcttcctttaaaaaaaacaaaacaaaacaaaactgtgggccatttatttgggattttggagttgtttggtttttgtttntatatcttaatagttcgaaagtaagaagggagccctgctatggatgttaagtccaaattactcggttagtgggagcaaaacctatgacttccaaggggatgaggagaggttcagaggacaggaggagcctcccccattgaaaaaaaaaaatgggtcaggacattccctggatgaggacaatgctaggggtggcatctcacatggctgctgctattcctggtgcttccccacacttttgacagatggagtccttctcctaccgcctcctgccacctcaccctacaggcattctctatgtaggaaacaagagccttatnttatagagtggggagctgagacacagcctcaggtaacactgacacagctcccgaatgaggctgggacactctgcaaacctctcctcatggtgctaagggtggcatgctcttgacaggaaacctaaatgaccactcctctcatttggaaagtaatccactgcagtaaaagtttcagacatgcaagagagagttttttttttttttactacaaatttttgctcccccataaaattatttttttattagagggagtatccaagttttaaaagtatatagaattttttggttgtaagagaaatacatactcattaggatcccgattaaattccttgagtagactggtgcctaccagaaagcaaagcaaagttaaacaaaacgaaacaaaatccttcatatacaaaaagaactttctgtttgtattggcagaggtagtgaggtgattcaggtaggctgaaaatcctgggttgcgggagcctcactttattccattcccacccgctttgatgtctatgcttggctctctgggctgcccctggtactgccgaatcctacacatctcttatcagctttcctcaaactttaaggaggctctgtgagggatgggtcatgggaagacccaagctttccctccgccaggattgcaaaagcaagtagacttggtctatgcagctcttcttccagcaatttctttatttggaattagaacttcctttgttagtatctttgatcttttgactcaagcacattttggaagggctcccttacaaaagtagaatttaaaacagaggatacagttaaagagcaacccaaaggacgcttaagaaaccgagaccacttcaccaaacaggactaaggaacactttcgtgcacagaagtcagccgcaatccaggcacaggacgaagatgggatacacgtgctcatctgtctgtcctcctttcctctccctccccgacgttctagttagcttgttgacttgttaaaccttctgttcttaaaatgaaaagctagcttacctcaaagaatcttgtttccattcggaaaccaacgattttgtgttttagaatggacagccctcccctcaccactccctaccttggcctggtgtccttgagacatacggtctttgcttagtcgtgtgttggctgctttgagcaggaacaaggcctccaggccctgaggtgggaaggaaggattggatgccactgccctcctccccactttagcatgtaggggccagcccatctcttccagcagggtcctgctgagttaccatagcaaccagcaactccagggtaccacaacagacaatggctcagcgagccgacgtgtggggatgatgcaggggttttggcccagccagaggacccagagttgagcttcaaatgctagagaaggggagaaacaggatggaagggtggtttaaggaactggcaggggtctttgagtcacatagagaagccgttgaaggaggtagggcaggttatctctgttccagtcacccccttccagccccatcccacttctgtttcaaactaaagctcccacctcgaacattgaccctttgttagaacaaagcaaagcatatctttagacaacagtgttaaaatgagcctcaaatgtatgtggatgagatctctaagaagagggtcttctggttttgatttttaaagaagagtatcctagtaaaatattaaaaaaaaattaaaaagtttttaaaaaggaaacctatgctatttaaattggagcccagttgtaacttggtaaaggcaagcttctgtacctttgttataattaattgtatacctgtgtatgtaaatataaggcattcctattttgcagttcagaacaaaaaaaacttatttgtaatatagaataaagtttattaaaaaataataaaaatgcagtttgggattt

SEQ ID NO: 67928 - DNA, 3541 bp, Homo sapiens
  misc_feature (105)..(105): n is a, c, g, or t
  misc_feature (1189)..(1189): n is a, c, g, or t
  misc_feature (1363)..(1363): n is a, c, g, or t
  misc_feature (1680)..(1680): n is a, c, g, or t
catgccagttacttcctcaggaaaatattttcttgccttcttctttcagtatggttttaaatttgggaacagtggataacccaagtgtcccacaggccaaggtanattccaatggcagcatgatccctgcacccaaagccagcccctaaagcctaccccttgtgcacccgcagcctggtaagtgagcttggctgcttgtgaggagctacaagtgaaagagaagttattttaaataaatcccaaagtttgaggcagactgtccaggactgttcccaggaagaagcaggagttacccacaggaaaagtctctgacctggtcccctcaggcccagctacctgcgcccaccagcagtgaaggttgatgtactggcccagcatctccacctcccccatgcaaccaggtccctggtaccgtgtctcccgttgcatgtctggcttctgcctgtgctcctcctgccacgagcatcctccctgtccctcctcattccaccgtgtctctcctgcacacatagcctctgtcccagggcgatttatccacttgagtacaggagctgctcagacctctcagcccagccctctgtgactgccccagccccatcctaccccacccaaagctgccttcctggctgtaggagctccctcgtctagccaaggccctatgggtccccatccgaggatccacaagcaatgacttcccaaatgacctccactgcaagaagaatccttaccactgtttccagagccgtgaacgatgctgtgatggcccaggtctcagcaccaccctctgtgacctaaaaagaaaagctcaatttccatctgtcttctttcccaggaccaaggggacacagtaatgtgaagtcaaatacttaaccgagcaaagggccagtattgttatcagtcaaggacaaacctcccacctcacagacagccaagcagtgagggaaagacagacagacataggtaggaaggtgctctgcaggcacaaggcccagagaagcccctctccgggaacttcccctgctccttccaggaacagtgagcccagtgagcagccccagccagctcttcaaggccttcaaggggtctttccatgactgagtcacctccaggagctcacctgacccccagagaagacctaccccaggcagctccgtgccctggcttctccccatgccccaaatcccccccngccatccctcctggtcctcgtctacatcaagggcctcttcccctcttcctcccagctctcaggacaggtgactgggagaccttgaaccctcagcctcttcctttaaaaaaaacaaaacaaaacaaaactgtgggccatttatttgggattttggagttgtttggtttttgtttntatatcttaatagttcgaaagtaagaagggagccctgctatggatgttaagtccaaattactcggttagtgggagcaaaacctatgacttccaaggggatgaggagaggttcagaggacaggaggagcctcccccattgaaaaaaaaaaatgggtcaggacattccctggatgaggacaatgctaggggtggcatctcacatggctgctgctattcctggtgcttccccacacttttgacagatggagtccttctcctaccgcctcctgccacctcaccctacaggcattctctatgtaggaaacaagagccttatnttatagagtggggagctgagacacagcctcaggtaacactgacacagctcccgaatgaggctgggacactctgcaaacctctcctcatggtgctaagggtggcatgctcttgacaggaaacctaaatgaccactcctctcatttggaaagtaatccactgcagtaaaagtttcagacatgcaagagagagttttttttttttttactacaaatttttgctcccccataaaattatttttttattagagggagtatccaagttttaaaagtatatagaattttttggttgtaagagaaatacatactcattaggatcccgattaaattccttgagtagactggtgcctaccagaaagcaaagcaaagttaaacaaaacgaaacaaaatccttcatatacaaaaagaactttctgtttgtattggcagaggtagtgaggtgattcaggtaggctgaaaatcctgggttgcgggagcctcactttattccattcccacccgctttgatgtctatgcttggctctctgggctgcccctggtactgccgaatcctacacatctcttatcagctttcctcaaactttaaggaggctctgtgagggatgggtcatgggaagacccaagctttccctccgccaggattgcaaaagcaagtagacttggtctatgcagctcttcttccagcaatttctttatttggaattagaacttcctttgttagtatctttgatcttttgactcaagcacattttggaagggctcccttacaaaagtagaatttaaaacagaggatacagttaaagagcaacccaaaggacgcttaagaaaccgagaccacttcaccaaacaggactaaggaacactttcgtgcacagaagtcagccgcaatccaggcacaggacgaagatgggatacacgtgctcatctgtctgtcctcctttcctctccctccccgacgttctagttagcttgttgacttgttaaaccttctgttcttaaaatgtgttttagaatggacagccctcccctcaccactccctaccttggcctggtgtccttgagacatacggtctttgcttagtcgtgtgttggctgctttgagcaggaacaaggcctccaggccctgaggtgggaaggaaggattggatgccactgccctcctccccactttagcatgtaggggccagcccatctcttccagcagggtcctgctgagttaccatagcaaccagcaactccagggtaccacaacagacaatggctcagcgagccgacgtgtggggatgatgcaggggttttggcccagccagaggacccagagttgagcttcaaatgctagagaaggggagaaacaggatggaagggtggtttaaggaactggcaggggtctttgagtcacatagagaagccgttgaaggaggtagggcaggttatctctgttccagtcacccccttccagccccatcccacttctgtttcaaactaaagctcccacctcgaacattgaccctttgttagaacaaagcaaagcatatctttagacaacagtgttaaaatgagcctcaaatgtatgtggatgagatctctaagaagagggtcttctggttttgatttttaaagaagagtatcctagtaaaatattaaaaaaaaattaaaaagtttttaaaaaggaaacctatgctatttaaattggagcccagttgtaacttggtaaaggcaagcttctgtacctttgttataattaattgtatacctgtgtatgtaaatataaggcattcctattttgcagttcagaacaaaaaaaacttatttgtaatatagaataaagtttattaaaaaataataaaaatgcagtttgggattt

SEQ ID NO: 67929 - DNA, 1116 bp, Homo sapiens
ttcctcaagaggacataacagtcccaaacattcgtgatctaatagcttcaaaaatcttgaagcaagatgttaagaactacaaggaaaaatagacaaattcacacttaaaatcagagacttcaatacccctctcgataactgataggaaggtagaaagaaaatcagtaaggatacagatgacttgaacaacaatactgaacacaacatatcctaattgacattaagtgtaccctttacccaacaacagtagaatgcaccttcttttgaaagaagaatggatcataaagtaagcctcaataaatttaaaaggattttagtcagatagtgtgtaatttcctgaccacagtagaattaacttggaaattaataacagagaggtatctaggatatcttcaaatattgggaaattaacatattccaactaacccttgggtcaagaaaatgaaaagggaaattacaaagtatcatgaactgaatgaaaattagaacacaacatcaaaatttatagcatgctactaaagaagtatatatagagacatttgtagcactaaatatttgtattagaacaaaggtctcaattcaatgacctttagtttcttccttaagaaataagaagaaaaagagaaaattaaaacccatagtaagtagaagggaaataataagagaatgaagaccaatgaaatggaaaatagtaaaaccataaaggaaagaaaaactggcagagtgtagtggcttatgcctgtaatgccagcactttgggaggctgaggcaggaggattgcttgagcccagcagagcagttcaagaccatcctgggtaacatagtgagaccccacctctaccaaaaaaaataaaaaataaaaaccctaaactggctttttggaagatcagtcaaattgacaagactcttgccggaatgatcagataaaaaagagaaaagacacaatatcaggattgagagcggtatcttcactttagatccttcagatgtttgaaagataataaatactataaacaactttatgccaataaattcagcaagttaaatgaaatggacatattacttgaaaggcacaaactaccaaaattcactcaagggaaaaaaaaagataatatc

SEQ ID NO: 67930 - DNA, 458 bp, Homo sapiens
actgcaggctctttgaatctcttttaaataggaatgattcagagattaagaagccatttataataaagcaaacaattcaatgccatttctcaatggcccaaacaagagagtttgttttgggaagttggttccagaatacacagatcatataattgcacagtgtcagagctggaaatgctgttagggagtaaccagtctattttacatatgacaaatgtgaagttcagaacgactgtgagtgagctgtccaagattagggatgcattcaagcttcattaaataagtattaactgagtgctatgtgccaggtgatagggataggaaggcaaataaaacacgatctttgtccatgtagtggaagaagacaaataagtgaataattgcagttaaattgttgcataagtgggactccaactctgtgtccaatttcataatcaaaggtctatcccactacctta

SEQ ID NO: 67931 - DNA, 382 bp, Homo sapiens
ttctgtaagccccgcccccactgcgtgcgggcggcttttgtctccacggcaaccgtcaactctggaaacgcctgtctttctccatggcaactgtctacgccgcaggctggagctgcccattaccggagcccgtaagcagtatgggtgctggacaaacagcgtgatcgggtcgtaaaacttggtggaaaacgaatattagagcacaaggaaggaaaaaccgggctgggtgggactgaaatagttgatgtgagggaagatttctcaaagggagactatttttttattgtttgtttgttttttacttttattttttcaagacggggtctcgctctgttgcccaggctggagcacagtggcacgatctcggctcactgcaacctcc

SEQ ID NO: 67932 - DNA, 4697 bp, Homo sapiens
ctattagagatgctgcaaggagaatgagagagatgcctggttagctagcagttcttccacctagctcagctgaatcaccaggtgtgtgagtggggtaattttggatttcagccccaaatgagtgtgcagaaaactgcttctgcatgaatggcctatgtgagatcagcagaaaagccagccagctgagccttgctcagattgtaaaatcataagcagatacacagtcatgttaagccattaaatttgggagtgttttgttttgtagaaatagatatctgaaatacccagtgacttacacatttacttcatctccatatactgaagaccgagtgttagtttctatcatacctatgcccgtcccaagatactgggccctcaggcaaggtgaggttctagttcctctaggaaaggcaaagaaatttaagggatatggggtgttaaaattagacaagtgaagatgcagttggtataagaaaattcatatcaactatcagaaggctgcttttgcaagaggaatatagttggttttgagaattcaaggaatgggaagataaaacatgttgagaatccacatatgaataaatatatttaacttcagtgtgatgaagctttctttacaggtgcttcacaaaggggctttggctttccaccttgttgagatacgtgactgttgtggaggtgtgcttcttggtcttccttcaagaaagagcttgttcttcagctatgaggaatacagatagatgacaggtcttggctcccaaacctttagaatcctctgcaggattcaagctaaggtcatacttttccagatcatctcccagccaatgactgagcatgatggggtactagggacctgaccatttcttccaatgtaggattcacttgaccagttgtctttttggcagagtgccacatgggttagtcaagacagtgtggaatttttattgcattccctgcattgttctccatgtccaattcttcttaccctcttttttccccccacaaatgtcagatctgccttgtggtctgaaggctttctctgcataaccctttttcattcccctttacctttcctggtgttactcccagcaatctcgtacttctaactctggctcagcatctgcttctgagcaaggtacagttgagagaactaaaatggcaaatctatcagattaatatgatctgtagtttgtttgcttttaggtagagttggataatcattttacaacaattctaagaaaacttagtgtgttttactgcatgagatgccttttgaagtagagaagacatctgtctaaatcaccaactttatactttgggaaatctgtgttttttgccgaattgcaaaattgcattcgtcttatagtccttaaaatttattttacttcctaatatttgtaactacacagagtcatttgaatctgctaaacatagcacaaaaggtggatatacatcagtatttagtaaaagacatctatttaaattaagcaccttgcaacatgtattcagctatgaggaattttccgagcaagtagcattaacattgaaaattattatagagcttatggggggaggagccaagatggccgaataggaacagctctggtctacagctcccagcgtgagcgacgcagaagatgggtgatttctgcattttcgtctgaggtactgggttcatctcactagggagtgccagacagtgggcgcaagtcaatgggtgcgcgcaccatgcacgagccgaagcagggcgaggcattgcctcactcgggaagcgcaaagagtcagggagttccctttcctagtcaaagaaaggggtgacagatggcacctggaaaatcgggtcacttccacccgaatacagcgcttttccgacgggcttaaaaaacgccgcaccaggagattatatcccgcacctggctcggagggtcctacgcccatggagtctcactgattgctagcacagcagtctgagatcaaactgcaaggtggcagcgaggcttggggaggggcgcccgccattgcccaggcttgcttaggtaaacagagcagccgggaagctccaactgggtggagcccaccacagctcaaggaggcctgcctgcctctggaggctccacctctgggggcagggcacacacaaacaaaaagaccgcagtaacctctgcagacttaaatgtccctgtctgacagctttgaagagagcagtgtttctcccagcacgcagctggagatctgagaacgggcagactgcctcctcaagtgggtccctgacccctgacccccgagcagcctaactgggaggcaccccccagcaggggcagactgacacctcacagggctgggtactccaacagacctgcagctgagggtcctgtcagatagaaggaaaactaaaacagaaaggacatccacaccaaaaacccatctgtatatcaccatcatcaaagaccaaaagtagataaaaccaccaagatggggaaaaaacagagcagaaaaactggaaactctaaaacgcagagcgcctctcctcctccaaaggaacataattcatcaccagcaacggaacaaagctggacggagaatgactttgacgagctgagagaagaaggcttcagatgatcaaattactccgagctacaggaggaaattcaaaccaaaggcaaagaagttgaaaactttgagaaaagtttagaagaatgtataactagaataaccaatacagagaagtgcttaaaggagctgatggagctgaagaccaaggctcgagaactacgtgaagaatgcagaagcctcaggagccgatgcgatcaactggaagaaagggtatcagcgatggaagatgaagtgaatgaaatgaagcaagaagggaactttagagaaaaaagaataaaaagaaacgagcaaagcctccaagaaatatgggactacgtgtaaagacgaaatctacgtctgattggtgtaactgaaagtgatggggagaatggaaccaagttggaaaacactctgcaggatgtcatccaggagaacttccccaatctagcaaggcaggccaacattcagattcagaaatacagagaacgccacaaagctactcctcgagaagagcaactccaagacacataattgtcagattcattgaagttgaaatgaaggaaaatatgttaagggcagccagagagaaaggtcgggttacccacaaagggaagcccatcagactgacagcagatctctcagcagaaattctacaagccagaagagagtgggggccaatattcaacattcttaaagaaaagaattttcaacccagaatttcatatccagccaaactaagctttataagtgagggagaaataaaatactttacagacaagcaaatgctgagagattttgtcaccacgaggcctgccctaaaagtgctcctgaaggaagtgccaaacatggaaaggaacaactgataccagccgctgcaaaatcatgccaaaatgtaaagaccatcgagactaggaagaaactgcatgaactaatgagcaaaataaccagctaacatcataatgacaggatcaaattcacacataacaatattacctttaaatgtaactggactaaatgctccaattaaaagacacagactggcaaattggataaagagtcatgacccatcagtgtgctgtattcaggaaacccatctcacatgcagagacacacgtaggctcaaaataaaaggatagaggaagatctacgaagcaaatggaaaacaaaaaaaggcaggggttgcaatcctagtctctgataaaacagactttaaaccaacaaagatcaaaagagacaaagaaggccattacataatgggaaagggatcaattcaacaagaagagctaactatcctaaatatatatgcacccaaaataggagcacccagattcataaggcaagtcctgagcgacctacaaagagacttagactcccacacaataataatgggagactttaacaccccactgtcaacattagacagatcaacgagacagaaagttagcaaggatatccaggagttggactcagctctgcaccaagcggacctaatagacatctacagaactctccaccccatatcaacagaatatacatttttttcagcaccacaccacacctattccaaaattgaccacatacttggaagtaaagctctcctcagcaaatgtaaaagaacagaaattataacaaactgtctctcagaccacagtgcaatcaaactagaactcaggatgaagaaactcactcaaaaccgctcaactacatggaaactgaacaacctgctcctgaatgactactgggtatataacgaaatgaaggcagaaataaagatgttctttgaaaccaacgagaacaaagacacaacataccagaatctctgggatgcattcaaagcagtgtgtagagggaaatttatagcactaaatgcccacaagaggaagcaggaaagatccaaaattgacaccctaacatcacaattaaaagaaccagaaaagcaagagcaaacacattcaaaagctagcagaaggcaagaaataactaaaatcagagcagaactgaaggaaatagagacacaaaaaacccttcaaaaaattaatgaatccaggagctggttttttgaaaggatcaacaaaattgatagaccgctagcaagactaataaag

SEQ ID NO: 67933 - DNA, 459 bp, Homo sapiens
ttatattacaaaatgtgttgagctatgggagaaaaaaatgaaataaattctgagcagataactaacatgttataatgccatagcctttccatcttccttgtgttttttatcttgttttcacgtcatttgctgtaaatatttttagagttcactatgtgtcagttactattgtatgacttgtgtaactaaatgaacaaacatataaacaatgtaatttcaagcacaataaataacagaaggaccgatggtgtatgacgaaggtaaatgatatttcttattttgaataggtgatcagggaaagtctatttaaagaagggataaattgttgtcctggagagcaacagggtctagaaacattccttcgtcagtctgatctggacttttggttcctggttctagatccgctcctaccttgatgatctccaaaaccagcgttcatggttgatttttaaagaattc

SEQ ID NO: 67934 - DNA, 1452 bp, Homo sapiens
tctgaaaaataaataaaagcaggcagtttctggggagagaccaacacagaaatgagtttatcatttcctttcctcatgcatctttgccccaagggcagtcacatcatggcatggcacctctggcagataaacttcaagagaaaccccatatttcctgaacagagaagcctgagaaagaggcctctttgtgcagaaagtttgaggggaatcccatacaagtttcaccctaccccttgacctgcacagttatgggacagatgcaaactggaatagaaaaggcttaagtaactgaactgcaagttcactgcctacaaaaagtaaaacacaaattacagtctgaatataactcaagtgtttgcctgctgaaacaagagcatcaacaatctcggaagtattataacagtacccaggctacataacataatattcagtgtccaagataaaatccaaaattacttggtataaaggaccaggaaaatgtgaccagttctcaaggaaaagacaactccagaatgactcagatgttggaagtatcagggaaaaactttaaagcagcttccataactggttcctttaggtaaaggaaaacacatttgaaataaattaaaataaattctagcaagaaatagaatgtattaaaacaaattttataactgaaatataatccaatgtaaactgatcaaatgggttaaataacagaatggagatgacaatgaaaagtaaacttaaagatacagtaatagaaattagaagaagagagaaaagatttttataaaaataaacagcctcagggacttgtgtgacaatatcaaaaggaacaaatgaaatatggataactggagttccagaagaactgaagagagattctgttagaaaagatatttgaagatttgaaaaaataatggctgaaacctccaaaattggtaaaagatacagatttatagatacaagagactcagcaaattacagacagaattaaactcaaaaccacacttgcacacatcaaaagtaaactaaaaatcagagatattcacctgctaacaagaaaacggctgctaaaaaaaaattaaaatacactgaaagctgttaaaaaattattcattacctacggagccataaagatttgaatgtacccatgcacttttcatcacaatccttggaagaatttagtggaatggtgcctttaacgcattggaagaaaagacctgtcaactcagaattttatatccagtgaaaatattcttcatgggtgaaggtgaaataaagacattttcagataaaataattcatgagcaatgggattgctctatgagatatgctgaaggaagttatttaaactgaagaaaaatgataccaaagagaaacctgcatcttcaggaataaaataaatgcaaaataaatggtaaatagctggttattagaaaagattacttttttgcctcctaaactgaa

SEQ ID NO: 67935 - DNA, 421 bp, Homo sapiens
gacaccaggagtccaggccccaagtcctttgtgtctcagcttgaccccttgagaccacccccttgcttggaggtttatgccagcggtgacctggaatcctacctcctatatcctggtgggtcacaaatactaactttaaaagaagcaacgacacccccatcagacacccactcctgtgaatatggaaatacggcccaggaacctcactgccgggaatactcaccgggttatactctgaatatgccacaaggatgtagaatagttcccgctgcctgggaaacagagaaagggggctagggtttggtttgtgcagatgctgttagtttcactttgtctacaaatcctaacaacaaatcccatttcaggttcagatgattcgacagataagcagtgaactttcagggcctgagattgttgaaga

SEQ ID NO: 67936 - DNA, 430 bp, Homo sapiens
gtcctgtccagacctccatggtttcccccacttctagctctaagccactagcgccgggtattgttacagttctttccccagcaatcgtttttcccataccaggtccgtacctgttttaattgcctcctgttcactctgtcgttgaggaagtgattcttgacctaggtttatggaaacggccaaacacctgacacccaacactggacagatcgtgtttttggtgtcatatctaagaaattgaggaaccatcagaggggatcattaaaagccaaagaaaaggctttcagttctggaaggatgggcaaactcctactggaaacattattacttatcaaggttttcttagtcgtccatgaaaacaccttatcttggtatagctggatggctttggtttcggctggttcaggtgagtaagtggttttctttctct

SEQ ID NO: 67937 - DNA, 460 bp, Homo sapiens
gaaatatttactacttccagcctcataatcctgcagtcatttggcacctctgaagccttggggagcactgaagccaaggctgcaccgtaccaaaaatttgaaacatgtgaatgagctgaatgtggaaggactaccggaaaacactcctttcagaatcccctcattgcatgaaatcccaaggctcgaaaacatctttcaagtgagcaattgaattaagtttgttattaagagcttggtgaaaggtagaagttacacgtgagaaggcggtggagccaggcacatgatggagcctcgaagagtggaaggtggcacctggctctgtgaggagggtgtgaagtcctccatgggaggaagagatgccagcaaaggagtaactccagttagcctccattgtctccaagccggcttttgtcctcatccacaacgcctccacacaagctctgaacacctgtccatgtaa

SEQ ID NO: 67938 - DNA, 295 bp, Homo sapiens
ccatagcacttttgaaatgtttctatttatagcacctgttatatcactgtaactgtatgttggcatgagtttcttctactaaatcagggggtcttaatctgttttttgttgatgtctttgggggtgtgtgaactgctggaaaactgtactaaaaggttatattagactagtggttggcaagctacagcctgtgaaccaaatctagcctgctgcctgtttttgtaaataaagttttgttgaaacacagtcactcccatttctttatgtattgtctatggctccttttgtgctacca

SEQ ID NO: 67939 - DNA, 2470 bp, Homo sapiens
tgtggacctgggcgagtgactcgttgtgtgctgtgcccgcaggagatgctgcaggataagggcctgtccgagagcgaggaggccttccgggccccgggcccagcgctcggagaggccagcgcagccaacgcccccgagcccgcgctggcagcgccgggcctcagcggagccgcgctaggcagccccccgggacccggggccgacgtcgtcgccgccgccgccgcggagcagaccatcgagaacatcaaggtggggctgcatgagaaggagctctggaagaagttccacgaggcgggcaccgagatgatcatcactaaggctggcaggaggatgttccccagctacaaggtaaaagtcacaggcatgaaccccaagaccaagtatatcctgctgattgacattgtccctgccgatgaccatcgctacaagttctgtgacaacaaatggatggtggcagggaaggctgagccagccatgccaggaaggctgtatgtccacccggattctcctgccacaggagcccactggatgcggcagctggtctccttccagaagctgaagctgacaaacaaccacctggacccctttggccatatcatcctcaactctatgcacaagtaccagccgcggctccacatcgttaaggctgatgagaacaatgctttcggctccaaaaacactgctttctgcacccacgtgttcccagagacctccttcatctctgtgacctcctaccagaatcacaagatcacccagctgaaaattgagaacaacccttttgccaagggattccggggcagtgatgacagtgacctgcgtgtggcccgactgcagagcaaagaataccccgtgatttccaaaagcatcatgaggcagaggctcatctccccccagctctcagccacaccggacgtgggccccctgctcggcacccaccaggcactccagcactaccagcacgagaacggggcacactcacagctcgcggagccgcaggacctgcccctcagcacctttcccacccagagggactcaagcctcttctatcactgcctgaaaagacgagacggtacccgccacctggacttaccttgcaagcgatcctatctggaagccccctcttcggtgggggaggatcactatttccgttccccccctccctacgaccagcaaatgctgagcccctcctactgcagtgaggtgacccccagagaagcatgtatgtactcaggttcagggcccgagattgccggggtgtctggggtggacgacctgcccccacctccgctgagctgtaacatgtggacttcagtgtcgccgtacaccagctatagcgtgcagacgatggagactgtgccgtaccagcccttccccacgcacttcaccgccaccaccatgatgccgcggctgcccaccctctccgctcagagctcccagccaccaggaaatgcccactttagtgtctacaatcagctctcccagtctcaggtccgagagcgggggcccagcgcctcattcccaagagagcgcggcctcccccaagggtgtgagaggaagccaccctcgccacatctaaatgctgccaatgagtttctctactctcaaaccttctccttgtcccgagaatcttccttacagtaccattcaggaatggggactgtggagaactggactgacggatgactctcacgtctcctccatagccccgggaccgtgttgctccagtattaacctctgtgggtggcctgcactctaccaagaaacacaggaaggtattccagtgtgtgtgtgtgtgtgtgtgtgtgtgtgtgtgtgtgtgtatacacgagcatgtatgtatttggagagcatccatcttctgacatacaactgaggtcatgacaaggaaaaaaaacaccacatttatctaagaagtgattttggctgcaggacctgggtctattgttatctgacatctcttgacatgcccgtgggtgggatgggagtggagggttcatatgagttattgagagggttttataatggttgatttactcaggggccaggtggggagttctctcccatggggaaagattctcactgctggggtgggaagattctcgctgctggggtgtgaggactctgtgcacaccttagagttcctggccttctctttgcaaggggagctgagaatctggttttggtagcaggaggcccactcctttgacttctggagagtctgtgagactgcctgagaggtgggctcagctaagccacaatgtgtactttgatagtacagctggctgctcagtgagtggcctagacattgatgactggagctctgaggtctgagggatgacgttcggaaagggtcatgggctaaatgtcacctgaggggtatttttaaagggtttttttttcccttcaagaggagggaaaatgcaaccagtagcatctctgtcatcattcagattttgtaataaagtacaga

SEQ ID NO: 67940 - DNA, 1087 bp, Homo sapiens
tattaatgggagaatctgtaagttatgtctgaactttcaggttgtcttataattgtctttttccttatgtcagatgttctatgtcataagaataaaatggttcacaccaatacaagtacttagttgtggaaagggagagtagaagataaaaatggagattttcctgtgctacaggcttagtcaagcttatggtctatttaatggttatcaaaggcaattaaatagtgttgagtgttctgcttttacctacatttcatttttcatgtacttagttacaaattgaaccctcttctatttttttcctgctcctgtttctgtttcattttagttttccttttccctgattatcatttaggcatgtaagtgacacccagtagcattgctttaattctgctggtgacagtgccaaagctttactatactctttttgttgtctgttgcttttctcttgctaatttgcttgactagataactaagaattcaggtaagcattagctctttgttcactgagaataatacaacttgcaagataattaatttggattgttctacatgtatttcgtttatttctctttaccttgttcatttattacgacattttgaattatttacatacccatatttcttctttcttttatggctcagctcactatgcttttttttaatactggtagcttcctcaaggttggaaaacaagatctgaatactatagaaaataataactatttttctgtggtcatattaaagatataatggctttggattttggggtgatttttctactgtcagtttaaaaaaaacttgtctatttgcatttgtgtgttattacttctagttaagagtatttccaaggaaagtttcatgttacttattttgtttccatgtctttttccaaaagaacttattttttatattataataaatatcagtggaaaagtaggtttcgttatatagaaattaactttaggctgggtgcagtggctcaagcctatatttgggaggccgaggcaggaggattgcttgaactcaggagttcgaaactagcgtgggcaatgtagcgagacctggtctctacaaaaaaaaaaaa

SEQ ID NO: 67941 - DNA, 349 bp, Homo sapiens
cattcaggccaggcacagtgactcatgcttgtaatcccagcatgcttgaagacatagcagtagggactatcgacaaagaaacacacagagggaaaaagaattccacatttgggaggctgacgcatgaggatcacctgaggtcagaagttcaagacaagcctgggtaacatggtaaaaccccgtctccactaaaaatacaaaaattagctgggcatggtggcctggggctgcaatctcaactacttgggaggctgaggcatgagaacctcttgaacccaggaggtggaggttgcagtgagcagaggtcatgctactctcaagcctgggcaacagagcaagaccctgtctc

SEQ ID NO: 67942 - DNA, 1625 bp, Homo sapiens
  misc_feature (415)..(415): n is a, c, g, or t
cttggctgttgggaatgtcccagtcacaggacactgtaaagagccaccagggccatgggatcgatgggagttcaccttgcccacagcagtctgcagagctaatgggggtgctgaatgtgtagggggcatctcatcactttcttccagaagttgagtaccaggttggtaccttctgcccatcctgcaggtgtctgagctgcctgaaatggttggtactctcagggagaccttggcaaggcaaggtccctctctgggctggtttttctacctgtaaaattgggagagagtgtcggacacagtggctcacacctataatcccaagcaccttgggaggcagaggcaggaggatcacttgaactcctgacctcaggtgatccgcccgccttggcctcccaaagtgctgggattacaggcntgagccactgtgcccagtgagtagtgtagtttttaaaaggagagccaggagggagccgctgttccgagtttcttgtctcatagaccttcacaggaaagagggcacctcaggtagggtttgagtgggatctcagaaggaagaggctgcactaaagaaaagggacagaaacgccggagtagggacttgcattttggctggagcatgcggaaccccctgagcagtctgagaaggtggctgggggaccacgtggggccccaaacaccaggctgaggtttagactccatcaagggcggtgcaaggggagcctcacacactcatgcctctctgttctctgtctttcccactctttccaaagcaagctaaagtatcccattaatcttccccagtgcagaggattaagctggtggctctcaggtttgaacacgcatcaggaggccctgtatcaatgcagagtgtggacccacctccagagcttccaggccctagaatctgcatttctaacaagtccccagatgtggcagatgctgctggtcctggggttacattttgaaaaccactgctttagagtaatggcaaatcctacatgctgaagccaggcactgctccactgtaaccaccaactacccctgcctggacttcggaattccctctgcacgatggggctggaccgggcattccaggagggctgccctaatcctgtctgacctcccgggaggtgctggagagagcaccaccttctacgcccagggtgaagttctgtggcttgttgactgtgccttcgagggctctatgtcattctgtcccctatcacctgcctgctgtgcacctgtcgtgcttgatctagctcagacattttgtcacactccttggggaggagcgggattggaacagttgcttggcgtggcaatggcctggccaccagtcgacatttgcagccagcatctgggtaccttgggagctcccagcctcccctgggcagggctggggccgtgaattggacacggcattgcgcttaacagcgcggctacctcaggctgctggtaagtaccagaatgctgtttctcctttcttggctttttgtcttacagaaagctcgctcccccatgaccctgcaccttcaaagcacttttctcataggttctatattagctggagaaaaaccttcaagggcatttggagaaaaaataaaaagcactagttcaggtacctt

SEQ ID NO: 67943 - DNA, 636 bp, Homo sapiens
ctttttgtctctgatgatgtgagtccattgctcacatatctggctgtttcatccaaaaaaaaatattttacttttggcttaaaagcccatctcaacataaacatcggagctcccgaatgttgctctaacagcttgacaactctgtaggtgtagagctggctgcccgccaatccaaatttttctgcttctttcttttaatataaacagagcctttgaagaactgtggattcattgaatgaacaaatgaacttgtttacataaaacatgcaggaggaaatttccactgtgcttcaacatataatttcagtctgtttttggatgggctggtgcattatggagattgtttttctagaccaggatgctgtcctccatatggtggcctcattgttcactccagtcggtaagttcaaggtttagctatgaggggagaaggggtacaaaattaaattctgctatgttggttcacaaagaacagactcgagtttggaagacccctgaccaattataggaaagaaagaaatggaaatgtgtttttttcttagtgtatgatgttttatagaaacagaagcaaaggtcttctggccggctcttctgaccctccactccaaatatgcaccctgaatctagtgatttaca

SEQ ID NO: 67944 - DNA, 407 bp, Homo sapiens
tgttgaattaaagatgaaagctgtagtatccatgaaaacaaaaatttgtaaaagacatgaaagaacataacaactttatatgtataatgtttttgtctgttgaagagctgcagaaaattacttgatgtttagtgccagctgcagtagcatgctaaactgcacatgttccaccaaggaaaaaacaagtcctcattcctcgtggataggcacacaaatttgacttttcactatcacctatctaagcaggcacctgttattactcatgtggtataatactccatttccattggagatttttgtgagaagtaactcataattgttaatgcaacaaaatgtgtgtccatacaattagcatgaatgtaaatatgtccatctacattttatttccttctggatgttagcgaaat

SEQ ID NO: 67945 - DNA, 628 bp, Homo sapiens
gacgtgcttggctgctgcggagttctgaagagcatcaggaatgtggctgctcctggagcctttcctgggcttcttggacatgtgtctggagccctccctccctcttagcgggtgatgggaatcagcagaagcatgcatcacggggaaagctggccttcaggtgtacaaggatggataaaaaggcagacttgcagggaaaggctaaggaggaaggagactgtttacagagtagctggagggctggcgggcttgggtggaggagctgaaacagtaatggggatacaggaaggagactgccccgagagaccgtttccactaatagaaggcattggagggcagggacgggaaaagggcaagtacccaagttctaggccaaagctctaagtgtttgtgaaactggaacagcaaaagctacttcttaaaaaccttaagattttgtgggtatctagtgagcgtatatatttacggggtatatgaactgttgtgaaacaggcatgcaatgtgaaataagctcatcatggggaatgggtgcccatcccctctagcatttatcctttgagttaccaatgccacttttttttggaggggttggcagggagtactaaataaaaagttcacatctcttgtt

SEQ ID NO: 67946 - DNA, 620 bp, Homo sapiens
caccatctccggacgcaaagctttcgcattcagcttgaggagctaaaccatttcaagccaaggtttcttcacagattaggataaaggatgaagagaagtaaactgaattactaaggatgcaacattaatggagagagccaagtgatgtaaatcgtggctggccatgagtggatcttgagtgccagttatctagagaaattccacgtggctgttccaggatggattaggcaccaatgactctctttcaccctcgagctggaatcctgcccctttaacacctttccagagagaggcaacccatggagggtcacagcaagatgggatggttgtgcctggtagtaaaaatatgtatcactcttcatttcatccagctttgaagcttctgctagcagctcacacatgaccccaagggcagctcctcaagtctgctaaagaaaagttaagtagaattaattttgttcaatatctcccattttgttagattcatcattttcagtcaagaatgacaatattaatggaaccaaaagaatatatactattaacatttcgtcttaattctacaaatgtctaaaagtctctgtaattcccttaaaaataaaaaaaatgcaatattaatttag

SEQ ID NO: 67947 - DNA, 2176 bp, Homo sapiens
  misc_feature (2)..(3): n is a, c, g, or t
cnngcgttcgcctctacgttccgcgcgggagcccacgcgcggttcgtccggaacccacagaccagagacgcaggtcccagccttttcggtgtcggcgccagttcccggaggagcggacatgagtgaaagccaggatgaagttcctgatgaagttgagaaccagtttatattgcgtctgcctctggaacatgcttgtactgtcaggaacctagcacgttctcaaagtgtcaagatgaaggataaactaaaaattgacttattgcctgatgggcgccatgcagttgttgaagtagaagatgtcccactagctgctaagctggttgacttgccttgtgttattgaaagcctgagaacgcttgataaaaaaaccttttataaaacagcagacatttctcagatgcttgtgtgcactgctgatggtgatatccacctttctccagaagaaccagctgcctctactgatcctaatatagtcaggaaaaaagaaagggggagagaagaaaaatgtgtctggaagcatggcattacgccaccacttaagaatgtcagaaagaaaaggttccggaaaacacaaaaaaaggtccctgatgtcaaagaaatggaaaaaagcagctttactgagtacattgaatctccagacgtggaaaatgaagtaaagagactgctgcgttcggatgctgaagccgtaagtacccgttgggaagtcattgctgaagatggaaccaaggaaatagaaagtcaaggctccatcccaggatttttgatatcctcgggaatgagcagccacaagcagggtcatacctcgtcagaatatgatatgcttcgggagatgttcagtgattctagaagtaacaatgatgatgatgaggatgaggatgatgaagatgaggatgaggatgaggatgaagatgaagacaaagaagaggaggaggaagattgttctgaagagtatctggaaaggcagctgcaggccgagtttattgaatctggccagtatagggcaaatgaaggtaccagttcaatagtcatggaaattcagaagcagattgagaaaaaggagaaaaagctccataagattcagaataaagcacaaagacagaaggatctcatcatgaaagtggaaaacctgacactcaagaatcattttcagtctgtgctggagcagcttgagttacaggaaaaacaaaaaaatgagaagctcatttccctacaggaacagttgcagcgttttctgaagaagtgaggagagccattggcgtggcccacaaaccttggattcaccatccagactgcagattggatgaaactgtgcacgtttttgtcccttcagttgccttatgttgaatcagttatatttatctgtaccttctttgctacttaaaatatgctcacagtttgtagtcatgtagaaaaggccagtataaaaatgtagtagacttaaagaccccactcgaccatgagactttctctttgtcaatttgggaattattattattaatttagaaatggggtcttgttatgttgcccaggctgaattcagactcctgggcttaagggatccttccgcctcagcctcctgagtagctgggactacagttgtgcaccaccacaccaaacaagaattgattatattgcttctgtgctatggtaccagcagattattcagccatgcttctaaaggcagtctagcctagaggccgtacagctgtttggtttgcatatgttttagcttttcttttggtttttagtatttcctaaaacataggggaaaaaacgaggtcatttctactaagcactaggacctgccatagtgagtttaagtgcctaccttgcagcagttaatactagattgtgttctgtctctgttcaggtaacaggactgcattcctgctcaaggatgattccttgctgctgcttatgttctgttgtttttaggatggagctggttgttattcaccaactaagggaacagttagagcagagatgaagaaattatgaactgttatccttattttgagccttttcctcctaaccctcatcagttaaggttaggaagaacaagatgccataatgcctatgaagacttctttaacaatcttgtttgggtttttttctaggtatattattagtgttttatggtctatgttctttaagcaataaataaattgttcctttt

SEQ ID NO: 67948 - DNA, 2104 bp, Homo sapiens
atttgttcatcaaattacatcatgtaatttggattgactttggaaaatctacacatattggagaggagctaaggtaacgtctagaaataattaagttatgtcaaataaggtattgtctaactgtacacacatcattctagtgaggattatgggcaagatcttgtataatttagccagtactaccagaagtggtcaggagagggagcaagaggagtttttagtgatggttttctttttgctttcatgaactcaaaatcaagacatgagtgaaagccaggatgaagttcctgatgaagttgagaaccagtttatattgcgtctgcctctggaacatgcttgtactgtcaggaacctagcacgttctcaaagtgtcaagatgaaggataaactaaaaattgacttattgcctgatgggcgccatgcagttgttgaagtagaagatgtcccactagctgctaagctggttgacttgccttgtgttattgaaagcctgagaacgcttgataaaaaaaccttttataaaacagcagacatttctcagatgcttgtgtgcactgctgatggtgatatccacctttctccagaagaaccagctgcctctactgatcctaatatagtcaggaaaaaagaaagggggagagaagaaaaatgtgtctggaagcatggcattacgccaccacttaagaatgtcagaaagaaaaggttccggaaaacacaaaaaaaggtccctgatgtcaaagaaatggaaaaaagcagctttactgagtacattgaatctccagacgtggaaaatgaagtaaagagactgctgcgttcggatgctgaagccgtaagtacccgttgggaagtcattgctgaagatggaaccaaggaaatagaaagtcaaggctccatcccaggatttttgatatcctcgggaatgagcagccacaagcagggtcatacctcgtcagtcatggaaattcagaagcagattgagaaaaaggagaaaaagctccataagattcagaataaagcacaaagacagaaggatctcatcatgaaagtggaaaacctgacactcaagaatcattttcagtctgtgctggagcagcttgagttacaggaaaaacaaaaaaatgagaagctcatttccctacaggaacagttgcagcgttttctgaagaagtgaggagagccattggcgtggcccacaaaccttggattcaccatccagactgcagattggatgaaactgtgcacgtttttgtcccttcagttgccttatgttgaatcagttatatttatctgtaccttctttgctacttaaaatatgctcacagtttgtagtcatgtagaaaaggccagtataaaaatgtagtagacttaaagaccccactcgaccatgagactttctctttgtcaatttgggaattattattattaatttagaaatggggtcttgttatgttgcccaggctgaattcagactcctgggcttaagggatccttccgcctcagcctcctgagtagctgggactacagttgtgcaccaccacaccaaacaagaattgattatattgcttctgtgctatggtaccagcagattattcagccatgcttctaaaggcagtctagcctagaggccgtacagctgtttggtttgcatatgttttagcttttcttttggtttttagtatttcctaaaacataggggaaaaaacgaggtcatttctactaagcactaggacctgccatagtgagtttaagtgcctaccttgcagcagttaatactagattgtgttctgtctctgttcaggtaacaggactgcattcctgctcaaggatgattccttgctgctgcttatgttctgttgtttttaggatggagctggttgttattcaccaactaagggaacagttagagcagagatgaagaaattatgaactgttatccttattttgagccttttcctcctaaccctcatcagttaaggttaggaagaacaagatgccataatgcctatgaagacttctttaacaatcttgtttgggtttttttctaggtatattattagtgttttatggtctatgttctttaagcaataaataaattgttcctttt

SEQ ID NO: 67949 - DNA, 901 bp, Homo sapiens
  misc_feature (2)..(3): n is a, c, g, or t
cnngcgttcgcctctacgttccgcgcgggagcccacgcgcggttcgtccggaacccacagaccagagacgcaggtcccagccttttcggtgtcggcgccagttcccggaggagcggacatgagtgaaagccaggatgaagttcctgatgaagttgagaaccagtttatattgcgtctgcctctggaacatgcttgtactgtcaggaacctagcacgttctcaaagtgtcaagatgaaggataaactaaaaattgacttattgcctgatgggcgccatgcagttgttgaagtagaagatgtcccactagctgctaagctggttgacttgccttgtgttattgaaagcctgagaacgcttgataaaaaaaccttttataaaacagcagacatttctcagatgcttgtgtgcactgctgatggtgatatccacctttctccagaagaaccagctgcctctactgatcctaatatagtcaggaaaaaagaaagggggagagaagaaaaatgtgtctggaagcatggcattacgccaccacttaagaatgtcagaaagaaaaggttccggaaaacacaaaaaaaggtccctgatgtcaaagaaatggaaaaaagcagctttactgagtacattgaatctccagacgtggaaaatgaagtaaagagactgctgcgttcggatgctgaagccgtaagtacccgttgggaagtcattgctgaagatggaaccaaggaaatagaaagtcaaggctccatcccaggatttttgatatcctcgggaatgagcagccacaagcagggtcatacctcgtcaggtactttagtaaaggcaaagcaggagtttcagatagggcaggtattgactgggtatcagatcattttccataaattcataggccaatccaaa

SEQ ID NO: 67950 - DNA, 345 bp, Homo sapiens
ctctttcctccccttttatttttaaaataataaataataattttacatattcatgggatacatagtgatattttaatactgtatacaatgtataacaatcaaaccagatatgcattatctcaaaaatttattatttgtgttgtgaacatttaaaatcctttcttctagacttttgacagtatacaataaattatagttagccatattcatcctacagtgctccagaacaccagaactcattcctcctatctagctataattttgtatccattaaccaatccctgcccatcctaagaagcacaatgttaaattgtgctgttaaattattaattacttaattctatc

SEQ ID NO: 67951 - DNA, 750 bp, Homo sapiens
agattgttaaagacaaagcaggacctcataaggaaatctacccccatgtcatcaggaacttagaccaactttaaatgtactgggaatctccactccggaggaactggccttgacaaagtgtaaaccgcatggatgggcttccccaaggatttattgacattgctacttgagtgtgaacagttacctggaaatactgatgataacatattaccttatttgaacaagttttcctttattgagtaccaagccatgtaatggtaacttggactttaataaaagggaaatgagtttgaactgaaattaggtatttgtttcatgtgtttgcattaataagcagaaaattaagtgctgtattggtttcatggttttgctgccctcttacatgctgagagaactgtgttaattctctggaaaccatctgacatgaaaatcagcttcattaatatgtttgggtgccctagcttgtaaattagctgaaggctagaagtcatttatatagaattttcttgttgacaccctaggcttaggggactggttgtctgtggggatagatcaaatcgtgtacctttccaaaacaggttttaatgatgtttaaaagtggtcactgagatagtcttgaggatgtgctatgcagtagccaagccctcttacggtgtgttcctctcttagtgcccctttcctttcctacctattcttcccttgcagtggtgtattagccttggacattaaaacatttgctttgtaaaaaaa

SEQ ID NO: 67952 - DNA, 300 bp, Homo sapiens
agattgttaaagacaaagcaggacctcataaggaaatctacccccatgtcatcaggaacttagaccaactttaaatgtactgggaatctccactccggaggaactggccttgacaaagtgtaaaccgcatggatgggcttccccaaggatttattgacattgctacttgagtgtgaacagttacctggaaatactgatgataacatattaccttatttgaacaagttttcctttattgagtaccaagccatgtaatggtaacttggactttaataaaagggaaatgagtttgaactgaaa

SEQ ID NO: 67953 - DNA, 262 bp, Homo sapiens
agatgattctgtgagccgtcacaaggaatgaaagcctccagacaacagctgcatgagacagttagaaagaggaccctctagcacctgtcaagtctctagatggcaaaacctgagccagaaccacccagctaagcttctcccaggttcttggctcacaattgctgcgatattaccttatttgaacaagttttcctttattgagtaccaagccatgtaatggtaacttggactttaataaaagggaaatgagtttgaactgaaa

SEQ ID NO: 67954 - DNA, 806 bp, Homo sapiens
atcagcaacagaaaaccaagccagatggactttgcaactaatcaagtttgggatttactgtcttctgaccaaccacagtgactgagatggggctgggaccagaagcccagtgggagtgaacagccgagggaaccagagtctggctgagcttgtggccagatatttaaactgggtccagccacacctgcaaaaccagggcaaggcagtaccgggaaactggctggagttgctgcggtttggggaagttgcacaccctttcatagatacctcccttaaccctcagtgcagattctgagaaaactccaaggcttctctgcctaacctagtataacccctgttccctactacatacatataacttttccattcccccagtaattgacccaaagtccctgcctctagctgtgcccattgtgcaatgatcagaatcccttgtttcaatagtattttgacttctttaagaatactctgtatttggaagctgaaacctcacttggatccattgttgggaaccaagtacggagccttacatagcccggaggagtttcaggagcaatgccactttcccttccatccctccctctgggtactggctcttcccatagtccattttccccttttatctcccattaatttctgtcttcctctctcaccttttccatgtctctagcatcctccaggatttaaaatcatctttacccaacttatctgtgaagtaatggcaaaagaacatctccaaattaagtactccttttcttcaaaggagtttcatgggatgtacagctagtataaaataaaaatatggg

SEQ ID NO: 67955 - DNA, 1776 bp, Homo sapiens
ccaccctggccccccagccagtccagcaatgatggaaaaaaacacctccgagggccctgcctgcagtccagaggagaccgcatctgaatctgccaaggtgcccacagcagagcctcccggagaagtggcagtatcagagtccaccagagaagagcaggtgcccaagccgcacggccctgccccacaggcccctacagcctccacagccactaagcctgcacccccaagtgaagatgtccccagtgccccactgctgctgaccctggatgatgtgagcagcagctctgtgactgtgagctgggagcccccagagaggctggggaggctgggcctccagggctatgtgctggagctctgcagagagggagcctcggagtgggtgcctgtgagtgcccggcccatgatggtgacccagcagactgtgcggaacctggctctgggagacaagttcctcctgcgcgtgtctgcagtgagttctgcaggggctggcccgccggccatgctggaccagcccatccacatccgagagaacattgaggcccccaagatccgtgtcccccgccacctccgtcagacctacatccgccaggtgggagagacggtcaacctgcaaatccccttccaggggaagcctaagcctcaggccacatggacccacaacggccatgccctggacagccagcgggtgagcatgcgcaccggggaccaggactccatcctcttcattcgctcggcccagcgctccgactctggccgctacgagctcactgtgcgcgtggaagacctggaggccaaggcagtcattgacatcctggtgattgagaaacctggaccccccagcagcatcaggctcctggacgtctggggctgcaatgctgctcttcagtggacgccaccccaggacacaggcaacacagagctcctgggctacatggtgcagaaggcagacaaaaagacagggcaatggttcacagtgctggagcgctaccacccaaccacctgcaccatctctgacctcatcatcggcaactcgtactccttccgggtcttctcagaaaacctgtgtggactcagcacctcggccaccgtcaccaaggagctcgcccacatccagaaggcagatattgctgccaaacctaaagggtttattgagcgagacttctcagaagccccctcattcacccagcccctggctgaccacacctccacccctggctacagcacccagttgttctgcagtgtcgagcttcacccaagcccaagatcatctggatgaaaaacaagatggagatccagggcaaccccaaataccgcgccctctctgagcaaggcgtctgcaccctagagatccggaaacccagcccctttgattctggggtctacacctgcaaggccataaatgtgctgggggaggcatctgtggactgccggctggaggtcaaagcctcagccgcacactgaagagtcacgggaggaggctgtgatgaggagccaggtgctgcaggcctgaggggccaggtccaccaggcctacagtcaaactccagagatgcccaagacccccgcttccatagcgacggctgatggaaccgcccctggtacctgctggcctcccttccccagaggctggtgtccagaactcaggaatgggcctggtaggccccaggccagactaactgggctcaaggggtgctggaaggcgcagagattggagtgccctgcggagttgcacactgggtgggaagcactcaaataaagatgcgtggtgttaacagtg

SEQ ID NO: 67956 - DNA, 507 bp, Homo sapiens
gataacaacctttccctgccttccttcccctggtggttctgaggctctgcataagtacggaagtatctagaactgcagtgggcagagctcagacctgggcattgcacctgagggagggaggcctggtgaggaagaggatgctgctccccctccccactctgcacctctctggcctgcagccgagctctgctcacaccaggggctcaggaagcatgtcctcctccaggtgctgcaggcctgaggggccaggtccaccaggcctacagtcaaactccagagatgcccaagacccccgcttccatagcgacggctgatggaaccgcccctggtacctgctggcctcccttccccagaggctggtgtccagaactcaggaatgggcctggtaggccccaggccagactaactgggctcaaggggtgctggaaggcgcagagattggagtgccctgcggagttgcacactgggtgggaagcactcaaataaagatgcgtggtgttaacagtg

SEQ ID NO: 67957 - DNA, 949 bp, Homo sapiens
ccaccctggccccccagccagtccagcaatgatggaaaaaaacacctccgagggccctgcctgcagtccagaggagaccgcatctgaatctgccaaggtgcccacagcagagcctcccggagaagtggcagtatcagagtccaccagagaagagcaggtgcccaagccgcacggccctgccccacaggcccctacagcctccacagccactaagcctgcacccccaagtgaagatgtccccagtgccccactgctgctgaccctggatgatgtgagcagcagctctgtgactgtgagctgggagcccccagagaggctggggaggctgggcctccagggctatgtgctggagctctgcagagagggagcctcggagtgggtgcctgtgagtgcccggcccatgatggtgacccagcagactgtgcggaaccccaagatcatctggatgaaaaacaagatggagatccagggcaaccccaaataccgcgccctctctgagcaaggcgtctgcaccctagagatccggaaacccagcccctttgattctggggtctacacctgcaaggccataaatgtgctgggggaggcatctgtggactgccggctggaggtcaaagcctcagccgcacactgaagagtcacgggaggaggctgtgatgaggagccaggtgctgcaggcctgaggggccaggtccaccaggcctacagtcaaactccagagatgcccaagacccccgcttccatagcgacggctgatggaaccgcccctggtacctgctggcctcccttccccagaggctggtgtccagaactcaggaatgggcctggtaggccccaggccagactaactgggctcaaggggtgctggaaggcgcagagattggagtgccctgcggagttgcacactgggtgggaagcactcaaataaagatgcgtggtgttaacagtg

SEQ ID NO: 67958 - DNA, 313 bp, Homo sapiens
gacagcttaaaatcaaggccgaagagaaggggtggtaagactggggtcaggctgtgctgattactttccaagcggcagggtggacaggtgtagaagagggtgtataaccgtgaactttccagttccccgccacttcccccaagctataactgcagctctaattcagcctcagccgcacactgaagagtcacgggaggaggctgtgatgaggagccaggtaaatggcctgacccacccactctgttacctctgtgggcagcacagaagcagagaggaggccaggagcagggggttagggttttaagggaagggg

SEQ ID NO: 67959 - DNA, 409 bp, Homo sapiens
ctgggcattgcacctgagggagggaggcctggtgaggaagaggatgctgctccccctccccactctgcacctctctggcctgcagccgagctctgctcacaccaggggctcaggaagcatgtcctcctccaggtgctgcaggcctgaggggccaggtccaccaggcctacagtcaaactccagagatgcccaagacccccgcttccatagcgacggctgatggaaccgcccctggtacctgctggcctcccttccccagaggctggtgtccagaactcaggaatgggcctggtaggccccaggccagactaactgggctcaaggggtgctggaaggcgcagagattggagtgccctgcggagttgcacactgggtgggaagcactcaaataaagatgcgtggtgttaac

SEQ ID NO: 67960 - DNA, 1872 bp, Homo sapiens
ccaccctggccccccagccagtccagcaatgatggaaaaaaacacctccgagggccctgcctgcagtccagaggagaccgcatctgaatctgccaaggtgcccacagcagagcctcccggagaagtggcagtatcagagtccaccagagaagagcaggtgcccaagccgcacggccctgccccacaggcccctacagcctccacagccactaagcctgcacccccaagtgaagatgtccccagtgccccactgctgctgaccctggatgatgtgagcagcagctctgtgactgtgagctgggagcccccagagaggctggggaggctgggcctccagggctatgtgctggagctctgcagagagggagcctcggagtgggtgcctgtgagtgcccggcccatgatggtgacccagcagactgtgcggaacctggctctgggagacaagttcctcctgcgcgtgtctgcagtgagttctgcaggggctggcccgccggccatgctggaccagcccatccacatccgagagaacattgaggcccccaagatccgtgtcccccgccacctccgtcagacctacatccgccaggtgggagagacggtcaacctgcaaatccccttccaggggaagcctaagcctcaggccacatggacccacaacggccatgccctggacagccagcgggtgagcatgcgcaccggggaccaggactccatcctcttcattcgctcggcccagcgctccgactctggccgctacgagctcactgtgcgcgtggaagacctggaggccaaggcagtcattgacatcctggtgattgagaaacctggaccccccagcagcatcaggctcctggacgtctggggctgcaatgctgctcttcagtggacgccaccccaggacacaggcaacacagagctcctgggctacatggtgcagaaggcagacaaaaagacagggcaatggttcacagtgctggagcgctaccacccaaccacctgcaccatctctgacctcatcatcggcaactcgtactccttccgggtcttctcagaaaacctgtgtggactcagcacctcggccaccgtcaccaaggagctcgcccacatccagaaggcagatattgctgccaaacctaaagggtttattgagcgagacttctcagaagccccctcattcacccagcccctggctgaccacacctccacccctggctacagcacccagttgttctgcagtgtcgagcttcacccaagcccaagatcatctggatgaaaaacaagatggagatccagggcaaccccaaataccgcgccctctctgagcaaggcgtctgcaccctagagatccggaaacccagcccctttgattctggggtctacacctgcaaggccataaatgtgctgggggaggcatctgtggactgccggctggaggtcaaagcctcagccgcacactgaagagtcacgggaggaggctgtgatgaggagccaggtgctgcaggcctgaggggccaggtccaccaggcctacagtcaaactccagagatgcccaagacccctggctacagcacccagttgttctgcagtgtccgagcttcacccaagcccaagatcatctggatgaaaaacaagatggagatccagggcaaccccaaataccgcgccctctctgagcaaggcgtctgcaccctagagatccggaaacccttccccagaggctggtgtccagaactcaggaatgggcctggtaggccccaggccagactaactgggctcaaggggtgctggaaggcgcagagattggagtgccctgcggagttgcacactgggtgggaagcactcaaataaagatgcgtggtgttaacagtg

SEQ ID NO: 67961 - DNA, 325 bp, Homo sapiens
  misc_feature (38)..(38): n is a, c, g, or t
  misc_feature (127)..(127): n is a, c, g, or t
tggggagcctgaggcatgagaatcgcttgagccctggnggtggaggttgcagtgagctgagaccccgtcactgaactccagcctgggtgacagagcaagactctgtatcaaaaaaacaaacaaacanacaaacaaaaaagcctattataaaacaataggaaatgcctgaagtctagtgcaccaagacatactgaatttcaaactaaataaattaaaattaccatgtacattccactacatgtcaaaacaggaaaaaccatagtattatagttgatatgaaatgaagattacatacaacagtaatacagagaaaacatgaagctgc

SEQ ID NO: 67962 - DNA, 281 bp, Homo sapiens
gtaaaatgtaaaatatgtacacaaataaattaaatagtgtaataataaataaacctgtatgttactcatttctaaaatagcttttataacaatgaacaaatggcaaccttggttggtatatacatttacctacttcctacattcttaatcttaaaaaaaatatgttatttataaaaatttaataattattctaaattgattaccaactggcttccattgttagaaaggcaaacctttcagccaactacataactttcagagtcaattaaatttacagaaag

SEQ ID NO: 67963 - DNA, 4629 bp, Homo sapiens
tcacttgcctgatatttccagtgtcagagggacacagccaacgtggggtcccttctaggctgacagccgctctccagccactgccgcgagcccgtctgctcccgccctgcccgtgcactctccgcagccgccctccgccaagccccagcgcccgctcccatcgccgatgaccgcggggaggaggatggagatgctctgtgccggcagggtccctgcgctgctgctctgcctgggtttccatcttctacaggcagtcctcagtacaactgtgattccatcatgtatcccaggagagtccagtgataactgcacagctttagttcagacagaagacaatccacgtgtggctcaagtgtcaataacaaagtgtagctctgacatgaatggctattgtttgcatggacagtgcatctatctggtggacatgagtcaaaactactgcaggtgtgaagtgggttatactggtgtccgatgtgaacacttctttttaaccgtccaccaacctttaagcaaagagtatgtggctttgaccgtgattcttattattttgtttcttatcacagtcgtcggttccacatattatttctgcagatggtacagaaatcgaaaaagtaaagaaccaaagaaggaatatgagagagttacctcaggggatccagagttgccgcaagtctgaatggcgccatcaaacttatgggcagggataacagtgtgcctggttaatattaatattcccattttattaataatatttatgttgggtcaagtgttaggtcaataacactgtattttaatgtacttgaaaaatgtttttatttttgttttatttttgacagactatttgctaatgtataatgtgcagaaaatatttaatatcaaaagaaaattgatatttttatacaagtaatttcctgagctaaatgcttcattgaaagcttcaaagtttatatgcctggtgcacagtgcttagaagtaagcaattcccaggtcatagctcaagaattgttagcaaatgacagatttctgtaagcctatatatatagtcaaatcgatttagtaagtatgttttttatgttcctcaaatcagtgataattggtttgactgtaccatggtttgatatgtagttggcaccatggtatcatatattaaaacaataatgcaattagaatttgggagaagcaaatataggtcctgtgttaaacactacacatttgaaacaagctaaccctggggagtctatggtctcttcactcaggtctcagctataattctgttatatgaggggcagtggacagttccctatgccaactcacgactcctacaggtactagtcactcatctaccagattctgcctatgtaaaatgaattgaaaaacaattttctgtaatcttttatttaagtagtgggcatttcatagcttcacaatgttccttttttgtatattacaacatttatgtgaggtaattattgctcaacagacaattagaaaaaagtccacacttgaagcctaaatttgtgctttttaagaatatttttagactatttctttttataggggctttgctgaattctaacattaaatcacagcccaaaatttgatggactaattattattttaaaatatatgaagacaataattctacatgttgtcttaagatggaaatacagttatttcatcttttattcaaggaagttttaactttaatacagctcagtaaatggcttcttctagaatgtaaagttatgtatttaaagttgtatcttgacacaggaaatgggaaaaaacttaaaaattaatatggtgtatttttccaaatgaaaaatctcaattgaaagcttttaaaatgtagaaacttaaacacaccttcctgtggaggctgagatgaaaactagggctcattttcctgacatttgtttattttttggaagagacaaagatttcttctgcactctgagcccataggtctcagagagttaataggagtatttttgggctattgcataaggagccactgctgccaccacttttggattttatgggaggctccttcatcgaatgctaaacctttgagtagagtctccctggatcacataccaggtcagggaggatctgttcttcctctacgtttatcctggcatgtgctagggtaaacgaaggcataataagccatggctgacctctggagcaccaggtgccaggacttgtctccatgtgtatccatgcattatataccctggtgcaatcacacgactgtcatctaaagtcctggccctggcccttactattaggaaaataaacagacaaaaacaagtaaatatatatggtcctatacatattgtatatatattcatatacaaacatgtatgtatacatgaccttaatggatcatagaattgcagtcatttggtgctctgctaaccatttatataaaacttaaaaacaagagaaaagaaaaatcaattagatctaaacagttatttctgtttcctatttaatatagctgaagtcaaaatatgtaagaacacattttaaatactctacttacagttggccctctgtggttagttccacatctgtggattcaaccaaccaaggacggaaaatgcttaaaaaataatacaacaacaacaaaaaatacattataacaactatttacttttttttttttctttttgagatggagtctcgctctgttgcccaggttggagtgcagtggcacgatctcggctcactgcaacctcacctcccgggttcaagagatcctcctgcctcagcctcctgagcagctgggactacaggcgcatgccaccatgcccagctaatttttgtatttttagtagaggcggggtttcaccatgttggccaggatggtctcaatctcctaaccttgagatccaccctccacagcctcccaaactgctgggattacaggcgtgagccaccgcacgtagcatttacattaggtattacaagtaatgtaaagatgatttaagtatacaggaggatgtgaataggttatatgcaagcactatgcccttttatataagtgacttgaacatctgtgcccgattttagtatgtgcaggggggcgatctgggaatcagtcccctgtggataccaaggtacaactgtatttattaacgcttactagatgtgaggagagtctgaatattttcagtgatcttggctgtttcaaaaaaatctattgacttttcaataaatcagctgcaatccatttatttcatttacaaaagatttattgtaagcctctcaatcttggtttttcagttgatcttaagcatgtcaattcataaaaacaagtcatttttgtatttttcatctttaagaatgcttaaaaaagctaatccctaaaatagttagatctttgtaaatgcatattaaataataaagtatgacccacattactttttatgggtgaaaataagacaaaaataatagttttagtgaggatggtgctgagtaaacataaaaactgatttgctctcagctgatgtgtcctgtacacagtgggaagattttagttcacacttagtctaactcccccattttacagatttctcactatatatatttctagaaggggctatgcatattcaatgtattgagaaccaaagcaaccacaaatgcataaatgcataatttatggtcttcaaccaaggccacataataacccagttaacttactctttaaccaggaatattaagttctataactagtactcaaggtttaaccttaaaattaagatttccttaaccttaaccttaaaattgatattatattaaacatacataatacaatgtaactccactgttctcctgaatattttttgctctaatctctctgccgaaagtcaaagtgatgggagaattggtatactggtatgactacgtcttaagtcagatttttatttatgagtctttgagactaaattcaatcaccaccaggtatcaaatcaacttttatgcagcaaatatatgattctagtgtctgacttttgttaaattcagtaatgcagtttttaaaaacctgtatctgacccactttgtaatttttgctccaatatccattctgtagacttttgaaaaaaaagtttttaatttgatgcccaatatattctgaccgttaaaaaattcttgttcatatgggagaagggggagtaatgacttgtacaaacagtatttctggtgtatattttaatgtttttaaaaagagtaatttcatttaaatatctgttattcaaatttgatgatgttaaatgtaatataatgtattttctttttattttgcactctgtaattgcactttttaagtttgaagagccattttggtaaacggtttttattaaagatgctatggaacataaagttgtattgcatgcaatttaaagtaacttatttgactatgaatattatcggattactgaattgtatcaatttgtttgtgttcaatatcagctttgataattgtgtaccttaagatattgaaggagaaaatagataatttacaagatattattaatttttatttatttttcttgggaattgaaaaaaattgaaataaataaaaatgcattgaacatcttgcattcaaaatcttcactgaca

SEQ ID NO: 67964 - DNA, 446 bp, Homo sapiens
caaccaccttcttcccccacaactcccacccaaaggcagggatttttgactttttttgccctctgctttatattcagtgcctaaaacaggccttgcacacagttggccactaactgaatacatactgaaagaatggtttcctgtgtcatcttagctaggcaagagtgcctggtaatttaatggaacactgatctaggcattactgcgatggcatttgttacatgtgattcatatctacagtaaggtgactttcagaaaggacattgctcttgaccaggctccatggctggctcacgcctgcaatcccagcactttgggaggcagaggtgggcggatcacctgaggtcaggagttcaagactagcctggccaacatggtgaaaccccatctctactaaaaatacaaaaattaactgggcatggtagtgggcatctgtagtcccagct

SEQ ID NO: 67965 - DNA, 2093 bp, Homo sapiens
  misc_feature (1)..(1): n is a, c, g, or t
  misc_feature (1022)..(1022): n is a, c, g, or t
  misc_feature (1160)..(1160): n is a, c, g, or t
  misc_feature (1294)..(1294): n is a, c, g, or t
  misc_feature (1951)..(1951): n is a, c, g, or t
nggtgtcatggggacactttcatggactcctcacttcaggaccctcttactgggtttctcacacccctttcatagtttatcttttcgccgcttttctgtaatcatatcagagactgatgattgttggtgactgcttttgttgctgtgattagaatcacagagcagaagaagcaccactaaccagtggaagcatctcagtgcagagcacagaagtatgactgcaatatacacgaaatagaactagaatgcctagttctgtaagtatatcacacactaggacacaggtatgtgtgagaaccccgcattatgaagatcagccattagaaaaccactgtgtaaaaggatccactcaagataagagcagctgccatttggagaaattgaaaaaggtatgaaatcagaaagtcagatcacagaagagaatatatgtttacttccaaatttaaattttaaaagtgtgatggctatattaaaagtgcaatttacttaactgtcctgcttaaagctttggggtaattgtctaggtggatcttaagtgtatttctcagttcaaacaagcaatagtttcccaggtgaattgagaagggatcagaacctaaggtcagggagattcattctgaaaaaaaagattcatatgtgggaaacacccctatttttttcccactgggacacaggggtgcacacctggtcatctctaagtggcagtaacacatatgaagcagacccttgtggtactgaaatgtattaacccaaagacctgtcaccacatactcgagcatccagactgaaatacttagagagatcagcttccaacagaattaaaaggtagatcccaaggatccattttgagcaccttttttcagcctttagttttaactggaaatgtagggactgtgagttactgtctcatattttgaaatgaaggtcttttgtttgaggaatttgcatttcatcgtagaaaccacgttcttggtttagttactttctaccaaaggaagttcttcctgtgttttgcaagtagnatgaagaacctaacagactccaatttaaaaagaatatcagagatatataattacactggtttaaaagaaatggggaatctaatttcagattgccacatgatgagagctgttgaagtcgttatcacggtatctgagttngtcacctagatcacatataatagattctcaaatagattttaaatcagttataatagtaattaagactttgttgagcatcccaagtaaagacaggatacttcatatttcgtatgagttaaaatcttaatattaanaaaatgtatataacttgtcttaagacctagaaaaaagcattgttgacatatttaggcctgtaataaaataaagccacttctttgtaggttattttgaagatgcatgttacctagaagttttcataagccaagccttagcctcacagcactttactttcatgaaaaagatttaaaagaattaagaaattgtaaggacttctagagaggtgcatgccttattttctaagccattaaaggtatacaattctatgattcacaggcaaagaaacccaaagtagtttatatatttattaggaaaatacctgggacatatttacataaagagggatggaaaatgtgtgacaaatttgacatttaaaaaaattaagatttacattgtaatgacagcagtgattcaggttgtaaagattgatttacagtggattaaaattctgcttagatagtctttatctagaaccaggaaattcaactttcagaaagtcattttctgattcctatttagggagaagtaagatgaaccaaaaaaaatatgtggtaacccaaaacagtaacaaaagaaacctccttggtgacctaaataactgtatatgaaaataataatgtcatctgatatggaaacatgtaaccgaaaactttaaaatcaacaagtgaagacanatagtacccatgaataatgtttaatgctgtggttttttgtggatttttttctgtcactaaaatggaatatttttctcactgctgcactctcttgtcatctagctctgccaaatttttggctattaaatctctgaatcaactc

SEQ ID NO: 67966 - DNA, 444 bp, Homo sapiens
gtcccatctgcccctttctgggcttagcaaagtcagggctgctgaccccatccctcctagggagccaattgatggcgcagagcacaaggtagccaggagacaaaaggttctggaaggaaggccaaggacactggcatggagcaggctggcagtgccctcagctgctggaggagtgagagcccagactgcctgtgtggccgtcatgagggtcttcacaagctgaccaggacccttcagcaggtccaaacttgtatgaagctacacaagcagccactcctgctgcccccaggaggatactacccccaggttgagaacaaagccttcaaaaacaggaactgcatcttctccctcttcatatttctctgcagaactccgcacacagtatgtccttaataaatcccagctggagggagccccacctcaggcttttcagaaacacagcag

SEQ ID NO: 67967 - DNA, 1225 bp, Homo sapiens
  misc_feature (76)..(76): n is a, c, g, or t
ctccagccctcattcttcatgcctcatttgcctgggagacgttcgccacttctcttgtgccttgcggtccgttccntcataatgaatggatccaatatggcaaatacatcaccgagtgtaaaatccaaagaggaccaggggttaagtgggcacgatgaaaaggaaaacccatttgcagagtacatgtggatggagaatgaagaggatttcaacagacaggtggaggaggaactgcaggagcaagacttcttggaccgctgcttccaagagatgctggatgaagaagaccaagactggtttattccatcacgagacctgcctcaggccatgggacagttgcaacagcagttaaatggactgtcagtcagtgaaggtcatgattctgaagatattttgagcaaaagtaacctgaacccagatgccaaggagtttattccaggagagaagtactgagccgagaaagctttgaggaagacttgtctgtccccacatctggggatagtaatgcacaaaatggtggagctgaagagggggatggggcgggcgaggggtgcacagcgggaaggggagtggtggtctcacgatactgtgactctgagtaactaatatgctcagtcttattctaaaaaaaaagacaagcaacacataaacaacgacaaaagtagaacacaaaagaacagaacgcagaacagaaaagaacgaagacaaaagcacgccaacagaagagaacacagagagaaagaggagtcagcaaaaacgaccaaacacgtagagaagagagtaacaagagcgacgcggacaaaaacagagagacgcagaagaaactgcaacaaaccaacgaccgaaagacgacagagggacgaaaccacaccgactgacagacacacccaatccaggagggccggcgatcccaagacgacggagacaacaagaaaaggggtcgagcggagaagaagcagaaaccgcggggacgcgcaaccgagacacgcaacaaccggagggagcgcagagaagaagaaaccaaagacatacggagaagaacaacacaaccgagaccaagactgaacacgcgtgctaaacaagcataaacgcaacgaagacaaaacaacagaaaaaacagaacggacaagacaaaccaaggaagacaagcaggcaagcgcagaaacaaaagaaaacagacacgacacacgacacgaccacagaccaatgggacagaaagccaaaa

SEQ ID NO: 67968 - DNA, 6201 bp, Homo sapiens
  misc_feature (76)..(76): n is a, c, g, or t
ctccagccctcattcttcatgcctcatttgcctgggagacgttcgccacttctcttgtgccttgcggtccgttccntcataatgaatggatccaatatggcaaatacatcaccgagtgtaaaatccaaagaggaccaggggttaagtgggcacgatgaaaaggaaaacccatttgcagagtacatgtggatggagaatgaagaggatttcaacagacaggtggaggaggaactgcaggagcaagacttcttggaccgctgcttccaagagatgctggatgaagaagaccaagactggtttattccatcacgagacctgcctcaggccatgggacagttgcaacagcagttaaatggactgtcagtcagtgaaggtcatgattctgaagatattttgagcaaaagtaacctgaacccagatgccaaggagtttattccaggagagaagtactgagccgagaaagctttgaggaagacttgtctgtccccacatctggggatagtaatgcacaaaatggtggagctgaagagggggatggggcgggcgaggggtgcacagcgggaaggggagtggtggtctcacgatactgtgactctgagtaactaatatgctcagtcttattctaagcctctgagtatttctattttgttctgctgacttttgtttggggagtttcctgttttgtttttttaaatagctctttcgagttaaggaaattgcattttccccccttcatcagaagtgttccgcggtgtgtatttaaacaaaataagctgactaagaaaaactggatatttaggaaatgcccctctcaccctgctgtatacttatcagggacagtgagcacctggagagctttttgtggaatctattgagttggatgggaaaagggacaagcagaaagagcaggtggtgcaaactggaatttgaggctcagctgccccacccccggggtctcctgcaatgaactcggataaccaatgtgctgtcaagcccttgcctgtttgtcctgaaccccattcaagaaaacacagacttaaagtacttagtttacagtaacttttgatgattgttgaaagttgtaaatcagaaggtagggctgtgatggtggttgtcacttgagtcatttagttactgttgtcctgttcataagcctgtgttcaccaccaccatcagactcaccatttataagtagaagagcactagggttgatctgccacctcatctttcatgaagtctattccccagcctcctttttaagaaaagatactgctaccaaaggcataggggaggcctgctgtgctggcaattagcatgagcctgcagaagtcatccttgaatctgttgtgtcttaattttatttggacagtttttttttccagcctcatcaacacttggtcttcctggtgtcttaattccctcagacaagtttatgcacttttttaaggaaatatttttcaggacactagtaagaagctcagttcacagtttggatatttcttcccacattacagaattatggaaaggaactcaaaatcagcctaggaaagtgagtcctgcttgacccatgtgactgtgtacctgaccttctgggatcttttcagctattaaaacattttactgttcccacatacccagctttgcaagttttgtagattgacctcttagggtgtgtttctttgtctttcctgcctttaacttgctggggtcttttgttgctacccctaaggaactaaactgggtgccaggagctaccttcgtgtatagagatgtagatggcagtgtggggtacaggagagccatccaggccattctcccagggatgaggaattggagagccctgaagataatagtggcttctttctgattgctactgtgctgtgtgataggcctaatagggaaaagatatgtaacttgaaacaaagttggtataaattcagtatgtggctgtgggacagaggttggaaggaaaggactagggtatggaaagctgaagaaattctccttatgagctctcgttgactttttgaacagtgataagctaatgccagatttaaaatacacattttttcctatttgagtctttaggattatatcatttgaaaaaattgccttccttgttaggtcacatgtcataggagagtagcttagagaacttgcattaccagacagacacattaattcccaaagcctctatgttgagagaatgaaactgttaactctttttcagagaggactatgaataaagaaacttctttattcaagcttcagctttcagctgggttgtttcctctaaaagggaaagggcattgcaagtgcatagaggaaatctctcccttctgggactgcttttcctccttcatcctcgtgagcctgtccaagctcagaattccgaaggctgttagaaatgcgttgggattgcagagagaaaggagcttgtctttccttctgctgtgctggtctgttttggatgtcagtcttcaggactatgaaaacttcctgccagtttagcatggacactgagggctggcatttctagtcttcttcagacactgaacatactgactccaggtataggaagcagctagcaaattgattcttttttaaatgcataggactctgcttccggcggttcctcttgtagtccaactctttttgccatctatttatgttgggaggtaggggcacaattgtcactcacaacacaggctagttagagtttgctaccttcttagcagaaaatgcatgtgtgtcttgttggaccttcactggggaaaggctgggagcctctggctgtcagtgacttttctcacagaagaagaaccagcaagccagactggacacctttaccctttaatggtaagacttgtatttataaggggtaattttgatgttgaatttaagccactactttgtttaaacttttttaaattggcaactagaagtttgagaatttgtatagaaatggaacatgtatttctaacagttgccaatctggctggtcccaatgttagtttattagtgattgatctgtaattattgggattatttattcaactctaaaattccaagatgaaaataatttatctctttcttttcaagggaaaaaacccaaatgaatgcattttcagtttctccaggcctttgaactgcagcagaaaattcaaggatacagcctaggcctgggcaaatgcagccctgggtctttgggccagtttctgacaataatagttgagttttgggaatcacataagggtgaaaccagaaacgatcctaaggaaaggcttgacctttgttaacacctttagtttccaaagtcacagcagctggggtccctcttttttttttttttttctttttttttgagacatagtctcactctgtcacccaggctggagtgcagtggtatgaccatagctcactgcagcatcaaattcctaggctcaagcaatcctcccatcttagcctcccgagtagctgggacaacaggtacgcaccaccacggccagctaattatttttattatttttattttttgtagagactggatcttgctctatttcccaagctactcttgaattgttgtgctcaagtgattctcccatctcagcctcccaaagtgctgggattataggctgggtgtggtgagccaccccagcctggggtctctttaattaaggttataatgctaaccatggcttaaaatactaagcaacattttccaaattgtttattactattgctttgattttggagaagctgggaagtaaggaggtgaggtgaatactctgataattaacacgtgttagagaggaaagttgtgtgaagaggctgccaaagtaaacagcacgaatgaatcttcttgtactagggctgctgcaaaccccaggtagacaaatgacagcccaggctcctgaaccatcaggaacccaggaatctacccaactgtgaggagggggcaggccttcgtcaataagggtcccaccatcacgggctaataatctttctcagtttaggtgatattgaggtattgaaactgttagaaatctgacagatttgaccaagatttggagacgtccacataattgggaaggactgagtgtccctagccactctcctctgggataacgcggacgtcattagtttgcgaagtgggtggggagaacaggaggattgactctaatttggtgtgtagtgggggccttgatgtccttctgcctctgtccacatttccccatgtgactcattgcaccctgcattgctcacagggatcattagttctcccggtagacagagcacctctgcagcctctgctctgctgccttgtgaatttcctacacagacttggttagttacaatttggaaacagtttttttgggtttttttcctttgttttaatcttctcacaatgaagctgctattggtgacagggacaggggagcaggaagccaacccagggaaacatgcgagtttcctgcacaccacttagtcacctgccctcactggccaaccccctactgctgttcccagtcagtctggtttttagaggcatcgtggcaatagaatagctggatacactaatctctacaaggtgtcaggcaggagattcaccttccccagtcccaggggacaggagagaaatctgtaaagggacagatgcaccatctttatttcaaaagaaaaagctccctcagattgtgttactaggagtctcttttgtgacatttactgacctttctccccaatcttaccttcctattggctactttttaaataaaaataaacattttaggctaatatgacaaaaatgagataaaatcttaaaaacattgtactagtgtacagttactaaaatgtgcttactacaaaacagtaaaatatttcactctgtaaatcatcactaagtagttattctgtcctgttgattatgagcctccaaaaatgtttaatgcttgaaggatggtttgggaggcagggaatccttttcttaaaacaactttaatgaggcatatgttacatatcataaaacacccatttcaagtgtacatttcagtgattttagtaacttccctcagtggtgtagctgtaactattactcagttttagaacatttttatccctcccaataagatccttcatgctcttttacagttaatcctgttcttacccccggcaaccactaatctactttctctataaatttgccctttctggacagttcaaatcaatggaatcatacaatatgtggtcccttgggtctggcttttttacttagctaatgtttttgaggtttgtccatgacagataacgtcttggtagtttgttccttttattgctgagtagaattctgttgatggatgtaccacattttgtcagcagagagccttttaaacttggattccaacttcctgttgtctaaacggaaccctccgaacgtaggacttataggggaagctgctgtgcatgtcaaaaaaactactaatcagaatgagctttgtcatccagagccagaactgctgcagaaatttttataattttgcaacttctttttttacaaggaacttttgtgctactacacatcaggacttttgaagcatccaataaatccatttaataagtatgagcatgtgtctgagtggacaagaaagtgaaaccatccatgctacattggataatttttcctcccccagactggatagggaatctcaactttcaaaatagagtatcctggctccatttacaaagctgcacaggtattaaagatcgtgctgcctttgttaggcagatttggaggggaggcccaacagcaaagatggagaggaaaaagggagtggagcttgtggaacaggaagccccccagggtctgtgcagggctgctcagctcttgaggatgttgtggatggtgaagtggtgatggtgtcctggagcagcccagcacctccactgggcccagaaggtcttgacttcggacacttacccctgtttcacaagtgtttataaagctgtttttgcttttgtttttctcctaaataatccttacttggtagttattaatccttctttgggggagggacagggctttaaaactgaagaaaataattttcataaaaatatcaaaaatggaaaaaagttactttgtaaaaaatttgctatacaaaccaaatggcagctgttgagaatctcaataaaatgttaaatgca

SEQ ID NO: 67969 - DNA, 6489 bp, Homo sapiens
  misc_feature (162)..(162): n is a, c, g, or t
ctggcaagtggtagtggcgcttctcgggtgctgtgcttcacgttttggtactaaaggccgagactgttgtggcgacggcgacctctacggcaacggcttaagctctcggaggagtggcagagtacgatctgaaggaggggcttctggttagcccaggttccntcataatgaatggatccaatatggcaaatacatcaccgagtgtaaaatccaaagaggaccaggggttaagtgggcacgatgaaaaggaaaacccatttgcagagtacatgtggatggagaatgaagaggatttcaacagacaggtggaggaggaactgcaggagcaagacttcttggaccgctgcttccaagagatgctggatgaagaagaccaagactggtttattccatcacgagacctgcctcaggccatgggacagttgcaacagcagttaaatggactgtcagtcagtgaaggtcatgattctgaagatattttgagcaaaagtaacctgaacccagatgccaaggagtttattccaggagagaagtactgagccgagaaagctttgaggaagacttgtctgtccccacatctggggatagtaatgcacaaaatggtggagctgaagagggggatggggcgggcgaggggtgcacagcgggaaggggagtggtggtctcacgatactgtgactctgagtaactaatatgctcagtcttattctaagcctctgagtatttctattttgttctgctgacttttgtttggggagtttcctgttttgtttttttaaatagctctttcgagttaaggaaattgcattttccccccttcatcagaagtgttccgcggtgtgtatttaaacaaaataagctgactaagaaaaactggatatttaggaaatgcccctctcaccctgctgtatacttatcagggacagtgagcacctggagagctttttgtggaatctattgagttggatgggaaaagggacaagcagaaagagcaggtggtgcaaactggaatttgaggctcagctgccccacccccggggtctcctgcaatgaactcggataaccaatgtgctgtcaagcccttgcctgtttgtcctgaaccccattcaagaaaacacagacttaaagtacttagtttacagtaacttttgatgattgttgaaagttgtaaatcagaaggtagggctgtgatggtggttgtcacttgagtcatttagttactgttgtcctgttcataagcctgtgttcaccaccaccatcagactcaccatttataagtagaagagcactagggttgatctgccacctcatctttcatgaagtctattccccagcctcctttttaagaaaagatactgctaccaaaggcataggggaggcctgctgtgctggcaattagcatgagcctgcagaagtcatccttgaatctgttgtgtcttaattttatttggacagtttttttttccagcctcatcaacacttggtcttcctggtgtcttaattccctcagacaagtttatgcacttttttaaggaaatatttttcaggacactagtaagaagctcagttcacagtttggatatttcttcccacattacagaattatggaaaggaactcaaaatcagcctaggaaagtgagtcctgcttgacccatgtgactgtgtacctgaccttctgggatcttttcagctattaaaacattttactgttcccacatacccagctttgcaagttttgtagattgacctcttagggtgtgtttctttgtctttcctgcctttaacttgctggggtcttttgttgctacccctaaggaactaaactgggtgccaggagctaccttcgtgtatagagatgtagatggcagtgtggggtacaggagagccatccaggccattctcccagggatgaggaattggagagccctgaagataatagtggcttctttctgattgctactgtgctgtgtgataggcctaatagggaaaagatatgtaacttgaaacaaagttggtataaattcagtatgtggctgtgggacagaggttggaaggaaaggactagggtatggaaagctgaagaaattctccttatgagctctcgttgactttttgaacagtgataagctaatgccagatttaaaatacacattttttcctatttgagtctttaggattatatcatttgaaaaaattgccttccttgttaggtcacatgtcataggagagtagcttagagaacttgcattaccagacagacacattaattcccaaagcctctatgttgagagaatgaaactgttaactctttttcagagaggactatgaataaagaaacttctttattcaagcttcagctttcagctgggttgtttcctctaaaagggaaagggcattgcaagtgcatagaggaaatctctcccttctgggactgcttttcctccttcatcctcgtgagcctgtccaagctcagaattccgaaggctgttagaaatgcgttgggattgcagagagaaaggagcttgtctttccttctgctgtgctggtctgttttggatgtcagtcttcaggactatgaaaacttcctgccagtttagcatggacactgagggctggcatttctagtcttcttcagacactgaacatactgactccaggtataggaagcagctagcaaattgattcttttttaaatgcataggactctgcttccggcggttcctcttgtagtccaactctttttgccatctatttatgttgggaggtaggggcacaattgtcactcacaacacaggctagttagagtttgctaccttcttagcagaaaatgcatgtgtgtcttgttggaccttcactggggaaaggctgggagcctctggctgtcagtgacttttctcacagaagaagaaccagcaagccagactggacacctttaccctttaatggtaagacttgtatttataaggggtaattttgatgttgaatttaagccactactttgtttaaacttttttaaattggcaactagaagtttgagaatttgtatagaaatggaacatgtatttctaacagttgccaatctggctggtcccaatgttagtttattagtgattgatctgtaattattgggattatttattcaactctaaaattccaagatgaaaataatttatctctttcttttcaagggaaaaaacccaaatgaatgcattttcagtttctccaggcctttgaactgcagcagaaaattcaaggatacagcctaggcctgggcaaatgcagccctgggtctttgggccagtttctgacaataatagttgagttttgggaatcacataagggtgaaaccagaaacgatcctaaggaaaggcttgacctttgttaacacctttagtttccaaagtcacagcagctggggtccctcttttttttttttttttctttttttttgagacatagtctcactctgtcacccaggctggagtgcagtggtatgaccatagctcactgcagcatcaaattcctaggctcaagcaatcctcccatcttagcctcccgagtagctgggacaacaggtacgcaccaccacggccagctaattatttttattatttttattttttgtagagactggatcttgctctatttcccaagctactcttgaattgttgtgctcaagtgattctcccatctcagcctcccaaagtgctgggattataggctgggtgtggtgagccaccccagcctggggtctctttaattaaggttataatgctaaccatggcttaaaatactaagcaacattttccaaattgtttattactattgctttgattttggagaagctgggaagtaaggaggtgaggtgaatactctgataattaacacgtgttagagaggaaagttgtgtgaagaggctgccaaagtaaacagcacgaatgaatcttcttgtactagggctgctgcaaaccccaggtagacaaatgacagcccaggctcctgaaccatcaggaacccaggaatctacccaactgtgaggagggggcaggccttcgtcaataagggtcccaccatcacgggctaataatctttctcagtttaggtgatattgaggtattgaaactgttagaaatctgacagatttgaccaagatttggagacgtccacataattgggaaggactgagtgtccctagccactctcctctgggataacgcggacgtcattagtttgcgaagtgggtggggagaacaggaggattgactctaatttggtgtgtagtgggggccttgatgtccttctgcctctgtccacatttccccatgtgactcattgcaccctgcattgctcacagggatcattagttctcccggtagacagagcacctctgcagcctctgctctgctgccttgtgaatttcctacacagacttggttagttacaatttggaaacagtttttttgggtttttttcctttgttttaatcttctcacaatgaagctgctattggtgacagggacaggggagcaggaagccaacccagggaaacatgcgagtttcctgcacaccacttagtcacctgccctcactggccaaccccctactgctgttcccagtcagtctggtttttagaggcatcgtggcaatagaatagctggatacactaatctctacaaggtgtcaggcaggagattcaccttccccagtcccaggggacaggagagaaatctgtaaagggacagatgcaccatctttatttcaaaagaaaaagctccctcagattgtgttactaggagtctcttttgtgacatttactgacctttctccccaatcttaccttcctattggctactttttaaataaaaataaacattttaggctaatatgacaaaaatgagataaaatcttaaaaacattgtactagtgtacagttactaaaatgtgcttactacaaaacagtaaaatatttcactctgtaaatcatcactaagtagttattctgtcctgttgattatgagcctccaaaaatgtttaatgcttgaaggatggtttgggaggcagggaatccttttcttaaaacaactttaatgaggcatatgttacatatcataaaacacccatttcaagtgtacatttcagtgattttagtaacttccctcagtggtgtagctgtaactattactcagttttagaacatttttatccctcccaataagatccttcatgctcttttacagttaatcctgttcttacccccggcaaccactaatctactttctctataaatttgccctttctggacagttcaaatcaatggaatcatacaatatgtggtcccttgggtctggcttttttacttagctaatgtttttgaggtttgtccatgacagataacgtcttggtagtttgttccttttattgctgagtagaattctgttgatggatgtaccacattttgtcagcagagagccttttaaacttggattccaacttcctgttgtctaaacggaaccctccgaacgtaggacttataggggaagctgctgtgcatgtcaaaaaaactactaatcagaatgagctttgtcatccagagccagaactgctgcagaaatttttataattttgcaacttctttttttacaaggaacttttgtgctactacacatcaggacttttgaagcatccaataaatccatttaataagtatgagcatgtgtctgagtggacaagaaagtgaaaccatccatgctacattggataatttttcctcccccagactggatagggaatctcaactttcaaaatagagtatcctggctccatttacaaagctgcacaggtattaaagatcgtgctgcctttgttaggcagatttggaggggaggcccaacagcaaagatggagaggaaaaagggagtggagcttgtggaacaggaagccccccagggtctgtgcagggctgctcagctcttgaggatgttgtggatggtgaagtggtgatggtgtcctggagcagcccagcacctccactgggcccagaaggtcttgacttcggacacttacccctgtttcacaagtgtttataaagctgtttttgcttttgtttttctcctaaataatccttacttggtagttattaatccttctttgggggagggacagggctttaaaactgaagaaaataattttcataaaaatatcaaaaatggaaaaaagttactttgtaaaaaatttgctatacaaaccaaatggcagctgttgagaatctcaataaaatgttaaatgcatttgctggcagtggtacccttttgcctaaggttgggtcactgtgttataccgtgtgtgtttggggtggggggaggtgtgaaactttttgtctcacacataagttgtctcatgggtcataatcttagttgcagttttcctttcaaatagggttgcaaagtagaaaacatgggcttggaagtgacagacctgagtgaatcccac

SEQ ID NO: 67970 - DNA, 6213 bp, Homo sapiens
  misc_feature (162)..(162): n is a, c, g, or t
ctggcaagtggtagtggcgcttctcgggtgctgtgcttcacgttttggtactaaaggccgagactgttgtggcgacggcgacctctacggcaacggcttaagctctcggaggagtggcagagtacgatctgaaggaggggcttctggttagcccaggttccntcataatgaatggatccaatatggcaaatacatcaccgagtgtaaaatccaaagaggaccaggggttaagtgggcacgatgaaaaggaaaacccatttgcagagtacatgtggatggagaatgaagaggatttcaacagacaggtggaggaggaactgcaggagcaagacttcttggaccgctgcttccaagagatgctggatgaagaagaccaagactggtttattccatcacgagacctgcctcaggccatgggacagttgcaacagcagttaaatggactgtcagtcagtgaaggtcatgattctgaagatattttgagcaaaagtaacctgaacccagatgccaaggagtttattccaggagagaagtactgagccgagaaagctttgaggaagacttgtctgtccccacatctggggatagtaatgcacaaaatggtggagctgaagagggggatggggcgggcgaggggtgcacagcgggaaggggagtggtggtctcacgatactgtgactctgagtaactaatatgctcagtcttattctaagcctctgagtatttctattttgttctgctgacttttgtttggggagtttcctgttttgtttttttaaatagctctttcgagttaaggaaattgcattttccccccttcatcagaagtgttccgcggtgtgtatttaaacaaaataagctgactaagaaaaactggatatttaggaaatgcccctctcaccctgctgtatacttatcagggacagtgagcacctggagagctttttgtggaatctattgagttggatgggaaaagggacaagcagaaagagcaggtggtgcaaactggaatttgaggctcagctgccccacccccggggtctcctgcaatgaactcggataaccaatgtgctgtcaagcccttgcctgtttgtcctgaaccccattcaagaaaacacagacttaaagtacttagtttacagtaacttttgatgattgttgaaagttgtaaatcagaaggtagggctgtgatggtggttgtcacttgagtcatttagttactgttgtcctgttcataagcctgtgttcaccaccaccatcagactcaccatttataagtagaagagcactagggttgatctgccacctcatctttcatgaagtctattccccagcctcctttttaagaaaagatactgctaccaaaggcataggggaggcctgctgtgctggcaattagcatgagcctgcagaagtcatccttgaatctgttgtgtcttaattttatttggacagtttttttttccagcctcatcaacacttggtcttcctggtgtcttaattccctcagacaagtttatgcacttttttaaggaaatatttttcaggacactagtaagaagctcagttcacagtttggatatttcttcccacattacagaattatggaaaggaactcaaaatcagcctaggaaagtgagtcctgcttgacccatgtgactgtgtacctgaccttctgggatcttttcagctattaaaacattttactgttcccacatacccagctttgcaagttttgtagattgacctcttagggtgtgtttctttgtctttcctgcctttaacttgctggggtcttttgttgctacccctaaggaactaaactgggtgccaggagctaccttcgtgtatagagatgtagatggcagtgtggggtacaggagagccatccaggccattctcccagggatgaggaattggagagccctgaagataatagtggcttctttctgattgctactgtgctgtgtgataggcctaatagggaaaagatatgtaacttgaaacaaagttggtataaattcagtatgtggctgtgggacagaggttggaaggaaaggactagggtatggaaagctgaagaaattctccttatgagctctcgttgactttttgaacagtgataagctaatgccagatttaaaatacacattttttcctatttgagtctttaggattatatcatttgaaaaaattgccttccttgttaggtcacatgtcataggagagtagcttagagaacttgcattaccagacagacacattaattcccaaagcctctatgttgagagaatgaaactgttaactctttttcagagaggactatgaataaagaaacttctttattcaagcttcagctttcagctgggttgtttcctctaaaagggaaagggcattgcaagtgcatagaggaaatctctcccttctgggactgcttttcctccttcatcctcgtgagcctgtccaagctcagaattccgaaggctgttagaaatgcgttgggattgcagagagaaaggagcttgtctttccttctgctgtgctggtctgttttggatgtcagtcttcaggactatgaaaacttcctgccagtttagcatggacactgagggctggcatttctagtcttcttcagacactgaacatactgactccaggtataggaagcagctagcaaattgattcttttttaaatgcataggactctgcttccggcggttcctcttgtagtccaactctttttgccatctatttatgttgggaggtaggggcacaattgtcactcacaacacaggctagttagagtttgctaccttcttagcagaaaatgcatgtgtgtcttgttggaccttcactggggaaaggctgggagcctctggctgtcagtgacttttctcacagaagaagaaccagcaagccagactggacacctttaccctttaatggtaagacttgtatttataaggggtaattttgatgttgaatttaagccactactttgtttaaacttttttaaattggcaactagaagtttgagaatttgtatagaaatggaacatgtatttctaacagttgccaatctggctggtcccaatgttagtttattagtgattgatctgtaattattgggattatttattcaactctaaaattccaagatgaaaataatttatctctttcttttcaagggaaaaaacccaaatgaatgcattttcagtttctccaggcctttgaactgcagcagaaaattcaaggatacagcctaggcctgggcaaatgcagccctgggtctttgggccagtttctgacaataatagttgagttttgggaatcacataagggtgaaaccagaaacgatcctaaggaaaggcttgacctttgttaacacctttagtttccaaagtcacagcagctggggtccctcttttttttttttttttctttttttttgagacatagtctcactctgtcacccaggctggagtgcagtggtatgaccatagctcactgcagcatcaaattcctaggctcaagcaatcctcccatcttagcctcccgagtagctgggacaacaggtacgcaccaccacggccagctaattatttttattatttttattttttgtagagactggatcttgctctatttcccaagctactcttgaattgttgtgctcaagtgattctcccatctcagcctcccaaagtgctgggattataggctgggtgtggtgagccaccccagcctggggtctctttaattaaggttataatgctaaccatggcttaaaatactaagcaacattttccaaattgtttattactattgctttgattttggagaagctgggaagtaaggaggtgaggtgaatactctgataattaacacgtgttagagaggaaagttgtgtgaagaggctgccaaagtaaacagcacgaatgaatcttcttgtactagggctgctgcaaaccccaggtagacaaatgacagcccaggctcctgaaccatcaggaacccaggaatctacccaactgtgaggagggggcaggccttcgtcaataagggtcccaccatcacgggctaataatctttctcagtttaggtgatattgaggtattgaaactgttagaaatctgacagatttgaccaagatttggagacgtccacataattgggaaggactgagtgtccctagccactctcctctgggataacgcggacgtcattagtttgcgaagtgggtggggagaacaggaggattgactctaatttggtgtgtagtgggggccttgatgtccttctgcctctgtccacatttccccatgtgactcattgcaccctgcattgctcacagggatcattagttctcccggtagacagagcacctctgcagcctctgctctgctgccttgtgaatttcctacacagacttggttagttacaatttggaaacagtttttttgggtttttttcctttgttttaatcttctcacaatgaagctgctattggtgacagggacaggggagcaggaagccaacccagggaaacatgcgagtttcctgcacaccacttagtcacctgccctcactggccaaccccctactgctgttcccagtcagtctggtttttagaggcatcgtggcaatagaatagctggatacactaatctctacaaggtgtcaggcaggagattcaccttccccagtcccaggggacaggagagaaatctgtaaagggacagatgcaccatctttatttcaaaagaaaaagctccctcagattgtgttactaggagtctcttttgtgacatttactgacctttctccccaatcttaccttcctattggctactttttaaataaaaataaacattttaggctaatatgacaaaaatgagataaaatcttaaaaacattgtactagtgtacagttactaaaatgtgcttactacaaaacagtaaaatatttcactctgtaaatcatcactaagtagttattctgtcctgttgattatgagcctccaaaaatgtttaatgcttgaaggatggtttgggaggcagggaatccttttcttaaaacaactttaatgaggcatatgttacatatcataaaacacccatttcaagtgtacatttcagtgattttagtaacttccctcagtggtgtagctgtaactattactcagttttagaacatttttatccctcccaataagatccttcatgctcttttacagttaatcctgttcttacccccggcaaccactaatctactttctctataaatttgccctttctggacagttcaaatcaatggaatcatacaatatgtggtcccttgggtctggcttttttacttagctaatgtttttgaggtttgtccatgacagataacgtcttggtagtttgttccttttattgctgagtagaattctgttgatggatgtaccacattttgtcagcagagagccttttaaacttggattccaacttcctgttgtctaaacggaaccctccgaacgtaggacttataggggaagctgctgtgcatgtcaaaaaaactactaatcagaatgagctttgtcatccagagccagaactgctgcagaaatttttataattttgcaacttctttttttacaaggaacttttgtgctactacacatcaggacttttgaagcatccaataaatccatttaataagtatgagcatgtgtctgagtggacaagaaagtgaaaccatccatgctacattggataatttttcctcccccagactggatagggaatctcaactttcaaaatagagtatcctggctccatttacaaagctgcacaggtattaaagatcgtgctgcctttgttaggcagatttggaggggaggcccaacagcaaagatggagaggaaaaagggagtggagcttgtggaacaggaaggcagcccagcacctccactgggcccagaaggtcttgacttcggacacttacccctgtttcacaagtgtttataaagctgtttttgcttttgtttttctcctaaataatccttacttggtagttattaatccttctttgggggagggacagggctttaaaactgaagaaaataattttcataaaaatatcaaaaatggaaaaaagttactttgtaaaaaatttgctatacaaaccaaatggcagctgttgagaatctcaataaaatgttaaatgca

SEQ ID NO: 67971 - DNA, 6287 bp, Homo sapiens
  misc_feature (162)..(162): n is a, c, g, or t
ctggcaagtggtagtggcgcttctcgggtgctgtgcttcacgttttggtactaaaggccgagactgttgtggcgacggcgacctctacggcaacggcttaagctctcggaggagtggcagagtacgatctgaaggaggggcttctggttagcccaggttccntcataatgaatggatccaatatggcaaatacatcaccgagtgtaaaatccaaagaggaccaggggttaagtgggcacgatgaaaaggaaaacccatttgcagagtacatgtggatggagaatgaagaggatttcaacagacaggtggaggaggaactgcaggagcaagacttcttggaccgctgcttccaagagatgctggatgaagaagaccaagactggtttattccatcacgagacctgcctcaggccatgggacagttgcaacagcagttaaatggactgtcagtcagtgaaggtcatgattctgaagatattttgagcaaaagtaacctgaacccagatgccaaggagtttattccaggagagaagtactgagccgagaaagctttgaggaagacttgtctgtccccacatctggggatagtaatgcacaaaatggtggagctgaagagggggatggggcgggcgaggggtgcacagcgggaaggggagtggtggtctcacgatactgtgactctgagtaactaatatgctcagtcttattctaagcctctgagtatttctattttgttctgctgacttttgtttggggagtttcctgttttgtttttttaaatagctctttcgagttaaggaaattgcattttccccccttcatcagaagtgttccgcggtgtgtatttaaacaaaataagctgactaagaaaaactggatatttaggaaatgcccctctcaccctgctgtatacttatcagggacagtgagcacctggagagctttttgtggaatctattgagttggatgggaaaagggacaagcagaaagagcaggtggtgcaaactggaatttgaggctcagctgccccacccccggggtctcctgcaatgaactcggataaccaatgtgctgtcaagcccttgcctgtttgtcctgaaccccattcaagaaaacacagacttaaagtacttagtttacagtaacttttgatgattgttgaaagttgtaaatcagaaggtagggctgtgatggtggttgtcacttgagtcatttagttactgttgtcctgttcataagcctgtgttcaccaccaccatcagactcaccatttataagtagaagagcactagggttgatctgccacctcatctttcatgaagtctattccccagcctcctttttaagaaaagatactgctaccaaaggcataggggaggcctgctgtgctggcaattagcatgagcctgcagaagtcatccttgaatctgttgtgtcttaattttatttggacagtttttttttccagcctcatcaacacttggtcttcctggtgtcttaattccctcagacaagtttatgcacttttttaaggaaatatttttcaggacactagtaagaagctcagttcacagtttggatatttcttcccacattacagaattatggaaaggaactcaaaatcagcctaggaaagtgagtcctgcttgacccatgtgactgtgtacctgaccttctgggatcttttcagctattaaaacattttactgttcccacatacccagctttgcaagttttgtagattgacctcttagggtgtgtttctttgtctttcctgcctttaacttgctggggtcttttgttgctacccctaaggaactaaactgggtgccaggagctaccttcgtgtatagagatgtagatggcagtgtggggtacaggagagccatccaggccattctcccagggatgaggaattggagagccctgaagataatagtggcttctttctgattgctactgtgctgtgtgataggcctaatagggaaaagatatgtaacttgaaacaaagttggtataaattcagtatgtggctgtgggacagaggttggaaggaaaggactagggtatggaaagctgaagaaattctccttatgagctctcgttgactttttgaacagtgataagctaatgccagatttaaaatacacattttttcctatttgagtctttaggattatatcatttgaaaaaattgccttccttgttaggtcacatgtcataggagagtagcttagagaacttgcattaccagacagacacattaattcccaaagcctctatgttgagagaatgaaactgttaactctttttcagagaggactatgaataaagaaacttctttattcaagcttcagctttcagctgggttgtttcctctaaaagggaaagggcattgcaagtgcatagaggaaatctctcccttctgggactgcttttcctccttcatcctcgtgagcctgtccaagctcagaattccgaaggctgttagaaatgcgttgggattgcagagagaaaggagcttgtctttccttctgctgtgctggtctgttttggatgtcagtcttcaggactatgaaaacttcctgccagtttagcatggacactgagggctggcatttctagtcttcttcagacactgaacatactgactccaggtataggaagcagctagcaaattgattcttttttaaatgcataggactctgcttccggcggttcctcttgtagtccaactctttttgccatctatttatgttgggaggtaggggcacaattgtcactcacaacacaggctagttagagtttgctaccttcttagcagaaaatgcatgtgtgtcttgttggaccttcactggggaaaggctgggagcctctggctgtcagtgacttttctcacagaagaagaaccagcaagccagactggacacctttaccctttaatggtaagacttgtatttataaggggtaattttgatgttgaatttaagccactactttgtttaaacttttttaaattggcaactagaagtttgagaatttgtatagaaatggaacatgtatttctaacagttgccaatctggctggtcccaatgttagtttattagtgattgatctgtaattattgggattatttattcaactctaaaattccaagatgaaaataatttatctctttcttttcaagggaaaaaacccaaatgaatgcattttcagtttctccaggcctttgaactgcagcagaaaattcaaggatacagcctaggcctgggcaaatgcagccctgggtctttgggccagtttctgacaataatagttgagttttgggaatcacataagggtgaaaccagaaacgatcctaaggaaaggcttgacctttgttaacacctttagtttccaaagtcacagcagctggggtccctcttttttttttttttttctttttttttgagacatagtctcactctgtcacccaggctggagtgcagtggtatgaccatagctcactgcagcatcaaattcctaggctcaagcaatcctcccatcttagcctcccgagtagctgggacaacaggtacgcaccaccacggccagctaattatttttattatttttattttttgtagagactggatcttgctctatttcccaagctactcttgaattgttgtgctcaagtgattctcccatctcagcctcccaaagtgctgggattataggctgggtgtggtgagccaccccagcctggggtctctttaattaaggttataatgctaaccatggcttaaaatactaagcaacattttccaaattgtttattactattgctttgattttggagaagctgggaagtaaggaggtgaggtgaatactctgataattaacacgtgttagagaggaaagttgtgtgaagaggctgccaaagtaaacagcacgaatgaatcttcttgtactagggctgctgcaaaccccaggtagacaaatgacagcccaggctcctgaaccatcaggaacccaggaatctacccaactgtgaggagggggcaggccttcgtcaataagggtcccaccatcacgggctaataatctttctcagtttaggtgatattgaggtattgaaactgttagaaatctgacagatttgaccaagatttggagacgtccacataattgggaaggactgagtgtccctagccactctcctctgggataacgcggacgtcattagtttgcgaagtgggtggggagaacaggaggattgactctaatttggtgtgtagtgggggccttgatgtccttctgcctctgtccacatttccccatgtgactcattgcaccctgcattgctcacagggatcattagttctcccggtagacagagcacctctgcagcctctgctctgctgccttgtgaatttcctacacagacttggttagttacaatttggaaacagtttttttgggtttttttcctttgttttaatcttctcacaatgaagctgctattggtgacagggacaggggagcaggaagccaacccagggaaacatgcgagtttcctgcacaccacttagtcacctgccctcactggccaaccccctactgctgttcccagtcagtctggtttttagaggcatcgtggcaatagaatagctggatacactaatctctacaaggtgtcaggcaggagattcaccttccccagtcccaggggacaggagagaaatctgtaaagggacagatgcaccatctttatttcaaaagaaaaagctccctcagattgtgttactaggagtctcttttgtgacatttactgacctttctccccaatcttaccttcctattggctactttttaaataaaaataaacattttaggctaatatgacaaaaatgagataaaatcttaaaaacattgtactagtgtacagttactaaaatgtgcttactacaaaacagtaaaatatttcactctgtaaatcatcactaagtagttattctgtcctgttgattatgagcctccaaaaatgtttaatgcttgaaggatggtttgggaggcagggaatccttttcttaaaacaactttaatgaggcatatgttacatatcataaaacacccatttcaagtgtacatttcagtgattttagtaacttccctcagtggtgtagctgtaactattactcagttttagaacatttttatccctcccaataagatccttcatgctcttttacagttaatcctgttcttacccccggcaaccactaatctactttctctataaatttgccctttctggacagttcaaatcaatggaatcatacaatatgtggtcccttgggtctggcttttttacttagctaatgtttttgaggtttgtccatgacagataacgtcttggtagtttgttccttttattgctgagtagaattctgttgatggatgtaccacattttgtcagcagagagccttttaaacttggattccaacttcctgttgtctaaacggaaccctccgaacgtaggacttataggggaagctgctgtgcatgtcaaaaaaactactaatcagaatgagctttgtcatccagagccagaactgctgcagaaatttttataattttgcaacttctttttttacaaggaacttttgtgctactacacatcaggacttttgaagcatccaataaatccatttaataagtatgagcatgtgtctgagtggacaagaaagtgaaaccatccatgctacattggataatttttcctcccccagactggatagggaatctcaactttcaaaatagagtatcctggctccatttacaaagctgcacaggtattaaagatcgtgctgcctttgttaggcagatttggaggggaggcccaacagcaaagatggagaggaaaaagggagtggagcttgtggaacaggaagccccccagggtctgtgcagggctgctcagctcttgaggatgttgtggatggtgaagtggtgatggtgtcctggagcagcccagcacctccactgggcccagaaggtcttgacttcggacacttacccctgtttcacaagtgtttataaagctgtttttgcttttgtttttctcctaaataatccttacttggtagttattaatccttctttgggggagggacagggctttaaaactgaagaaaataattttcataaaaatatcaaaaatggaaaaaagttactttgtaaaaaatttgctatacaaaccaaatggcagctgttgagaatctcaataaaatgttaaatgca

SEQ ID NO: 67972 - DNA, 6034 bp, Homo sapiens
ttgtttgaaatggagtgtcgctctgtcgcccatgctggagtgcagtggcaccgtggaggaggaactgcaggagcaagacttcttggaccgctgcttccaagagatgctggatgaagaagaccaagactggtttattccatcacgagacctgcctcaggccatgggacagttgcaacagcagttaaatggactgtcagtcagtgaaggtcatgattctgaagatattttgagcaaaagtaacctgaacccagatgccaaggagtttattccaggagagaagtactgagccgagaaagctttgaggaagacttgtctgtccccacatctggggatagtaatgcacaaaatggtggagctgaagagggggatggggcgggcgaggggtgcacagcgggaaggggagtggtggtctcacgatactgtgactctgagtaactaatatgctcagtcttattctaagcctctgagtatttctattttgttctgctgacttttgtttggggagtttcctgttttgtttttttaaatagctctttcgagttaaggaaattgcattttccccccttcatcagaagtgttccgcggtgtgtatttaaacaaaataagctgactaagaaaaactggatatttaggaaatgcccctctcaccctgctgtatacttatcagggacagtgagcacctggagagctttttgtggaatctattgagttggatgggaaaagggacaagcagaaagagcaggtggtgcaaactggaatttgaggctcagctgccccacccccggggtctcctgcaatgaactcggataaccaatgtgctgtcaagcccttgcctgtttgtcctgaaccccattcaagaaaacacagacttaaagtacttagtttacagtaacttttgatgattgttgaaagttgtaaatcagaaggtagggctgtgatggtggttgtcacttgagtcatttagttactgttgtcctgttcataagcctgtgttcaccaccaccatcagactcaccatttataagtagaagagcactagggttgatctgccacctcatctttcatgaagtctattccccagcctcctttttaagaaaagatactgctaccaaaggcataggggaggcctgctgtgctggcaattagcatgagcctgcagaagtcatccttgaatctgttgtgtcttaattttatttggacagtttttttttccagcctcatcaacacttggtcttcctggtgtcttaattccctcagacaagtttatgcacttttttaaggaaatatttttcaggacactagtaagaagctcagttcacagtttggatatttcttcccacattacagaattatggaaaggaactcaaaatcagcctaggaaagtgagtcctgcttgacccatgtgactgtgtacctgaccttctgggatcttttcagctattaaaacattttactgttcccacatacccagctttgcaagttttgtagattgacctcttagggtgtgtttctttgtctttcctgcctttaacttgctggggtcttttgttgctacccctaaggaactaaactgggtgccaggagctaccttcgtgtatagagatgtagatggcagtgtggggtacaggagagccatccaggccattctcccagggatgaggaattggagagccctgaagataatagtggcttctttctgattgctactgtgctgtgtgataggcctaatagggaaaagatatgtaacttgaaacaaagttggtataaattcagtatgtggctgtgggacagaggttggaaggaaaggactagggtatggaaagctgaagaaattctccttatgagctctcgttgactttttgaacagtgataagctaatgccagatttaaaatacacattttttcctatttgagtctttaggattatatcatttgaaaaaattgccttccttgttaggtcacatgtcataggagagtagcttagagaacttgcattaccagacagacacattaattcccaaagcctctatgttgagagaatgaaactgttaactctttttcagagaggactatgaataaagaaacttctttattcaagcttcagctttcagctgggttgtttcctctaaaagggaaagggcattgcaagtgcatagaggaaatctctcccttctgggactgcttttcctccttcatcctcgtgagcctgtccaagctcagaattccgaaggctgttagaaatgcgttgggattgcagagagaaaggagcttgtctttccttctgctgtgctggtctgttttggatgtcagtcttcaggactatgaaaacttcctgccagtttagcatggacactgagggctggcatttctagtcttcttcagacactgaacatactgactccaggtataggaagcagctagcaaattgattcttttttaaatgcataggactctgcttccggcggttcctcttgtagtccaactctttttgccatctatttatgttgggaggtaggggcacaattgtcactcacaacacaggctagttagagtttgctaccttcttagcagaaaatgcatgtgtgtcttgttggaccttcactggggaaaggctgggagcctctggctgtcagtgacttttctcacagaagaagaaccagcaagccagactggacacctttaccctttaatggtaagacttgtatttataaggggtaattttgatgttgaatttaagccactactttgtttaaacttttttaaattggcaactagaagtttgagaatttgtatagaaatggaacatgtatttctaacagttgccaatctggctggtcccaatgttagtttattagtgattgatctgtaattattgggattatttattcaactctaaaattccaagatgaaaataatttatctctttcttttcaagggaaaaaacccaaatgaatgcattttcagtttctccaggcctttgaactgcagcagaaaattcaaggatacagcctaggcctgggcaaatgcagccctgggtctttgggccagtttctgacaataatagttgagttttgggaatcacataagggtgaaaccagaaacgatcctaaggaaaggcttgacctttgttaacacctttagtttccaaagtcacagcagctggggtccctcttttttttttttttttctttttttttgagacatagtctcactctgtcacccaggctggagtgcagtggtatgaccatagctcactgcagcatcaaattcctaggctcaagcaatcctcccatcttagcctcccgagtagctgggacaacaggtacgcaccaccacggccagctaattatttttattatttttattttttgtagagactggatcttgctctatttcccaagctactcttgaattgttgtgctcaagtgattctcccatctcagcctcccaaagtgctgggattataggctgggtgtggtgagccaccccagcctggggtctctttaattaaggttataatgctaaccatggcttaaaatactaagcaacattttccaaattgtttattactattgctttgattttggagaagctgggaagtaaggaggtgaggtgaatactctgataattaacacgtgttagagaggaaagttgtgtgaagaggctgccaaagtaaacagcacgaatgaatcttcttgtactagggctgctgcaaaccccaggtagacaaatgacagcccaggctcctgaaccatcaggaacccaggaatctacccaactgtgaggagggggcaggccttcgtcaataagggtcccaccatcacgggctaataatctttctcagtttaggtgatattgaggtattgaaactgttagaaatctgacagatttgaccaagatttggagacgtccacataattgggaaggactgagtgtccctagccactctcctctgggataacgcggacgtcattagtttgcgaagtgggtggggagaacaggaggattgactctaatttggtgtgtagtgggggccttgatgtccttctgcctctgtccacatttccccatgtgactcattgcaccctgcattgctcacagggatcattagttctcccggtagacagagcacctctgcagcctctgctctgctgccttgtgaatttcctacacagacttggttagttacaatttggaaacagtttttttgggtttttttcctttgttttaatcttctcacaatgaagctgctattggtgacagggacaggggagcaggaagccaacccagggaaacatgcgagtttcctgcacaccacttagtcacctgccctcactggccaaccccctactgctgttcccagtcagtctggtttttagaggcatcgtggcaatagaatagctggatacactaatctctacaaggtgtcaggcaggagattcaccttccccagtcccaggggacaggagagaaatctgtaaagggacagatgcaccatctttatttcaaaagaaaaagctccctcagattgtgttactaggagtctcttttgtgacatttactgacctttctccccaatcttaccttcctattggctactttttaaataaaaataaacattttaggctaatatgacaaaaatgagataaaatcttaaaaacattgtactagtgtacagttactaaaatgtgcttactacaaaacagtaaaatatttcactctgtaaatcatcactaagtagttattctgtcctgttgattatgagcctccaaaaatgtttaatgcttgaaggatggtttgggaggcagggaatccttttcttaaaacaactttaatgaggcatatgttacatatcataaaacacccatttcaagtgtacatttcagtgattttagtaacttccctcagtggtgtagctgtaactattactcagttttagaacatttttatccctcccaataagatccttcatgctcttttacagttaatcctgttcttacccccggcaaccactaatctactttctctataaatttgccctttctggacagttcaaatcaatggaatcatacaatatgtggtcccttgggtctggcttttttacttagctaatgtttttgaggtttgtccatgacagataacgtcttggtagtttgttccttttattgctgagtagaattctgttgatggatgtaccacattttgtcagcagagagccttttaaacttggattccaacttcctgttgtctaaacggaaccctccgaacgtaggacttataggggaagctgctgtgcatgtcaaaaaaactactaatcagaatgagctttgtcatccagagccagaactgctgcagaaatttttataattttgcaacttctttttttacaaggaacttttgtgctactacacatcaggacttttgaagcatccaataaatccatttaataagtatgagcatgtgtctgagtggacaagaaagtgaaaccatccatgctacattggataatttttcctcccccagactggatagggaatctcaactttcaaaatagagtatcctggctccatttacaaagctgcacaggtattaaagatcgtgctgcctttgttaggcagatttggaggggaggcccaacagcaaagatggagaggaaaaagggagtggagcttgtggaacaggaagccccccagggtctgtgcagggctgctcagctcttgaggatgttgtggatggtgaagtggtgatggtgtcctggagcagcccagcacctccactgggcccagaaggtcttgacttcggacacttacccctgtttcacaagtgtttataaagctgtttttgcttttgtttttctcctaaataatccttacttggtagttattaatccttctttgggggagggacagggctttaaaactgaagaaaataattttcataaaaatatcaaaaatggaaaaaagttactttgtaaaaaatttgctatacaaaccaaatggcagctgttgagaatctcaataaaatgttaaatgca

SEQ ID NO: 67973 - DNA, 6253 bp, Homo sapiens
  misc_feature (162)..(162): n is a, c, g, or t
ctggcaagtggtagtggcgcttctcgggtgctgtgcttcacgttttggtactaaaggccgagactgttgtggcgacggcgacctctacggcaacggcttaagctctcggaggagtggcagagtacgatctgaaggaggggcttctggttagcccaggttccntcataatgaatggatccaatatggcaaatacatcaccgagtgtaaaatccaaagaggaccaggggttaagtgggcacgatgaaaaggaaaacccatttgcagagtacatgtggatggagaatgaagaggatttcaacagacaggtggaggaggaactgcaggagcaagacttcttggaccgctgcttccaagagatgctggatgaagaagaccaagactggtttattccatcacgagacctgcctcaggccatgggacagttgcaacagcagttaaatggactgtcagtcagtgaaggtcatgattctgaagatattttgagcaaaagtaacctgaacccagatgccaaggagtttattccaggagagaagtactgagccgagaaagctttgaggaagacttgtctgtccccacatctggggatagtaatgcacaaaatggtggagctgaagagggggatggggcgggcgaggggtgcacagcgggaaggggagtggtggtctcacgatactgtgactctgagtaactaatatgctcagtcttattctaagcctctgagtatttctattttgttctgctgacttttgtttggggagtttcctgttttgtttttttaaatagctctttcgagttaaggaaattgcattttccccccttcatcagaagtgttccgcggtgtgtatttaaacaaaataagctgactaagaaaaactggatatttaggaaatgcccctctcaccctgctgtatacttatcagggacagtgagcacctggagagctttttgtggaatctattgagttggatgggaaaagggacaagcagaaagagcaggtggtgcaaactggaatttgaggctcagctgccccacccccggggtctcctgcaatgaactcggataaccaatgtgctgtcaagcccttgcctgtttgtcctgaaccccattcaagaaaacacagacttaaagtacttagtttacagtaacttttgatgattgttgaaagttgtaaatcagaaggtagggctgtgatggtggttgtcacttgagtcatttagttactgttgtcctgttcataagcctgtgttcaccaccaccatcagactcaccatttataagtagaagagcactagggttgatctgccacctcatctttcatgaagtctattccccagcctcctttttaagaaaagatactgctaccaaaggcataggggaggcctgctgtgctggcaattagcatgagcctgcagaagtcatccttgaatctgttgtgtcttaattttatttggacagtttttttttccagcctcatcaacacttggtcttcctggtgtcttaattccctcagacaagtttatgcacttttttaaggaaatatttttcaggacactagtaagaagctcagttcacagtttggatatttcttcccacattacagaattatggaaaggaactcaaaatcagcctaggaaagtgagtcctgcttgacccatgtgactgtgtacctgaccttctgggatcttttcagctattaaaacattttactgttcccacatacccagctttgcaagttttgtagattgacctcttagggtgtgtttctttgtctttcctgcctttaacttgctggggtcttttgttgctacccctaaggaactaaactgggtgccaggagctaccttcgtgtatagagatgtagatggcagtgtggggtacaggagagccatccaggccattctcccagggatgaggaattggagagccctgaagataatagtggcttctttctgattgctactgtgctgtgtgataggcctaatagggaaaagatatgtaacttgaaacaaagttggtataaattcagtatgtggctgtgggacagaggttggaaggaaaggactagggtatggaaagctgaagaaattctccttatgagctctcgttgactttttgaacagtgataagctaatgccagatttaaaatacacattttttcctatttgagtctttaggattatatcatttgaaaaaattgccttccttgttaggtcacatgtcataggagagtagcttagagaacttgcattaccagacagacacattaattcccaaagcctctatgttgagagaatgaaactgttaactctttttcagagaggactatgaataaagaaacttctttattcaagcttcagctttcagctgggttgtttcctctaaaagggaaagggcattgcaagtgcatagaggaaatctctcccttctgggactgcttttcctccttcatcctcgtgagcctgtccaagctcagaattccgaaggctgttagaaatgcgttgggattgcagagagaaaggagcttgtctttccttctgctgtgctggtctgttttggatgtcagtcttcaggactatgaaaacttcctgccagtttagcatggacactgagggctggcatttctagtcttcttcagacactgaacatactgactccaggtataggaagcagctagcaaattgattcttttttaaatgcataggactctgcttccggcggttcctcttgtagtccaactctttttgccatctatttatgttgggaggtaggggcacaattgtcactcacaacacaggctagttagagtttgctaccttcttagcagaaaatgcatgtgtgtcttgttggaccttcactggggaaaggctgggagcctctggctgtcagtgacttttctcacagaagaagaaccagcaagccagactggacacctttaccctttaatggtaagacttgtatttataaggggtaattttgatgttgaatttaagccactactttgtttaaacttttttaaattggcaactagaagtttgagaatttgtatagaaatggaacatgtatttctaacagttgccaatctggctggtcccaatgttagtttattagtgattgatctgtaattattgggattatttattcaactctaaaattccaagatgaaaataatttatctctttcttttcaagggaaaaaacccaaatgaatgcattttcagtttctccaggcctttgaactgcagcagaaaattcaaggatacagcctaggcctgggcaaatgcagccctgggtctttgggccagtttctgacaataatagttgagttttgggaatcacataagggtgaaaccagaaacgatcctaaggaaaggcttgacctttgttaacacctttagtttccaaagtcacagcagctggggtccctcttttttttttttttttctttttttttgagacatagtctcactctgtcacccaggctggagtgcagtggtatgaccatagctcactgcagcatcaaattcctaggctcaagcaatcctcccatcttagcctcccgagtagctgggacaacaggtacgcaccaccacggccagctaattatttttattatttttattttttgtagagactggatcttgctctatttcccaagctactcttgaattgttgtgctcaagtgattctcccatctcagcctcccaaagtgctgggattataggctgggtgtggtgagccaccccagcctggggtctctttaattaaggttataatgctaaccatggcttaaaatactaagcaacattttccaaattgtttattactattgctttgattttggagaagctgggaagtaaggaggtgaggtgaatactctgataattaacacgtgttagagaggaaagttgtgtgaagaggctgccaaagtaaacagcacgaatgaatcttcttgtactagggctgctgcaaaccccaggtagacaaatgacagcccaggctcctgaaccatcaggaacccaggaatctacccaactgtgaggagggggcaggccttcgtcaataagggtcccaccatcacgggctaataatctttctcagtttaggtgatattgaggtattgaaactgttagaaatctgacagatttgaccaagatttggagacgtccacataattgggaaggactgagtgtccctagccactctcctctgggataacgcggacgtcattagtttgcgaagtgggtggggagaacaggaggattgactctaatttggtgtgtagtgggggccttgatgtccttctgcctctgtccacatttccccatgtgactcattgcaccctgcattgctcacagggatcattagttctcccggtagacagagcacctctgcagcctctgctctgctgccttgtgaatttcctacacagacttggttagttacaatttggaaacagtttttttgggtttttttcctttgttttaatcttctcacaatgaagctgctattggtgacagggacaggggagcaggaagccaacccagggaaacatgcgagtttcctgcacaccacttagtcacctgccctcactggccaaccccctactgctgttcccagtcagtctggtttttagaggcatcgtggcaatagaatagctggatacactaatctctacaaggtgtcaggcaggagattcaccttccccagtcccaggggacaggagagaaatctgtaaagggacagatgcaccatctttatttcaaaagaaaaagctccctcagattgtgttactaggagtctcttttgtgacatttactgacctttctccccaatcttaccttcctattggctactttttaaataaaaataaacattttaggctaatatgacaaaaatgagataaaatcttaaaaacattgtactagtgtacagttactaaaatgtgcttactacaaaacagtaaaatatttcactctgtaaatcatcactaagtagttattctgtcctgttgattatgagcctccaaaaatgtttaatgcttgaaggatggtttgggaggcagggaatccttttcttaaaacaactttaatgaggcatatgttacatatcataaaacacccatttcaagtgtacatttcagtgattttagtaacttccctcagtggtgtagctgtaactattactcagttttagaacatttttatccctcccaataagatccttcatgctcttttacagttaatcctgttcttacccccggcaaccactaatctactttctctataaatttgccctttctggacagttcaaatcaatggaatcatacaatatgtggtcccttgggtctggcttttttacttagctaatgtttttgaggtttgtccatgacagataacgtcttggtagtttgttccttttattgctgagtagaattctgttgatggatgtaccacattttgtcagcagagagccttttaaacttggattccaacttcctgttgtctaaacggaaccctccgaacgtaggacttataggggaagctgctgtgcatgtcaaaaaaactactaatcagaatgagctttgtcatccagagccagaactgctgcagaaatttttataattttgcaacttctttttttacaaggaacttttgtgctactacacatcaggacttttgaagcatccaataaatccatttaataagtatgagcatgtgtctgagtggacaagaaagtgaaaccatccatgctacattggataatttttcctcccccagactggatagggaatctcaactttcaaaatagagtatcctggctccatttacaaagctgcacaggtattaaagatcgtgctgcctttgttaggcagatttggaggggaggcccaacagcaaagatggagaggaaaaagggagtggagcttgtggaacaggaagccccccagggtctgtgcagggctgctcagctcttgaggatgcagcccagcacctccactgggcccagaaggtcttgacttcggacacttacccctgtttcacaagtgtttataaagctgtttttgcttttgtttttctcctaaataatccttacttggtagttattaatccttctttgggggagggacagggctttaaaactgaagaaaataattttcataaaaatatcaaaaatggaaaaaagttactttgtaaaaaatttgctatacaaaccaaatggcagctgttgagaatctcaataaaatgttaaatgca

SEQ ID NO: 67974 - DNA, 2204 bp, Homo sapiens
  misc_feature (90)..(90): n is a, c, g, or t
atttgaaaggtcaaatatcatcagtggcaataaatactgtgtcagttatcttccttcaagtgacaggctcatttaagatatttttgaganaatgtctgccagatacccagtgcttgagtggcagttgcttattctttcaagtaataacagtggtttgtgaaaatgttcatgattcaaagaatttcatcctaagcactttttcttgacacagtcattgcacttggttgtgcagcacagagctccgtatgcacttcccgtctcgtcactgctcgttacgttaataagacctctgtcaagggttgatatttaatcaagttaacactttttactgcttcatcgagggcattcttaagttaaactgactttttaaaacacagagtgaggaatcactaattccacagtacagcactactgctgccttgattagttccaagagccggtagttttaccaccatagcttttctatcatcagtgcaaaagtttcactatagcttttttatgatcggtgcaaaagtcagcactgtaaaaagaaatagttttattatgaaaatcgttttggtttcatgggccatattttgagaaccactgatgtctaagcctcagtttcctcatctgcagaatggagataatagtgtcccatttcaaagggatgaagatttcatgatttaatgcatgtaaagcacttagcattgtaccttacatagaacaagcattcagtaaatgttaactacccctattaatttcttgaaggaaggctgaacaataaaaacattttaaaggaaaaaaaggaaatctaacttagtcctactagcaaaacacaactgagttaactgttgggatttttgtccattcctcacacttttttcagtataatcctttcttttccctttttgtatagatacagattatcttatgtcaacatttgctgatgagaattccagggagcatgagtttcttgggttctactagttccacagaagcagtagtatagcctgatggtgaagaggcagattctagaggcagactatcatgggtcaaaccccagctctgccacttcctagccatatgaccttgggaaaggcatttaacttttttctgctgtactacctaccccattaggcttgttgtgaggattaaataagttagttgatgtaaagcatagaatagtgccaggcgtttagtatgcagtcagtatgtgttgcttattattaaatgaggaaagggctctctggttaaataaagttgggaaaacctgaactaaaaaaaaattaagcaagatttctttctttactgtaggattatttagtctttaatatgaggtatgaatttttaagagggatcttaaatcacatgaaaccgacttaaccatgggaatctttttgacatgggtatcttacagagctaatgagccttttctttttgagcatactaaatatccttaggctcttatattactttgttttcatcaggggtgagttcatttggggtggttgattttattaactgtctgttttagcattaggtttagaactcaggatgtttttaagaggacacacttcaaagtagaatattagttacaacatctgttctcttgtttaatattatgcagtctcagattggcctacatttgacaactactttacatctttgtggaaagattgctcaagtggtaattacagggtagatttcaatgcattgcacctatcctttaatctcacattcattctaataaaatatttgtagaatgaatattttgttattctgtggtctacatatgcctatgaaagtacgtaagcctctctaaaaacgaacaattctactgggctattattctgacagcaactctggctaatgcagttcccatttagtgagattttagcagtgccatgtctttgaagtataattttgaagcactctccgataactataatgctagaatcatttgatgatatatgtggcccaatttggtgtgaaacagaatgaaccttctaaaagaattactgctttcaattcacacctagttttaaattgcattcaagtaaaaaaactagcattttttttcttgtctttcaaggagaagtatgttttctctccacagattccttacttatatagtagtaatacagagaaattctaaaaatatttgaaataaaaatatagccctggtagggaatatttggatttttagaacccaagctttaatg

SEQ ID NO: 67975 - DNA, 359 bp, Homo sapiens
atagtgtaaattgctagaaccatttagaaaaagtacttgtcattgtctataaacaatcattcatactgctaagatcatttgaggatttttataataaaattataaacatgcacacacacacacacacacacgcacgcacacaaatatatacatacatactcatccatactctcattcagcaattatatggggaagattgacattgatattttctgaattagaggttagaggttagttttcatatacactgattaattacatattttttacataaaagttatcaaatgtaaaacaatgttctttttttttttactgggcagcatggcatacattgttcttatactcaccaactatatctt

SEQ ID NO: 67976 - DNA, 761 bp, Homo sapiens
cagcagatgcaggccgttcttccataacagaatagaccagtcttctcttgcttgtaataaggtcacctaagccaatggtttgtgaggagggttttacttttctcaagatctacacccatccctcctgacatctaaaggttgaaatagagtcggatctcagcatactcaagggggataaggcacagaggctggcatagaagaaggctcatactcctaaagacatgcaagatttttatatttgtattggcagaaaactgagtgatatacatgggaattctaaggattttaaactaagaggaatatatcattgaattgggttgaatttattgacatcggtgcatgaacctgagattctgggtgtgatatgttggcttgtgtgctaataataatatgtagtctcccaggagcctttaaagggacacatccctgctgacaccttgattttaacccagtgagacccattttggatttttgttttccagaactgtaagagaaatttctgttgttgttagccactatatttggattagtttgttaaagtggcaataggagaccagtacactcttttagcctagacagcctctctccctcttcctacaacacaaccaaactcaaactgaagtcaccagatcacctgcccttagagcttgggccatgcaacatcctccagaatggagttaggcagttctgcaaggcttagctgtggaatgaagtgagaccgccccatctcattagcacaggagaaactggaaactagaaaa

SEQ ID NO: 67977 - DNA, 491 bp, Homo sapiens
ccatggagcccactgccttgggtttttcacttgcctgggcaggtagacacactcgggaggaggtagcaaaaatgattcctgagcttaagtcagctattacaaggctgtgtctggttctccagctctagagatgcccaatgcacaagactcccgatggaaagagaatgccgatggagttgggctgccaggccttttctcctaggttgcagcactggtggagaggagaggcatctggaggaggggagccatgtcaagcgcgtatgagcacacaccttctctctcgggtcctgggttcctttttgagccgtggatgagaaaatgagaggcgtaaacaggactgatttcaaacgttctgcctaactatcatggcaaagagaaggaagtcatcccctagagtgatgaactagcttcttcagaactttcttggaatgagaagaaaatttaattaatccagggttattaaatggattattactaattatattattaaa

SEQ ID NO: 67978 - DNA, 480 bp, Homo sapiens
gaaaaaaggaaaataaacctcacctacggtttcttcacaaaggtcaggcaagaaagaattattcaggaactcacccaggccctccagagtgaggtgcccccagggctccctggaatggccctagcacgcacacggcggccaccttggcgaccacagtggcggcacgggactctgtctctttagaggcccagatggagacagtgcaccccgagttgctcaggcctcccctgaacctgttacaaccttcactaaatccacaaccacacacggcttcatgggtcccacgtcagcaaaacgtcccatgtcagctgctttcgaccttcatttctttgctttcagaggaaaaaacaccccaaagacaggtaacaagtgtgacttgacagtactgcgacaatactcctgtttgtgaaactcggaacacaagaatctggaggctgtgtctccagcaaatgtccagagcgtactgttttatgtattcaa

SEQ ID NO: 67979 - DNA, 310 bp, Homo sapiens
aaaggtagccccacatggggttcagcacccttagaagtgtacaacatcaagctcatttttgtttagactttctattgtggatttccacctttaaaaaatcttgctttaagatgctggggttggggggcatggggctgtctcagaggaatgcaattcaaatcttatgagaaatcagtatttgttaaatcctgtgactgaaataaaaacgtctcctgcggggcgtggtggctcacgcctgtaatcccagcactttgggaggctgaggcgggtggatcacgaggtcaggagatcgataccatcctggctaaca

SEQ ID NO: 67980 - DNA, 149 bp, Homo sapiens
gggacccttaagttcagagtcttctgggaaatctttttattcattcatccattttcacatatattttgggtgctgaatatgtgccaggcactattttagtcatcagggataggggcattgaataaaagaagtattcctattctcagaaa

SEQ ID NO: 67981 - DNA, 821 bp, Homo sapiens
taaaacttcggctagtagaggctggtgttaattcggccgaggctcatctttgccagtacaggagctcgtgccgtggcccacagcccacagcccacagccatgggctgggacctgacggtgaagatgctggcgggcaacgaattccaggtgtccctgagcagctccatgtcggtgtcagagctgaaggcgcagatcacccagaagatcggcgtgcacgccttccagcagcgtctggctgtccacccgagcggtgtggcgctgcaggacagggtcccccttgccagccagggcctgggccccggcagcacggtcctgctggtggtggacaaatgcgacgaacctctgagcatcctggtgaggaataacaagggccgcagcagcacctacgaggtgcggctgacgcagaccgtggcccacctgaagcagcaagtgagcgggctggagggtgtgcaggacgacctgttctggctgaccttcgaggggaagcccctggaggaccagctcccgctgggggagtacggcctcaagcccctgagcaccgtgttcatgaatctgcgcctgcggggaggcggcacagagcctggcgggcggagctaagggcctccaccagcatccgagcaggatcaagggccggaaataaaggctgttgtaaagagaaacaacccaaacaccacacaaccacaccaccaccaacacaccccacagagacgcaaacaaacgaaaaaaaaagagactgacgagcacgaggacaagcgcaccgacacaatcaccaacgagaaacaggagccccaaggcggctaaacaaaaccgccacatacaaa

SEQ ID NO: 67982 - DNA, 870 bp, Homo sapiens
cgcaggctcgcgcacgccccctgacgtgtgtcctcaggcttataatagggccggtgctgcctgcggaagccggcggctgagaggcagcgaactcatctttgccagtacaggagctcgtgccgtggcccacagcccacagcccacagccatgggctgggacctgacggtgaagatgctggcgggcaacgaattccaggtgtccctgagcagctccatgtcggtgtcagagctgaaggcgcagatcacccagaagatcggcgtgcacgccttccagcagcgtctggctgtccacccgagcggtgtggcgctgcaggacagggtcccccttgccagccagggcctgggccccggcagcacggtcctgctggtggtggacaaatgcgacgaacctctgagcatcctggtgaggaataacaagggccgcagcagcacctacgaggtgcggctgacgcagaccgtggcccacctgaagcagcaagtgagcgggctggagggtgtgcaggacgacctgttctggctgaccttcgaggggaagcccctggaggaccagctcccgctgggggagtacggcctcaagcccctgagcaccgtgttcatgaatctgcgcctgcggggaggcggcacagagcctggcgggcggagctaagggcctccaccagcatccgagcaggatcaagggccggaaataaaggctgttgtaaagagaaacaacccaaacaccacacaaccacaccaccaccaacacaccccacagagacgcaaacaaacgaaaaaaaaagagactgacgagcacgaggacaagcgcaccgacacaatcaccaacgagaaacaggagccccaaggcggctaaacaaaaccgccacatacaaa

SEQ ID NO: 67983 - DNA, 924 bp, Homo sapiens
acgcgtccgtgcagcggaggcttcctgagccccctggagagcctggcctgggcccgggtgtggagaccctcccgggctttcaatccgggcaggaggcagatggcagactcagcagtcacgaatcgcttaattctgaaagtctggtgagaagacacggcgagaatcggggtccagcacagatgatggcgacagcggagaagggaagggctgggacctgacggtgaagatgctggcgggcaacgaattccaggtgtccctgagcagctccatgtcggtgtcagagctgaaggcgcagatcacccagaagatcggcgtgcacgccttccagcagcgtctggctgtccacccgagcggtgtggcgctgcaggacagggtcccccttgccagccagggcctgggccccggcagcacggtcctgctggtggtggacaaatgcgacgaacctctgagcatcctggtgaggaataacaagggccgcagcagcacctacgaggtgcggctgacgcagaccgtggcccacctgaagcagcaagtgagcgggctggagggtgtgcaggacgacctgttctggctgaccttcgaggggaagcccctggaggaccagctcccgctgggggagtacggcctcaagcccctgagcaccgtgttcatgaatctgcgcctgcggggaggcggcacagagcctggcgggcggagctaagggcctccaccagcatccgagcaggatcaagggccggaaataaaggctgttgtaaagagaaacaacccaaacaccacacaaccacaccaccaccaacacaccccacagagacgcaaacaaacgaaaaaaaaagagactgacgagcacgaggacaagcgcaccgacacaatcaccaacgagaaacaggagccccaaggcggctaaacaaaaccgccacatacaaa

SEQ ID NO: 67984 - DNA, 359 bp, Homo sapiens
ggtgggcctggggctggcgccgcagtctctgaacctgtgtgacgcctgcagggctgggacctgacggtgaagatgctggcgggcaacgaattccaggtgtccctgagcagctccatgtcggtgtcagagctgaaggcgcagatcacccagaagatcggcgtgcacgccttccagcagcgtctggctgtccacccgagcggtgtggcgctgcaggacagggtcccccttgccagccagggcctgggccccggcagcacggtcctgctggtggtggacaaatgcgacgaacctctgagcatcctggtgaggaataacaagggccgcagcagcacctacgaggtgcggctgacgcagaccgt

SEQ ID NO: 67985 - DNA, 377 bp, Homo sapiens
agggtcccccttgccagccagggcctgggccccggcagcacggtcctgctggtggtggacaaatgcgacgaacctctgagcatcctggtgaggaataacaagggccgcagcagcacctacgaggtgcggctgacgcagaccgtggcccacctgaagcagcaagtgagcgggctggagggtgtgcaggacgacctgttctggctgaccttcgaggggaagcccctggaggaccagctcccgctgggggagtacggcctcaagcccctgagcaccgtgttcatgaatctgcgcctgcggggaggcggcacagagcctggcgggcggagctaagggcctccaccagcatccgagcaggatcaagggccggaaataaaggc

SEQ ID NO: 67986 - DNA, 833 bp, Homo sapiens
cgcaggctcgcgcacgccccctgacgtgtgtcctcaggcttataatagggccggtgctgcctgcggaagccggcggctgagaggcagcgaactcatctttgccagtacaggagctcgtgccgtggcccacagcccacagcccacagccatgggctgggacctgacggtgaagatgctggcgggcaacgaattccaggtgtccctgagcagctccatgtcggtgtcagagctgaaggcgcagatcacccagaagatcggcgtgcacgccttccagcagcgtctggctgtccacccgagcggtgtggcgctgcaggacagggtcccccttgccagccagggcctgggccccggcagcacggtcctgctggtggtggacaaatgcgacgaacctctgagcatcctggtgaggaataacaagggccgcagcagcacctacgaggtgcggctgacgcagaccgtggcccacctgaagcagcaagtgagcgggctggagggtgtgcaggacgacctgttctggctgaccttcgaggggaagcccctggaggaccagctcccgctgggggagtacggcctcaagcccctgagcaccgtgttcatgaatctgcgcctgcggggaggcggcacagagcctggcgggcggagctaagggcctccaccagcatccgagcaggatcaagggccggaaataaaggctgttgtaaagagaaaaaaaaaaacagcaacaaaaaaaaaccggggggctcaatccgggggcggcaacaagcgccctgccacagggccagggccaacacggcccgcacccatttcggccacaggggaccccgcgggcccaa

SEQ ID NO: 67987 - DNA, 470 bp, Homo sapiens
gcggccgctccaacatcagaatggtgcagcacctacgaggtgcggctgacgcagaccgtggcccacctgaagcagcaagtgagcgggctggagggtgtgcaggacgacctgttctggctgaccttcgaggggaagcccctggaggaccagctcccgctgggggagtacggcctcaagcccctgagcaccgtgttcatgaatctgcgcctgcggggaggcggcacagagcctggcgggcggagctaagggcctccaccagcatccgagcaggatcaagggccggaaataaaggctgttgtaaagagaaacaacccaaacaccacacaaccacaccaccaccaacacaccccacagagacgcaaacaaacgaaaaaaaaagagactgacgagcacgaggacaagcgcaccgacacaatcaccaacgagaaacaggagccccaaggcggctaaacaaaaccgccacatacaaa

SEQ ID NO: 67988 - DNA, 621 bp, Homo sapiens
agactaaataatattccattgtatgtatatgcttaccacattttgtttatccattcagccatcaatggatatgtgggtggctgcattgctcattactgccaccccaggaaggtcgtatagtggttaaatctgtgctcattacacctgggtatctcttaggagtttcttgtttgccctcttgtgtaattacggtcttgtttttttcagtaatgtcctgtttgcccttcttatcagcatctatctagctacattctgacaggataactgcaaactgaatgattcctgggcatcataatggatgtttctttctacttaggtgtctcccctcctctctgcttatatctagcatgcctgttttgggtggtccctggggttgtgggatttcccaggggctacccttcctgctcttggctagatatctgccttctctaacaatgtcatcaaagattacactttgggaacaggcattttcaaggatacacagcttcaggactgctaatgttaacttttttctgcatattaattcatagtactctgttatgacaggtgctacagacccacagtccaaggagacattagggacagcccaagcagctgacagagcgatacactatcacaaaa

SEQ ID NO: 67989 - DNA, 2973 bp, Homo sapiens
agtcccagcggcgcagccacccatgcgcgcgcgctcgcaagaccaccagcgcccagagccccagtctgaggcttggcgccgggggtctgcgggcgaggggagctctctacgtgcgaggggctagcgggagccggcacaagagggtcgaggagccaggaaccccaaacgtccggcgccaggcgctagccaagctgctgcgcgccccggcgcccagctggctcggggacagccgctgggtgtcggagaccggagctagcggattgcagcggaaaagcaaagatgtcacactggatccttggcctccagggtccattaaggtgagaataagatctctgggctggctggaactagcctaagactgaaaagcagccatggacatggcggatgagccactcaatggaagccacacatggctatccattccatttgacctcaatggctctgtggtgtcaaccaacacctcaaaccagacagagccgtactatgacctgacaagcaatgcagtcctcacattcatctattttgtggtctgcatcattgggttgtgtggcaacacacttgtcatttatgtcatcctccgctatgccaagatgaagaccatcaccaacatttacatcctcaacctggccatcgcagatgagctcttcatgctgggtctgcctttcttggctatgcaggtggctctggtccactggccctttggcaaggccatttgccgggtggtcatgactgtggatggcatcaatcagttcaccagcatcttctgcctgacagtcatgagcatcgaccgatacctggctgtggtccaccccatcaagtcggccaagtggaggagaccccggacggccaagatgatcaccatggctgtgtggggagtctctctgctggtcatcttgcccatcatgatatatgctgggctccggagcaaccagtgggggagaagcagctgcaccatcaactggccaggtgaatctggggcttggtacacagggttcatcatctacactttcattctggggttcctggtacccctcaccatcatctgtctttgctacctgttcattatcatcaaggtgaagtcctctggaatccgagtgggctcctctaagaggaagaagtctgagaagaaggtcacccgaatggtgtccatcgtggtggctgtcttcatcttctgctggcttcccttctacatattcaacgtttcttccgtctccatggccatcagccccaccccagcccttaaaggcatgtttgactttgtggtggtcctcacctatgctaacagctgtgccaaccctatcctatatgccttcttgtctgacaacttcaagaagagcttccagaatgtcctctgcttggtcaaggtgagcggcacagatgatggggagcggagtgacagtaagcaggacaaatcccggctgaatgagaccacggagacccagaggaccctcctcaatggagacctccaaaccagtatctgaactgcttggggggtgggaaagaaccaagccatgctctgtctactggcaatgggctccctacccacactggcttcctgcctcccacccctcacacctggcttctagaatagaggattgctcagcatgagtccaattcagagaacggtgtttgagtcagcttgtctgattgaatgataatgtgctaaattgattacctcccccttaaagcgaacactgaaatgcaggtagacaattcaaagtctggagaagagggatcatgcctggatatgatctttagaaacaacaaaaatagaaaaaaataagtatctgtgtgtttgtgtattgaaaactcaatatgtaatcttgtgtttttatatgtatacttgtatattcctatttattctctgtataggcattacctacgttcctgtgtttacatacacaagtagcaaattcgagtatgcatagtgtagatggacatttgccacaacacactgcccgcagaaatggacttaccgtgaagccaataaagttcaagcttcagggatctctcttgcacgggccttgccaaggcccaggagggacttgggcagtatgttcatgtggtcatatgtttttgtaaaaaattgtgaaagtaagatatgtttgtattgtttttcttaaagaggaacctcgtataagcttcaagcctcacaaaccttctagcctctgcccttggggatttgcttcattaatttcaggcaagtgaggtcaatgtaagaagggaaagggagaagatatttgaagaaccagaatgtaaattcatgtgtttccacttctcagatatagtcagagaattattcatttgcccaaaaggacttaagtggttgtggtcatccatcattgtatttatcaagacaaagccaactttgttataagattgcatttttttcttttcaaattgctttagtttttcttagggagctatgagggggaaaaatcactaacatgaaaggcaaaaaatggactatgattcctgtggggaaacaatttcattctctccatcgtgaaaataagtgaataagagtgaagcaaaattacacctttatgagaaaccataaaattgtttttatttttcaggccagacatagcttcctaatgaaagaaaatggaaatgtaattcgacgactcctcaaaggggactttagaggacttcatacaaagctgggcattaagaaaaccacaatgcatggccgggcgtggtggcttacacctgtaatcccagcactttgggaggccgaggtgggtggatcacccgaggtcaggagttcgagaccagcctggccaacatggtgaaaccccatcactactaaaaatatgtaaattagtcgggcgtggtgtcacgtgcctgtaatcctagctgctcgggaggctgaggcaggagaatcacttgaacttgggaggtggaggttgcagtaagctgagattgtgccactgcactctagcctgagcaacaagagcaaaactcagtctc

SEQ ID NO: 67990 - DNA, 2123 bp, Homo sapiens
cccttgctgccgcctctcgcctcacgcccccagagaagagtttctccaccaggcagcaggtgaaggtttttttccaagtcacatgattcaggattcagggggagaatccttcttggaacagagatgggcccagaactgaatcagatgaagagagataaggtgtgatgtggggaagactatataaagaatggacccagggctgcagcaagcactcaacggaatggcccctcctggagacacagccatgcatgtgccggcgggctccgtggccagccacctggggaccacgagccgcagctatttctatttgaccacagccactctggctctgtgccttgtcttcacggtggccactattatggtgttggtcgttcagaggacggactccattcccaactcacctgacaacgtccccctcaaaggaggaaattgctcagaagacctcttatgtatcctgaaaagagctccattcaagaagtcatgggcctacctccaagtggcaaagcatctaaacaaaaccaagttgtcttggaacaaagatggcattctccatggagtcagatatcaggatgggaatctggtgatccaattccctggtttgtacttcatcatttgccaactgcagtttcttgtacaatgcccaaataattctgtcgatctgaagttggagcttctcatcaacaagcatatcaaaaaacaggccctggtgacagtgtgtgagtctggaatgcaaacgaaacacgtataccagaatctctctcaattcttgctggattacctgcaggtcaacaccaccatatcagtcaatgtggatacattccagtacatagatacaagcacctttcctcttgagaatgtgttgtccatcttcttatacagtaattcagactgaacagtttctcttggccttcaggaagaaagcgcctctctaccatacagtatttcatccctccaaacacttgggcaaaaagaaaactttagaccaagacaaactacacagggtattaaatagtatacttctccttctgtctcttggaaagatacagctccagggttaaaaagagagtttttagtgaagtatctttcagatagcaggcagggaagcaatgtagtgtggtgggcagagccccacacagaatcagaagggatgaatggatgtcccagcccaaccactaattcactgtatggtcttgatctatttcttctgttttgagagcctccagttaaaatggggcttcagtaccagagcagctagcaactctgccctaatgggaaatgaaggggagctgggtgtgagtgtttacactgtgcccttcacgggatacttcttttatctgcagatggcctaatgcttagttgtccaagtcgcgatcaaggactctctcacacaggaaacttccctatactggcagatacacttgtgactgaaccatgcccagtttatgcctgtctgactgtcactctggcactaggaggctgatcttgtactccatatgaccccacccctaggaacccccagggaaaaccaggctcggacagccccctgttcctgagatggaaagcacaaatttaatacaccaccacaatggaaaacaagttcaaagacttttacttacagatcctggacagaaagggcataatgagtctgaagggcagtcctccttctccaggttacatgaggcaggaataagaagtcagacagagacagcaagacagttaacaacgtaggtaaagaaatagggtgtggtcactctcaattcactggcaaatgcctgaatggtctgtctgaaggaagcaacagagaagtggggaatccagtctgctaggcaggaaagatgcctctaagttcttgtctctggccagaggtgtggtatagaaccagaaacccatatcaagggtgactaagcccggcttccggtatgagaaattaaacttgtatacaaaatggttgccaaggcaacataaaattataagaattcactataccttcccctccctggaactcaggatccaagtctagaaaatgaaaggactgggtttgaattgcttcaaaacctcttccatctcagaagaccagaccctgggaactgagattccagacacaattttggaagctctccaac

SEQ ID NO: 67991 - DNA, 1438 bp, Homo sapiens
cccttgctgccgcctctcgcctcacgcccccagagaagagtttctccaccaggcagcaggtgaaggtttttttccaagtcacatgattcaggattcagggggagaatccttcttggaacagagatgggcccagaactgaatcagatgaagagagataaggtgtgatgtggggaagactatataaagaatggacccagggctgcagcaagcactcaacggaatggcccctcctggagacacagccatgcatgtgccggcgggctccgtggccagccacctggggaccacgagccgcagctatttctatttgaccacagccactctggctctgtgccttgtcttcacggtggccactattatggtgttggtcgttcagaggacggactccattcccaactcacctgacaacgtccccctcaaaggaggaaattgctcagaagacctcttatgtatcctgaaaagagctccattcaagaagtcatgggcctacctccaagtggcaaagcatctaaacaaaaccaagttgtcttggaacaaagatggcattctccatggagtcagatatcaggatgggaatctggtgatccaattccctgattactgtggcatgatcctccaccattcacactctaccctggactctgggaagggacactgctgccttgaaactctacaaccctgaaccttgatgctggttgctgcagacaagaactgcttctaccctgggtcactgtcactgctaagtggaaagtcatgaacttgatggtaccagtcactctgggcctaaaccgacatagccaggaaacggttcaccccccacaaacagaatcatctagacctgtccatgatttggaatcgtggcccaatacttcctggccccagagagagaaaaaagtctgaccaccccctactcaaagtgccaactcatttccttcccagaattaatcacttcccaaaatgtatgactgtgtgaacatcaattcccttcaggggaaaaccccactcccacctctcaggctgtcatcttaccctatgaccccaacctgacaatcatgcaacagcccattattggtaccttttccaatgtttaggtgactcattcttatctacaatcactttgttgttctaggaaagtttttgacacagcaggcatttgatatatatttcttgattaaatgaaagattaaatgaataccatcttagatgtctgcatagtgctttaaagtttacaccactattctttcaaatagtacaagagagaactaagctgtgtactcaactgggaagaagcagaactgagagtgggagcacctggtattctgatttcttgtctagaactatactatattctgagatcactaaactacaacctcaggcgactctgcctacttttgtaaataaagttttattggaacacagccacattcattcatttatg

SEQ ID NO: 67992 - DNA, 266 bp, Homo sapiens
gtgttttagtgaatgagttaatacagaaggttcagagtaaattcttctatacagttatatctaataagataactagagatgtctaactacaatgagaccagaatagagaaaggagattaaaagttaagcaagtggaatttagaaaatgtttatagggttctatgtaatagacaattaagcataagactcaattttaaagaaaattgttgaataattatttctatagtcccttaaaaatagtactttttcctaatttgggatatgta

SEQ ID NO: 67993 - DNA, 145 bp, Homo sapiens
gtaaattcagtaaagtctcaggatacaaaatcaatgtacacaaatcactagcactgctttacaccaacaatgaccaagctgagaatcaaatcaataattcaatcccttttaccactgaaaaaaaaaatcaaatacttaggaatat

SEQ ID NO: 67994 - DNA, 289 bp, Homo sapiens
tagctatatgggaggaataagttctgttgtagtgctctatagctggtcgcatggaaataactataatttatggtatattttcaaaaagctagaagagaggattttgaatgttgtcaacacaaaagtatgataaatgtttgaggtgtttgaaatgctaattaccctgatttgatcattatgcattgtacacctgtatcaaaatatcactctgtttccataaatatgtacaattattgcatgccaactaacaataaaaggacaagataaagattcaaaaaataggaagaaa

SEQ ID NO: 67995 - DNA, 406 bp, Homo sapiens
cgaagattcaaaacctacaaaagcctgccgcagacattgaagaaccaatatatacaatggacaaacaatccagtgccggcggggtgaagaggagcgtcccctgtgaatccaacgaggtgaatgagacgatgccggagaccccaactggggactcagacccgcaacctgctcctaaaaaaatgaaaacatctgagtcctcgaccatactagtggttcgctacaggaggaacgtgaaaagaacatctccagaggaactgctgaatgaccacgcccgagagaacagaatcaaccccctccaaatggaggaggaggaattcatggaaataatggttgaaatacctgcaaagtagcaagaagctacatctctcaaccttgggcaatgaaaataaagtttgagaagctgatg

SEQ ID NO: 67996 - DNA, 143 bp, Homo sapiens
ttagaatataaggtcattgaagtagaagtaaacatacaaaaatctagggtagcaggaagctgatttgttacggtgattaaaagatttccaaaccaaaaacagaagagatatttaaaatatcactatttgtaattaaccttatg

SEQ ID NO: 67997 - DNA, 806 bp, Homo sapiens
aggaagccctggaagctgcttcctcagacatgccgctgctgctactgctgcccctgctgtgggcaggggccctggctatggatccaaatttctggctgcaagtgcaggagtcagtgacggtacaggagggtttgtgcgtcctcgtgccctgcactttcttccatcccataccctactacgacaagaactccccagttcatggttactggttccgggaaggagccattatatccagggactctccagtggccacaaacaagctagatcaagaagtacaggaggagactcagggcagattccgcctccttggggatcccagtaggaacaactgctccctgagcatcgtagacgccaggaggagggataatggttcatacttctttcggatggagagaggaagtaccaaatacagttacaaatctccccagctctctgtgcatgtgacagacttgacccacaggcccaaaatcctcatccctggcactctagaacccggccactccaaaaacctgacctgctctgtgtcctgggcctgtgagcagggaacacccccgatcttctcctggttgtcagctgcccccacctccctgggccccaggactactcactcctcggtgctcataatcaccccacggccccaggaccacggcaccaacctgacctgtcaggtgaagttcgctggagctggtgtgactacggagagaaccatccagctcaacgtcacctatgttccacagaacccaacaactggtatctttccaggagatggctcaggtaggaaggagcctccccgcctggggctgtta

SEQ ID NO: 67998 - DNA, 868 bp, Homo sapiens
aggaagccctggaagctgcttcctcagacatgccgctgctgctactgctgcccctgctgtgggcaggtgagtggctgtggggagaggggttgtcgggctgggccgagctgaccctcgtttccccacaggggccctggctatggatccaaatttctggctgcaagtgcaggagtcagtgacggtacaggagggtttgtgcgtcctcgtgccctgcactttcttccatcccataccctactacgacaagaactccccagttcatggttactggttccgggaaggagccattatatccagggactctccagtggccacaaacaagctagatcaagaagtacaggaggagactcagggcagattccgcctccttggggatcccagtaggaacaactgctccctgagcatcgtagacgccaggaggagggataatggttcatacttctttcggatggagagaggaagtaccaaatacagttacaaatctccccagctctctgtgcatgtgacagacttgacccacaggcccaaaatcctcatccctggcactctagaacccggccactccaaaaacctgacctgctctgtgtcctgggcctgtgagcagggaacacccccgatcttctcctggttgtcagctgcccccacctccctgggccccaggactactcactcctcggtgctcataatcaccccacggccccaggaccacggcaccaacctgacctgtcaggtgaagttcgctggagctggtgtgactacggagagaaccatccagctcaacgtcacctatgttccacagaacccaacaactggtatctttccaggagatggctcaggtaggaaggagcctccccgcctggggctgtta

SEQ ID NO: 67999 - DNA, 714 bp, Homo sapiens
tagagtcccagccactcgggaggctgaggtgggaggattgcttgagcctgggaggttgaggctgcagtgggccatgattgcacaacttggcaacagagtgagaccctgtctctaaatcaatcaatcaagcgagccagaatgcagtagtggcctgagagaggcatcctggaacgcagtgcggtctggctaggcttagaagtattcatgtgatttttacctgacaagggaaggaagagctgctccacgtgcagagcaaggtttcagaatgagaggagaagagcaggcactgcagagggtgagggaaagggcagcagtggactgggaagccctcaggtggaggtcagcattgcttccctcagatcatgggtgaatttgaggaactcagttaatatctttgtatgttcctccctccataaggtgagaacaagcacatgctctgcccatgtcagaaattgtctagactagtgtttttcaaagtgcaaaagcctcaacccattactgagttgagaagccaacttaatggtttaacaggattgaccagcattttttccgaaaaaatcaaaaacatctgagtgtactgcatatagaaataggtggttttgcctcatgaatattctgtttctgtgtgttcctatattttactttgtattgtgttggttttttaagagacagtccagcctgggtgacagtgagtctttgtctcaaagaaaaaaa

SEQ ID NO: 68000 - DNA, 432 bp, Homo sapiens
cagctggcctcacttgtcaacatgaaatatagtaatgtatgcttctagtgggtgttcaccttcggtgaagactgctggggtcagacggtgggaatcatacaatcaataagtgaaagctgcagaatgctaaagtaccttaaatctatgcggctcacatctcaaaatgcatccaaattacccagggatctttaaagtgctgcttatgactccggcctcagtgaaactgagggtcagccttgctggcatgctcccgactgaccccagcgctggccagtggcaaggctctaaattctagttcgtagtattggtgcctattaatgctgctccaaggagtacttcttgatcctttgtgtttaaaaacgatgttttcccaatccccaagcccacagggctggagacaattcttctgcaaataaattacattttaatgta

SEQ ID NO: 68001 - DNA, 676 bp, Homo sapiens
gtatgcctctttataagtaaggtggcattattacttgagctggtggaaggcagcacgtttcccacaattggtctcaaaagcccgggatgcctgctgagttgccatttagtttattaccttagcaaagcagagttgggggtgcgattgtcgatagtaggctttgggagaaatgattgttatatttcgtaataaatgatgtccttgagaaactcataagttgcagtgtaatcctgtcttaattgtgttgagcacgactcccactgcaataccttaaataactgaaaacatttgcctttgaaagccccaatcgacttggacaataaaaacagttgcatgttttgctctagagatattttctgccgtttccatcattccactgcctggttattcctagggagaataacagataggatactggggcttcaccactatttgatcaggtatcagtttgaaatagagaatctctgccttatgaagatagtaattcctgtagttagcatgaaaacaaattgccagtttgattttctaggacagctcaagcagaatttgtaccactaggctgtaagttttaagtatctaattttctgatttgaaagtgtatgatttaaaaattggaaaaagtttttgttataagcttcaaaaggatttactataattacaactacgtaaaattaca

SEQ ID NO: 68002 - DNA, 413 bp, Homo sapiens
cccatttatgtggcagtgtccacacttctccctagattgggctgctcggatatgcaaatatcttcagggctgtccgcagtatctatgtttttttatgaaacagcatgtttcactggcatggatactcaggaactagatttgaactcacccattggtctgcactattctataaagatctgagtttgtaaatctatttctaaaaacattaggcctcttccccaatatgtcctcaagagttgtgctgatctaaccagatccataacccctgggaagctcccaaatttgaaacatcactaaaatccatccaaggatcaaaaatctgagtctgcgagcaagaacttccaaatgaactggcatcttgtctggtaatacacaagctctggacctatgaaagaaggcagagtgcaatgggg

SEQ ID NO: 68003 - DNA, 175 bp, Homo sapiens
ttcttggcagctgtatgggaaactcactcactgtccgtaggaatgtaagctggtgggatatttttggaagattggtgatttgacaagatctctcaaaattgaaaacatagaatcctttggcctagcaaatttagtgattagaatttactcattagatacagaaatgtacaccaag

SEQ ID NO: 68004 - DNA, 476 bp, Homo sapiens
ccctttcaagtagcccagggatgaaatgcattattcaataagttctgttctctccagtgcccaaagaaatttgggagatgcagtgactctgctttagaagagaattggagatgatcatgtgttcataggaagtgtgcattacattttgaactgaaaactccccagaaaggaaacatgtaataaacagcaaggcgacttagaatgaggttcggaggaggtgaaccttcagtcctaaaccactgttctttcaacatgtagcaacccatggttacctggggagattgttccaaatgcaggttccctgccatccctagaggattctgatttttgtattcagaaatctggaatttgcaggtgaccttaatggacatcgaccctgagaattaccagcctagaggttctgcacaccttcctcaaggaccatacattacaaatgatatttctaaaatgtcatttaatctcattctaaatgaaga

SEQ ID NO: 68005 - DNA, 1747 bp, Homo sapiens
  misc_feature (805)..(805): n is a, c, g, or t
  misc_feature (1115)..(1115): n is a, c, g, or t
agagagcacattatatcccaactgtttgctcagcaagaaccactggaacttatagatcaccaccttggaatcagacagtgtgggttcatatccctgctctgccacttgttaattacttagttttgataagcctcagcttcctcatcaataaaattaggaaattataatacagtaataataattgtaactgccccataaatgtggggattgattgattaccatcctattggtggttatttttattattaagacaaacaatgatatttatagtaaagatggtgatgatacaaacccctaaagcaaggtgttgtactcatcaagcagaaataaaaataaattatgagatgcgggaaattgaatattgtaatatgtgagcaaacaaagaaggtaaactattaatgaggatccctaacagttaaatatgtgtatctacatctaatactgtctgtcgggtaaaatactaagcacatagtgccagacagaaagtatttttttaaaagctattcattcatttccttaattttctctcacataattatctaactaataatttaagaatgaagttataataatagaaactaatcaaataccaaagtataagttaatccctaaatctctttgaataagccgtgtagtacagtgacattaggacaatctttgaaaatagatttgaattcaaatttctatttttcctgttattactttgcataagttacttctgagtctcactattctcatttataaaaagggcaatctaatacccgctttgttgagctactatgaagattggatgaaataatgtagnaacactctcaatattgtatccactcatggtagaaattcaataaatggtagtagtagttattattatccctgcgattgatattgttatcattattataatcaataaatatattacagaaaaattaattctatcattatcagggataaaagcctaagaattaaaactgtgtttataaactcagcttattttagtggcagtaaacattagtgtatcctttaaatgaattttattgaacatatcctgtgtgtcaagcacatgatggtaagcaaaatgaacttggtcccagctctaatgttgttttaaatatggngaggagattaaatacctgcaaaaaggcaacaaaaataaatggtaattagtgcttctcttgaaaaagtaggggtgagacaaaacacttaacctagacttgtgaggaaaagctgagtttgggtatggcactgagaggcacccaaggaaaaggaaggataaggcttttctagaaacaacactgaaaagcctcagaagccacatagatagtgatacattccagtaacagaaaaaagaaaagtatgttgagatttgtagagtgaaaaaaaaatagtggtaataaatggggttagagagatgattttaagccttatcatgctaggttttgtgaatattaagaaaaaggggcagggtgcggtagctcacacctgtaatcccagcactttgggaggctgaggcgggcagatcacctgaggtcaggagttcgagaccagcctgaccaacatggagaaaccccatctctatgaaaaatacaaaattagtcagcgtggtggcgtgtgcctgtaatcccagctactcggggggttgaggcaggagaattgcttgaacctgggaggcagaggttgcagtgagccgaggtcgtgccactgcactccagcctgggcaactagagcaaaactccatctaaaaaaaaaa

SEQ ID NO: 68006 - DNA, 865 bp, Homo sapiens
gttttgttttcctgccgaccccagcttacccaggttttaagaccactcacttggagaatttcacttgctttccagctcagctctctatttcgaggttctaccactctaagccatcccacaccctctttacacagctctgatcctattgcttttctactcaaaacagaagtggctccccattttcaagtgaattaggactctacgaatttaattccaatcttttacaaccttgcttttattactttccctctacacgtattctgtgatccaactcaagacctgatgttttccacacacaccctgtgctttcttactaatgtgtttttacttctgatgttctcccctcactgaaagtatctttgtctctagcctttttataaaacttcctttttttctcattactcctctctggaaataataaatttaaagattttttgggaaaaagtctcccagtaacattaccaatatatgtgttacagacttaaccagacaagtacagacctttgtgaatacattcacgtaattttactgaaagccataaaaatttaaaaacagactgaagaaaagaaaaacccaattttaaaaattgggtaatgggcttgaatagacatttctccaaataagacaaacaaatagccaacaggtgccaacatcactaatcatccagggaaatgcaaatcaaaaccacagtgagatagcccatcatgccttttaggatggctgttaataaaaactaaaaccaaaaccctaccacatggaaaatagcaagtgttgacaaggatgtagaaaaaatggaaccagttagcaccatcagtgggaatataaaatggtggagctgctatggaaaacagtagggagtttcttc

SEQ ID NO: 68007 - DNA, 966 bp, Homo sapiens
  misc_feature (551)..(551): n is a, c, g, or t
  misc_feature (625)..(625): n is a, c, g, or t
  misc_feature (708)..(708): n is a, c, g, or t
ggcatgtctcggaggttggcatcacggaggcactgtgcagtccttgcaatgtcaaacttactcagtgccagcatagacggtggtctcatgcactccataggtttagggtactacaaggatctccagacagctacatttatggaagttctgatgaaaatccctcaacaaggcacagaatttgacacacttcagaaacggtattggctgatgggtttgagcaattggtggaactggtcacagtgatgggtgatcaaggagagctccctatagcgatggctctggccagtgtggttccttgttctcagtgggatgaactggcttgagttctggttactctatttggttcttggcatttactctaccaactgctctggaacatgttttgtaaagaagtagaattggcagactgactccattcagactctcctctgaggcaacagtttggccagtaaaataatgacactctgtttcaaggtgcccaagaattcccatccctccatggttcaaataatagagtattgccaatcatgttctcttcacaaaagaagagnatatgcggcctttcaatgattttgtgaaaagcagctttgatgcagcttgaagtgatgcagtaaatcatagcctntccttcagcagtgacggcaatgtgctcgctttacatcatctactccggaacaatcaggagaaaattggccagtgtctttctancaacagggatcataaagctgttggaagatgaccttttgataaatggcaacacttcttgtatacctcggtcctccagagcacaaacctgtggcagatacataccggtccagccttaaccttaccagttaaaagtttgaggaatttatgatgaggcatcaggtatgtgaaaaagaagagatcaaggctttgaaaacattaagtattttttaccaagctgggaattccaaagctgggaagccaattttttatgttgcaagg

SEQ ID NO: 68008 - DNA, 574 bp, Homo sapiens
gagcaagttactttaacttaggggttctccatttttgtgtggtgctaagaggtacatagggtggggggagggtagccatagttttcccagtccctccttaaatattccacctaggtaacatgcttgtgcttttgtttgcatatcagggtactcaacaccatacatacatatacagtccatagaacgtgtgcttactgttctgtaaggaaaactggaaccacgtcccacttggtgccctcattccctctaagcccattgtatatatacatcctggtgctggtcactttcctaatttgtgtaatacctgtctttggggggttttgtgaggactagcgacaatatttataaaagttttagaacagtctctaacatgtggcaagtattcagtaaatactatttttacatttcaatgattttattagatacttgattttacgatcattggtggaacccactgttacttctttgtacttaaaatactccgtcactgagatgtgttttattccattgccacagtggttcttaagttctctaattccaagatgatcctgcctgttgggtaatcactgtcccc

SEQ ID NO: 68009 - DNA, 474 bp, Homo sapiens
tagctactcccaaaaaactagattctactcagactacacattcttcaagtcttattgctggtcacacagggccagtaccaaagaaaccccaggatttagctcatactggcatctcttcaggccttattgctggttcttccattcagaaccctaaagtttctttagaacctttgccagccaggctacttcaacaaggacttcagaggtcaagccagattcacacttcttcctcttcacagacccatgtctcctcttcttcccaagcccaaattgctgcctcttctcatgctctgggaacatccgaggcccaagatgcttcttcgttaacacaagtaacaaaggtgcaccagcattcagctgtccagcagaactatgtgtctccattacaggccaccatcagtacgattgtcaaacgacgcccggtggacgctagcatagcaagcagcaagatctctagacgatacacgggcccga

SEQ ID NO: 68010 - DNA, 183 bp, Homo sapiens
aactcaagcggagctaataggactagtctgtctgggggaacaggaagtggaacacagggtgctaccaaaccattgtctactccacatagaccatccactgcctcagggtcttcagtggtaacagccagtgtgcaggtatgtatgttctgtacgtccatgtgataaactataagattgtataat

SEQ ID NO: 68011 - DNA, 1735 bp, Homo sapiens
tagctactcccaaaaaactagattctactcagactacacattcttcaagtcttattgctggtcacacagggccagtaccaaagaaaccccaggatttagctcatactggcatctcttcaggccttattgctggttcttccattcagaaccctaaagtttctttagaacctttgccagccaggctacttcaacaaggacttcagaggtcaagccagattcacacttcttcctcttcacagacccatgtctcctcttcttcccaagcccaaattgctgcctcttctcatgctctgggaacatccgaggcccaagatgcttcttcgttaacacaagtaacaaaggtgcaccagcattcagctgtccagcagaactatgtgtctccattacaggccaccatcagtaaatcccagaccaaccccgtcgtgaagttaagtaataatccccaactctcctgttcctcctcacttattaagacttcagataagccacttatgtaccgccttcccttatctaccccctcacctggaaatggttctcaagggtcccaccccctggtttctaggacagtacctagcaccactacctccagtaactatttagccaaggctatggtgtcacagatctccacgcagggtttcaaatctcccttctcgatggctgcctccccaaaacttgccgcatctcccaagcctgccacatctcctaaacccctgccctcgcctaagccttctgcctcacccaagccctctctgtcagctaagccttcagtatcaactaaacttatttctaaatccaacccaactcccaagcctactgtatccccaagtagttccagtccaaatgcactagttgcccagggtagccactccagcactaacagcccagtccataaacagcccagtggaatgaacatcagcagacagtctcccaccttgaatttattgccctctagtcgcacttcaggccttccacctacaaaaaatcttcaggccccctcaaagctaacaaactcatcatccactggaactgttgggaagaacagcttgagtggaattgcaatgaatgtacctgccagcagaggtagcaaccttaactcaagcggagctaataggactagtctgtctgggggaacaggaagtggaacacagggtgctaccaaaccattgtctactccacatagaccatccactgcctcagggtcttcagtggtaacagccagtgtgcagtccacagcaggagcatcattattggctaatgcctcacctctgactctcatgacatcacctttgtctgtaacaaatcaaaatgtgactccttttgggatgctgggtggccttgttccagtgaccatgcccttccagtttcccttggagatatttggctttggaacggacacagctggagtgacaaccacctcgggatctacctcagccgctttccaccatagcctaactcagaatttactaaagggtttacagccaggaggagctcagcatgcagcaacgctttcccactcacctctgcctgcacacttacagcaagcatttcacgatggaggccaaagtaaaggggacactaaattaccacggaaatctcagtgactgcccagcaagcaaaggagacgaaatgtttagttgactgatggaatctacctgatgggaaagtacttatgtggtcatagggctgctgtttctgtcgatgtttacattctctcgtcccaagcactgtggtgagg

SEQ ID NO: 68012 - DNA, 1289 bp, Homo sapiens
  misc_feature (1282)..(1289): n is a, c, g, or t
ctaagacatcatttcttttatcagatgaggaaaccaatacatagaaagacttttaaattttccctaaacaatggaagtacatgctaagtgcaataggggtatgtagaaaagagtgttcagattttagggagatttccagaaaaggcctcttcatgctggagatggctttttttaaataatggaagggagttcccaaggcaatggttgagcagtggagtgggagcccaggtaagagtatgcaggtggtagaaacaaaatattctaagacagacgggcacaaaacagcatggcttatttggggaactacaagtacctctatgttgctgatgcctgatgttctagaggacacatttcaaggcaggaacaagctgagggcatatctcaacctccccttcctcaggggcactcatccttcatccctttagcagttttactcagcatttgttctaggatgccaggctgtgaggtaagacaggtaagtgagactcagcctctaccctcagagttcacaatctaatgggaaaactaaattatcataaagatagcattacaaatgcagtgcttgacatatgcctggagcactatgagactgtaggtgagaagcaacgaaaagaggacaatccggagaaggtagcagctgtgctgtctcttaaagtctgaccaggtagtccaggtgttccctgtgtttgaggtcaaggggcagcaggagaagatgcaacagaaaagcacacagcacgagcaaagccacatagctgaaaaacagctatcacctgcaacagcttctgctgctacaatacctgtactcctcttagattttattccagtatcagccaacaacgtgatctgacaggacagtcccagccctaggaaatgaactatgattcgtgcagaccgatcgaagtcataccatacagcgatggatttgggcatgtgggccagttgggatcaagggaaaggaagcatttccattttgatcaatggggggattctgggaaagtcttctgcccgtaaaaagaaacaagccaggaaaaacgtccccttcctccctgtagacatggctatgaacggcaggatgcctgaaactgtccaggcttgttatgatggagagacacactgcacagggtgggggaaaggggaaatataccctaagaatggtagaccagaaagatgtaaagcatctgtatccttgttgaaattatagtgcctcccaattaacatacctagaactgtttacctctggacatttcattatgtgagatattaaagacctgtgtatttgaannnnnnnn

SEQ ID NO: 68013 - DNA, 683 bp, Homo sapiens
ccttcaaatgtcctgagcataatggtgtccaaaccctaaggtgccttctggtttctacaagaggtgtcaactgggttcctggtcttaggggcattggggatgtatttggaatcccgaaccaggcttccattaagatgtgtttttaaattcgtttgggtggttatgtttgcatgcttaagcacacatttgaaaattaattatagctgtactacccgatgtttttccttggggatgatggccttgttcctttttaaattctgatgcttgaattctattttctagtgatttttcacatctccctttaagtttttgctgcagcaatttgagagagtacttttgattaaatgattctgatggtgggcaccaatctacaactatgtcattaactgaagatacatgttttaatcttgttgggaataagcttacccactttctccttggtaaagcgtttacttaacaaaataatacccgagaatgtaaggtctctaagtcattactaacaaagagcaaaaataatatctgcagtattgtttttcccattgattttaagtcagtttagagtacaaactgtatattagaatttgcctgtaaaatgaattctaaaaagcagatgtaaagtctctcctgaaaatgttggcatagtaaataaaaataaagttcataattataaagttaaaatgtct

SEQ ID NO: 68014 - DNA, 989 bp, Homo sapiens
cgagccgagaagatggagagatgcacctccatcctgaaagcgctgatcatgaaacttttggagtctcatttttatttgtgcaatattttcaggcatataggctactgttcattgtatttatatatatattagaatttactaagtactttaacaagtaaaaatctgaatatgaaagaaaatatcagatttgcactttaaatgagcttaattgcttgaagttgtgcctgaaatatcgaattgcctcctattgggtgtggctttgttgaaataaatttgtaattgttgctgtttgaagatatcagtacagctgttcacagaaatatattcccagcatgtcacttttccattaaagcactaagttttctttgaatgttccattgttccgataagtattttacttttttctcagtacatcagagagagcgtgatccccctacagctgtcacttccaaatgttcctgtagcataaatggtgttacagacactgaggtgcactcttggtttctgagcagagttgtcatactggtttcctggtctctagggcactggggatgtactttgaaatcaccgaacaggcttgcaattaagatcaataaggctgcagcaccatttcaatttactttccatcttacccagtagtttttgtgtttttaaattcgtttgggtggttatgtttgcatgcttaagcacacatttgaaaattaattatagctgtactacccgatgtttttccttggggatgatggccttgttcctttttaaattctgatgcttgaattctattttctagtgatttttcacatctcccttgttttgtgggccatggaagtcttgtcatgttctggggggcaccaaattatgttcgaaacagttattgggggaagcccccctcggggggttaaaacacgaaggggcggttaaaacaaattgggtctgttttaaaagagttggttaaggttgggtataagaaaaagaggaatgaaaggtgt

SEQ ID NO: 68015 - DNA, 7646 bp, Homo sapiens
cggggctggcggggatgtgacgggcggccttcgtctcaccttccgtcctcgggcccgcaggtcgcagggcggctgcagctgggccgcggccgaggaggcagcgcgacctccgcacgattctttcaacttttaagaacaaatgcaccttatagctcatggaagaaaaaacacaaatcaagacatttttgggttccaagttgccaaagtatggaacaaaatctgtaagaagtacattgcagccaatgccaaatgggacacctgttaatttattaggaacttccaagaatagtaatgtcaaaagttacatcaaaaataatggctctgattgtccatcatctcattcatttaattggaggaaagcaaataaatatcagctttgtgcacaaggtgtcgaagagcctaacaatactcaaaattcacatgataaaataattgatcctgaaaaacgtgttcctactcaaggaatgtttgataaaaatgggataaagggaggtttgaaaagtgtttctttattcacatcaaagttagcaaagccatccactatgtttgtgtcatctacagaggagttaaaccaaaagtctttttctggaccatctaatttgggtaaattcaccaaaggcacattattaggaaggacttcatattcttcgatcaatactccaaaatcacagttgaatggattttatggaaaccgatcagctggtagcatgcaaaggcctagagcgaactcctgtgccaccagaagcagttctggagaaagcttagctcaatccccagacagtagtaaatctattaattgtgaaaaaatggtaaggtcacaaagtttttcacattccattcagaattcattccttccaccttcatctataaccagatcacattcctttaatagagctgtggatcttacaaagccttatcagaaccaacagctatccattagagtgcctctacggtcaagtatgctaacaagaaattcccggcagccagaagtactcaatgggaatgaacatttggggtatggatttaataggccttatgctgctggtggaaagaagttggctttaccaaatggcccaggtgtaacttctactttaggttatagaatggttcatccctctctactgaaatctagccgatctccattttctgggactatgacagttgatggaaataaaaattcacctgctgacacatgtgtagaggaagatgctacagttttggctaaggacagagctgctaataaggaccaagaactgattgaaaatgaaagttatagaacaaaaaacaaccagaccatgaaacatgatgctaaaatgagatacctgagtgatgatgtggatgacatttccttgtcgtctttgtcatcttctgataagaatgatttaagtgaagactttagtgatgattttatagatatagaagactccaacagaactagaataactccagaggaaatgtctctcaaagaagagaaacatgaaaatgggccaccacaggatatgtttgattcccccaaggaaaatgaaaaagccttcagtaaaactgatgaatggatagatataagtgtctctgacaggagtgaatgtacaaaacatacttctgggaataatttggtttcaccagatacagactacagagctggttcttcgtttgaactctctccatctgatagctctgatggaacatacatgtgggatgaagaaggcttggaacccattggaaatgtccatccagttgggagctatgagtcctctgaaatgaacagcatagatattttgaataatcttgaatcatgtgaccttgaggatgatgatcttatgcttgatgtggatctgcctgaggatgcacctcttgaaaatgtggagtgtgacaatatgaaccgctttgaccgaccagacagaaatgttcggcagcctcaggaaggtttttggaaaaggccaccccagaggtggagtggacaggagcattaccacctcagccaccctgaccactatcatcaccatggaaaaagtgacttgagcagaggctctccctatagagaatctcctttgggtcattttgaaagctatggagggatgccctttttccaggctcagaagatgtttgttgatgtaccagaaaatacagtgatactggatgagatgacccttcggcacatggttcaggattgcactgctgtaaaaactcagttactcaaactgaaacgtctcctgcatcagcatgatggaagtggttcattgcatgatattcaactgtcattgccatccagtccagaaccagaagatggtgataaagtatataagaatgaagatttattaaatgaaataaaacaacttaaagacgaaataaagaaaaaagatgaaaagatccaactattagaacttcagcttgcaactcagcatatctgccaccaaaaatgtaaagaggaaaaatgcacttatgctgataaatatacccaaacaccctggagacgaattcctgggtgggtattctgctccctccttctctccttggcagggctccttccaggggatcccacggactgttccaccgcaccgcagacagacctcaagtactacagccttccagcagccttcccagacccacagatcacacccagggaaaactaataaagccacaacgtatcgaggcccgcagtgaatgctcaatccaagacatgcatcagggcggtgcacatccggaagaaagctttacacacgtcttgcaccaagaaagcaactatggtttggaagagcagcctttttcatcaggcccacaattaacaatggatgtggctaagagtacaccttctgaagcaaacttaaacattactgtaaatgctcaagagccttatcatttggcaaacaatcaaattagtgacatgcagtttatacccacttctcttcagacacctcccgagtcaagtacagtagaccaggctaagagagttggaagaaatcagtctccgccagtgggttatatgtctcagcccaagtccttgcagcttttaaagccatccatattgagttctttggtaccgcctccagtttctgaatcatctccaagtaggactcccacttgtaaaaagtcaccaataatcacaacatgtaattcagcaaaacttcagccaacatctagtcaaacaaatcttgcaaataatcagaatctgaaagcatctaagctccgccccccctcaggctctttcaaacaaaaacaaacaaacagcccccaactagagcctcaaagcttccaggccaagacaagcatcccaaggccactaacacaacgaaaagaaatcatgcagaatccaaatggcaatttgcattctggggattgtttggcctctaatcgatattctcgtcttcctaaaccaaagatacattaagtacatagccatcacctgccaatttgtttcttaaaaacaatctcttctgtaatagctttatgtgcagcttgcagcttgctactgtggtggaggttccattgaaagcctgcaaatcttaaattaaaatgtggaagcttctactagtttggctccttcattttatatcctggttgaagtacatgccatttgagcataattatctcaggtaaacacgaaagtttgcttacccatttcagaggcctgccaaaggcccaaatcatgttatccatccctctccaggtcagaaaattcataatattttactgagcaggcaagaagtgtgctttgctggtttagtcctattaaggtctgtatttattgtggttgtcagaacctcaccccttttcacttgtctctcctgtgaatatggctactattttaactaaagatatggtgataatggaagatggtagtctgtaagcagagttctggccagtgttttgtatatttaaaaggtctatgcaaaagctttgtgatgaataaaggagattaggcttttaatggaaagtctatgtaagttttatttttccttgccagggtcagtcagctaatgttactgttgattcatttcccaaattccccagactgaaaatgtttcttattacatataaatcagttatatattcctttacatcttgttttacaaacacatgtgcatgcacacacacacatacacacacataccatttatgtttgtatttgttactgggtaaattttggagcgcttgagatacaccttgaaacctgtacctaaagatgtattcatttgtaacatatgttggtgctagagttttgctggtaattcaggtttgaacccttaggcttgtggatccatgatagccattttaaggttccacagcattatgtctttaattgtaatatttatatttattgattttctgctaatatctgaagactgaaataatgaacttgaaacatttgcacaaaactttgatggggtataaatataccatatatagggattgtaaactattttctatagcaaaacaagttaaaatattttgagaaaaataacaaatttaaataagactatcttgagaaagctggagttcataatattctccccctcccccatctccagtctcctaggtttcccttttctgtgttttttgtttttttctgtttgttttttgagacagagtcttgctccattgcccaggctggattacagtggcgcaatctcggctcactgcaacttctgcctcccgggttcaagcgattctcctgcctcagcctcctgagtagctgggactacaggcatgtgccaccatgcctggctaatttttttgtatttttagtagagatgaggtttcaccttgttggtcaggctggtctcgaactcctgacctcaagtgatccacccacctcgtctatggtgtatttttgaaagacaattttttaaaggtagatttgggaaaaaaatagaattgaagatgggaaattttgttttattaaaaaggtgctagaagatgtttcaaagacaatattcttattttaatacgctgtagaaggtaggtgtggaacctccatgctaccatgtgcacaaacctaattatgctttgggtcacttgtcagttcagtaaatctgccttcctcttctcccaaatcatgtcatctttaggttgttcacctgcagctgctttaaatgaattagtatctttcagatagataaccttacaaggagaatgtttgttttgagcagctgaccaaaaatatatcaaacaggattatggccaaaaagtcactcaaatttctagagattcctttaaaagatgtatgttgatgaaattgcccctttataagaaaaacaacagcaagtcttttagtagaaatttgaaagaagtgtttgctaccattttgacccattattcccttacctatcagatgaatttgccattcactggatagaaaccattcttggatttggtaagaggtgagcaagacaaatcttgtaccatactcttatgtaccagcacttctgatggagaagcagtgaagttcagaacgttcttcacatagtccagatactgttagagtcaggcaaatcagcaaagcactttgttatggagatgacccatgatggctgcagttgtaagtgggcatacatgttctatcattttgaaggagaaagaaaaccgttctcacatgttgcaaatatgtgaatcatactatattcccctaaagtaaaaccagtgacttagtggtttttggtttatttagaagttggtttagacccttatgaaacattatttacgagttggccttatccttaagggaaaagttctaaatttttaaatttatttttaattccctagtctgagggaaatgtctttattgtccattacataaaaatgttgactccagtaatttatttttctctattttttcctccatgtatttactccatttttctctattttttccttccctgatggatttgcagaaatgttaaccaattagctcaacttttctctacctttgttgagtcttaatcttttagaagataggcttaccgtatatttatgaagcataatatattaaaagaaaacaaatctaggatgcttgcatgacataaagtatttgcctgcagttttcattaaaaactgcaagaatatcatgcttgtctgcttcttagtaaatgttaagtctgaaatggaagtgaggatgtaactctactgaataatcaaagatcatcttagatttggcttgatctgtgtttattgcttctattaatgtaaatcaactctgtgccaaatcctcctccacaaaccatttattgtcttagttctagtggtatcaatgaagatagttacagtatatgaattctaagtcctgaggaagaaattttatggggtttgttaagtttcacattcgtgaaagaggaaattagtagagtattcagactttgatatttggctgttaatgggatgcatatcaaatttttaaaagaaggcttggcctaaggagtttattggtacaggtgcagatgattttaaggcattaaaggattatagagttatgtcatttagactgtttctaataactgagaccatctaacatttttcttttggagtctcatttttatttgtgcaatattttcaggcatataggctactgttcattgtatttatatatatattagaatttactaagtactttaacaagtaaaaatctgaatatgaaagaaaatatcagatttgcactttaaatgagcttaattgcttgaagttgtgcctgaaatatcgaattgcctcctattgggtgtggctttgttgaaataaatttgtaattgttgctgtttgaagatatcagtacagctgttcacagaaatatattcccagcatgtcacttttccattaaagcactaagttttctttgaatgttccattgttccgataagtattttacttttttctcagtacatcagagagagcgtgatccccctacagctgtcacttccaaatgttcctgtagcataaatggtgttacagacactgaggtgcactcttggtttctgagcagagttgtcatactggtttcctggtctctagggcactggggatgtactttgaaatcaccgaacaggcttgcaattaagatcaataaggctgcagcaccatttcaatttactttccatcttacccagtagtttttgtgtttttaaattcgtttgggtggttatgtttgcatgcttaagcacacatttgaaaattaattatagctgtactacccgatgtttttccttggggatgatggccttgttcctttttaaattctgatgcttgaattctattttctagtgatttttcacatctccctttaagtttttgctgcagcaatttgagagagtacttttgattaaatgattctgatggtgggcaccaatctacaactatgtcattaactgaagatacatgttttaatcttgttgggaataagcttacccactttctccttggtaaagcgtttacttaacaaaataatacccgagaatgtaaggtctctaagtcattactaacaaagagcaaaaataatatctgcagtattgtttttcccattgattttaagtcagtttagagtacaaactgtatattagaatttgcctgtaaaatgaattctaaaaagcagatgtaaagtctctcctgaaaatgttggcatagtaaataaaaataaagttcataattataaagttaaaatgtct

SEQ ID NO: 68016 - DNA, 7560 bp, Homo sapiens
cggggctggcggggatgtgacgggcggccttcgtctcaccttccgtcctcgggcccgcaggtcgcagggcggctgcagctgggccgcggccgaggaggcagcgcgacctccgcacgattctttcaacttttaagaacaaatgcaccttatagctcatggaagaaaaaacacaaatcaagacatttttgggttccaagttgccaaagtatggaacaaaatctgtaagaagtacattgcagccaatgccaaatgggacacctgttaatttattaggaacttccaagaatagtaatgtcaaaagttacatcaaaaataatggctctgattgtccatcatctcattcatttaattggaggaaagcaaataaatatcagctttgtgcacaaggtgtcgaagagcctaacaatactcaaaattcacatgataaaataattgatcctgaaaaacgtgttcctactcaaggaatgtttgataaaaatgggataaagggaggtttgaaaagtgtttctttattcacatcaaagttagcaaagccatccactatgtttgtgtcatctacagaggagttaaaccaaaagtctttttctggaccatctaatttgggtaaattcaccaaaggcacattattaggaaggacttcatattcttcgatcaatactccaaaatcacagttgaatggattttatggaaaccgatcagctggtagcatgcaaaggcctagagcgaactcctgtgccaccagaagcagttctggagaaagcttagctcaatccccagacagtagtaaatctattaattgtgaaaaaatggtaaggtcacaaagtttttcacattccattcagaattcattccttccaccttcatctataaccagatcacattcctttaatagagctgtggatcttacaaagccttatcagaaccaacagctatccattagagtgcctctacggtcaagtatgctaacaagaaattcccggcagccagaagtactcaatgggaatgaacatttggggtatggatttaataggccttatgctgctggtggaaagaagttggctttaccaaatggcccaggtgtaacttctactttaggttatagaatggttcatccctctctactgaaatctagccgatctccattttctgggactatgacagttgatggaaataaaaattcacctgctgacacatgtgtagaggaagatgctacagttttggctaaggacagagctgctaataaggaccaagaactgattgaaaatgaaagttatagaacaaaaaacaaccagaccatgaaacatgatgctaaaatgagatacctgagtgatgatgtggatgacatttccttgtcgtctttgtcatcttctgataagaatgatttaagtgaagactttagtgatgattttatagatatagaagactccaacagaactagaataactccagaggaaatgtctctcaaagaagagaaacatgaaaatgggccaccacaggatatgtttgattcccccaaggaaaatgaaaaagccttcagtaaaactgatgaatggatagatataagtgtctctgacaggagtgaatgtacaaaacatacttctgggaataatttggtttcaccagatacagactacagagctggttcttcgtttgaactctctccatctgatagctctgatggaacatacatgtgggatgaagaaggcttggaacccattggaaatgtccatccagttgggagctatgagtcctctgaaatgaacagcatagatattttgaataatcttgaatcatgtgaccttgaggatgatgatcttatgcttgatgtggatctgcctgaggatgcacctcttgaaaatgtggagtgtgacaatatgaaccgctttgaccgaccagacagaaatgttcggcagcctcaggaaggtttttggaaaaggccaccccagaggtggagtggacaggagcattaccacctcagccaccctgaccactatcatcaccatggaaaaagtgacttgagcagaggctctccctatagagaatctcctttgggtcattttgaaagctatggagggatgccctttttccaggctcagaagatgtttgttgatgtaccagaaaatacagtgatactggatgagatgacccttcggcacatggttcaggattgcactgctgtaaaaactcagttactcaaactgaaacgtctcctgcatcagcatgatggaagtggttcattgcatgatattcaactgtcattgccatccagtccagaaccagaagatggtgataaagtatataagaatgaagatttattaaatgaaataaaacaacttaaagacgaaataaagaaaaaagatgaaaagatccaactattagaacttcagcttgcaactcagcatatctgccaccaaaaatgtaaagaggaaaaatgcacttatgctgataaatatacccaaacaccctggagacgaattcctcctcaagtactacagccttccagcagccttcccagacccacagatcacacccagggaaaactaataaagccacaacgtatcgaggcccgcagtgaatgctcaatccaagacatgcatcagggcggtgcacatccggaagaaagctttacacacgtcttgcaccaagaaagcaactatggtttggaagagcagcctttttcatcaggcccacaattaacaatggatgtggctaagagtacaccttctgaagcaaacttaaacattactgtaaatgctcaagagccttatcatttggcaaacaatcaaattagtgacatgcagtttatacccacttctcttcagacacctcccgagtcaagtacagtagaccaggctaagagagttggaagaaatcagtctccgccagtgggttatatgtctcagcccaagtccttgcagcttttaaagccatccatattgagttctttggtaccgcctccagtttctgaatcatctccaagtaggactcccacttgtaaaaagtcaccaataatcacaacatgtaattcagcaaaacttcagccaacatctagtcaaacaaatcttgcaaataatcagaatctgaaagcatctaagctccgccccccctcaggctctttcaaacaaaaacaaacaaacagcccccaactagagcctcaaagcttccaggccaagacaagcatcccaaggccactaacacaacgaaaagaaatcatgcagaatccaaatggcaatttgcattctggggattgtttggcctctaatcgatattctcgtcttcctaaaccaaagatacattaagtacatagccatcacctgccaatttgtttcttaaaaacaatctcttctgtaatagctttatgtgcagcttgcagcttgctactgtggtggaggttccattgaaagcctgcaaatcttaaattaaaatgtggaagcttctactagtttggctccttcattttatatcctggttgaagtacatgccatttgagcataattatctcaggtaaacacgaaagtttgcttacccatttcagaggcctgccaaaggcccaaatcatgttatccatccctctccaggtcagaaaattcataatattttactgagcaggcaagaagtgtgctttgctggtttagtcctattaaggtctgtatttattgtggttgtcagaacctcaccccttttcacttgtctctcctgtgaatatggctactattttaactaaagatatggtgataatggaagatggtagtctgtaagcagagttctggccagtgttttgtatatttaaaaggtctatgcaaaagctttgtgatgaataaaggagattaggcttttaatggaaagtctatgtaagttttatttttccttgccagggtcagtcagctaatgttactgttgattcatttcccaaattccccagactgaaaatgtttcttattacatataaatcagttatatattcctttacatcttgttttacaaacacatgtgcatgcacacacacacatacacacacataccatttatgtttgtatttgttactgggtaaattttggagcgcttgagatacaccttgaaacctgtacctaaagatgtattcatttgtaacatatgttggtgctagagttttgctggtaattcaggtttgaacccttaggcttgtggatccatgatagccattttaaggttccacagcattatgtctttaattgtaatatttatatttattgattttctgctaatatctgaagactgaaataatgaacttgaaacatttgcacaaaactttgatggggtataaatataccatatatagggattgtaaactattttctatagcaaaacaagttaaaatattttgagaaaaataacaaatttaaataagactatcttgagaaagctggagttcataatattctccccctcccccatctccagtctcctaggtttcccttttctgtgttttttgtttttttctgtttgttttttgagacagagtcttgctccattgcccaggctggattacagtggcgcaatctcggctcactgcaacttctgcctcccgggttcaagcgattctcctgcctcagcctcctgagtagctgggactacaggcatgtgccaccatgcctggctaatttttttgtatttttagtagagatgaggtttcaccttgttggtcaggctggtctcgaactcctgacctcaagtgatccacccacctcgtctatggtgtatttttgaaagacaattttttaaaggtagatttgggaaaaaaatagaattgaagatgggaaattttgttttattaaaaaggtgctagaagatgtttcaaagacaatattcttattttaatacgctgtagaaggtaggtgtggaacctccatgctaccatgtgcacaaacctaattatgctttgggtcacttgtcagttcagtaaatctgccttcctcttctcccaaatcatgtcatctttaggttgttcacctgcagctgctttaaatgaattagtatctttcagatagataaccttacaaggagaatgtttgttttgagcagctgaccaaaaatatatcaaacaggattatggccaaaaagtcactcaaatttctagagattcctttaaaagatgtatgttgatgaaattgcccctttataagaaaaacaacagcaagtcttttagtagaaatttgaaagaagtgtttgctaccattttgacccattattcccttacctatcagatgaatttgccattcactggatagaaaccattcttggatttggtaagaggtgagcaagacaaatcttgtaccatactcttatgtaccagcacttctgatggagaagcagtgaagttcagaacgttcttcacatagtccagatactgttagagtcaggcaaatcagcaaagcactttgttatggagatgacccatgatggctgcagttgtaagtgggcatacatgttctatcattttgaaggagaaagaaaaccgttctcacatgttgcaaatatgtgaatcatactatattcccctaaagtaaaaccagtgacttagtggtttttggtttatttagaagttggtttagacccttatgaaacattatttacgagttggccttatccttaagggaaaagttctaaatttttaaatttatttttaattccctagtctgagggaaatgtctttattgtccattacataaaaatgttgactccagtaatttatttttctctattttttcctccatgtatttactccatttttctctattttttccttccctgatggatttgcagaaatgttaaccaattagctcaacttttctctacctttgttgagtcttaatcttttagaagataggcttaccgtatatttatgaagcataatatattaaaagaaaacaaatctaggatgcttgcatgacataaagtatttgcctgcagttttcattaaaaactgcaagaatatcatgcttgtctgcttcttagtaaatgttaagtctgaaatggaagtgaggatgtaactctactgaataatcaaagatcatcttagatttggcttgatctgtgtttattgcttctattaatgtaaatcaactctgtgccaaatcctcctccacaaaccatttattgtcttagttctagtggtatcaatgaagatagttacagtatatgaattctaagtcctgaggaagaaattttatggggtttgttaagtttcacattcgtgaaagaggaaattagtagagtattcagactttgatatttggctgttaatgggatgcatatcaaatttttaaaagaaggcttggcctaaggagtttattggtacaggtgcagatgattttaaggcattaaaggattatagagttatgtcatttagactgtttctaataactgagaccatctaacatttttcttttggagtctcatttttatttgtgcaatattttcaggcatataggctactgttcattgtatttatatatatattagaatttactaagtactttaacaagtaaaaatctgaatatgaaagaaaatatcagatttgcactttaaatgagcttaattgcttgaagttgtgcctgaaatatcgaattgcctcctattgggtgtggctttgttgaaataaatttgtaattgttgctgtttgaagatatcagtacagctgttcacagaaatatattcccagcatgtcacttttccattaaagcactaagttttctttgaatgttccattgttccgataagtattttacttttttctcagtacatcagagagagcgtgatccccctacagctgtcacttccaaatgttcctgtagcataaatggtgttacagacactgaggtgcactcttggtttctgagcagagttgtcatactggtttcctggtctctagggcactggggatgtactttgaaatcaccgaacaggcttgcaattaagatcaataaggctgcagcaccatttcaatttactttccatcttacccagtagtttttgtgtttttaaattcgtttgggtggttatgtttgcatgcttaagcacacatttgaaaattaattatagctgtactacccgatgtttttccttggggatgatggccttgttcctttttaaattctgatgcttgaattctattttctagtgatttttcacatctccctttaagtttttgctgcagcaatttgagagagtacttttgattaaatgattctgatggtgggcaccaatctacaactatgtcattaactgaagatacatgttttaatcttgttgggaataagcttacccactttctccttggtaaagcgtttacttaacaaaataatacccgagaatgtaaggtctctaagtcattactaacaaagagcaaaaataatatctgcagtattgtttttcccattgattttaagtcagtttagagtacaaactgtatattagaatttgcctgtaaaatgaattctaaaaagcagatgtaaagtctctcctgaaaatgttggcatagtaaataaaaataaagttcataattataaagttaaaatgtct

SEQ ID NO: 68017 - DNA, 5897 bp, Homo sapiens
agcgggatgctagcatagatgtggtagtggagggacagcttatagaaagttgagatggtcctaatgtaggtaaatagaaatctcaaactgatattgatactttcaggatattttgaataatcttgaatcatgtgaccttgaggatgatgatcttatgcttgatgtggatctgcctgaggatgcacctcttgaaaatgtggagtgtgacaatatgaaccgctttgaccgaccagacagaaatgttcggcagcctcaggaaggtttttggaaaaggccaccccagaggtggagtggacaggagcattaccacctcagccaccctgaccactatcatcaccatggaaaaagtgacttgagcagaggctctccctatagagaatctcctttgggtcattttgaaagctatggagggatgccctttttccaggctcagaagatgtttgttgatgtaccagaaaatacagtgatactggatgagatgacccttcggcacatggttcaggattgcactgctgtaaaaactcagttactcaaactgaaacgtctcctgcatcagcatgatggaagtggttcattgcatgatattcaactgtcattgccatccagtccagaaccagaagatggtgataaagtatataagaatgaagatttattaaatgaaataaaacaacttaaagacgaaataaagaaaaaagatgaaaagatccaactattagaacttcagcttgcaactcagcatatctgccaccaaaaatgtaaagaggaaaaatgcacttatgctgataaatatacccaaacaccctggagacgaattcctcctcaagtactacagccttccagcagccttcccagacccacagatcacacccagggaaaactaataaagccacaacgtatcgaggcccgcagtgaatgctcaatccaagacatgcatcagggcggtgcacatccggaagaaagctttacacacgtcttgcaccaagaaagcaactatggtttggaagagcagcctttttcatcaggcccacaattaacaatggatgtggctaagagtacaccttctgaagcaaacttaaacattactgtaaatgctcaagagccttatcatttggcaaacaatcaaattagtgacatgcagtttatacccacttctcttcagacacctcccgagtcaagtacagtagaccaggctaagagagttggaagaaatcagtctccgccagtgggttatatgtctcagcccaagtccttgcagcttttaaagccatccatattgagttctttggtaccgcctccagtttctgaatcatctccaagtaggactcccacttgtaaaaagtcaccaataatcacaacatgtaattcagcaaaacttcagccaacatctagtcaaacaaatcttgcaaataatcagaatctgaaagcatctaagctccgccccccctcaggctctttcaaacaaaaacaaacaaacagcccccaactagagcctcaaagcttccaggccaagacaagcatcccaaggccactaacacaacgaaaagaaatcatgcagaatccaaatggcaatttgcattctggggattgtttggcctctaatcgatattctcgtcttcctaaaccaaagatacattaagtacatagccatcacctgccaatttgtttcttaaaaacaatctcttctgtaatagctttatgtgcagcttgcagcttgctactgtggtggaggttccattgaaagcctgcaaatcttaaattaaaatgtggaagcttctactagtttggctccttcattttatatcctggttgaagtacatgccatttgagcataattatctcaggtaaacacgaaagtttgcttacccatttcagaggcctgccaaaggcccaaatcatgttatccatccctctccaggtcagaaaattcataatattttactgagcaggcaagaagtgtgctttgctggtttagtcctattaaggtctgtatttattgtggttgtcagaacctcaccccttttcacttgtctctcctgtgaatatggctactattttaactaaagatatggtgataatggaagatggtagtctgtaagcagagttctggccagtgttttgtatatttaaaaggtctatgcaaaagctttgtgatgaataaaggagattaggcttttaatggaaagtctatgtaagttttatttttccttgccagggtcagtcagctaatgttactgttgattcatttcccaaattccccagactgaaaatgtttcttattacatataaatcagttatatattcctttacatcttgttttacaaacacatgtgcatgcacacacacacatacacacacataccatttatgtttgtatttgttactgggtaaattttggagcgcttgagatacaccttgaaacctgtacctaaagatgtattcatttgtaacatatgttggtgctagagttttgctggtaattcaggtttgaacccttaggcttgtggatccatgatagccattttaaggttccacagcattatgtctttaattgtaatatttatatttattgattttctgctaatatctgaagactgaaataatgaacttgaaacatttgcacaaaactttgatggggtataaatataccatatatagggattgtaaactattttctatagcaaaacaagttaaaatattttgagaaaaataacaaatttaaataagactatcttgagaaagctggagttcataatattctccccctcccccatctccagtctcctaggtttcccttttctgtgttttttgtttttttctgtttgttttttgagacagagtcttgctccattgcccaggctggattacagtggcgcaatctcggctcactgcaacttctgcctcccgggttcaagcgattctcctgcctcagcctcctgagtagctgggactacaggcatgtgccaccatgcctggctaatttttttgtatttttagtagagatgaggtttcaccttgttggtcaggctggtctcgaactcctgacctcaagtgatccacccacctcgtctatggtgtatttttgaaagacaattttttaaaggtagatttgggaaaaaaatagaattgaagatgggaaattttgttttattaaaaaggtgctagaagatgtttcaaagacaatattcttattttaatacgctgtagaaggtaggtgtggaacctccatgctaccatgtgcacaaacctaattatgctttgggtcacttgtcagttcagtaaatctgccttcctcttctcccaaatcatgtcatctttaggttgttcacctgcagctgctttaaatgaattagtatctttcagatagataaccttacaaggagaatgtttgttttgagcagctgaccaaaaatatatcaaacaggattatggccaaaaagtcactcaaatttctagagattcctttaaaagatgtatgttgatgaaattgcccctttataagaaaaacaacagcaagtcttttagtagaaatttgaaagaagtgtttgctaccattttgacccattattcccttacctatcagatgaatttgccattcactggatagaaaccattcttggatttggtaagaggtgagcaagacaaatcttgtaccatactcttatgtaccagcacttctgatggagaagcagtgaagttcagaacgttcttcacatagtccagatactgttagagtcaggcaaatcagcaaagcactttgttatggagatgacccatgatggctgcagttgtaagtgggcatacatgttctatcattttgaaggagaaagaaaaccgttctcacatgttgcaaatatgtgaatcatactatattcccctaaagtaaaaccagtgacttagtggtttttggtttatttagaagttggtttagacccttatgaaacattatttacgagttggccttatccttaagggaaaagttctaaatttttaaatttatttttaattccctagtctgagggaaatgtctttattgtccattacataaaaatgttgactccagtaatttatttttctctattttttcctccatgtatttactccatttttctctattttttccttccctgatggatttgcagaaatgttaaccaattagctcaacttttctctacctttgttgagtcttaatcttttagaagataggcttaccgtatatttatgaagcataatatattaaaagaaaacaaatctaggatgcttgcatgacataaagtatttgcctgcagttttcattaaaaactgcaagaatatcatgcttgtctgcttcttagtaaatgttaagtctgaaatggaagtgaggatgtaactctactgaataatcaaagatcatcttagatttggcttgatctgtgtttattgcttctattaatgtaaatcaactctgtgccaaatcctcctccacaaaccatttattgtcttagttctagtggtatcaatgaagatagttacagtatatgaattctaagtcctgaggaagaaattttatggggtttgttaagtttcacattcgtgaaagaggaaattagtagagtattcagactttgatatttggctgttaatgggatgcatatcaaatttttaaaagaaggcttggcctaaggagtttattggtacaggtgcagatgattttaaggcattaaaggattatagagttatgtcatttagactgtttctaataactgagaccatctaacatttttcttttggagtctcatttttatttgtgcaatattttcaggcatataggctactgttcattgtatttatatatatattagaatttactaagtactttaacaagtaaaaatctgaatatgaaagaaaatatcagatttgcactttaaatgagcttaattgcttgaagttgtgcctgaaatatcgaattgcctcctattgggtgtggctttgttgaaataaatttgtaattgttgctgtttgaagatatcagtacagctgttcacagaaatatattcccagcatgtcacttttccattaaagcactaagttttctttgaatgttccattgttccgataagtattttacttttttctcagtacatcagagagagcgtgatccccctacagctgtcacttccaaatgttcctgtagcataaatggtgttacagacactgaggtgcactcttggtttctgagcagagttgtcatactggtttcctggtctctagggcactggggatgtactttgaaatcaccgaacaggcttgcaattaagatcaataaggctgcagcaccatttcaatttactttccatcttacccagtagtttttgtgtttttaaattcgtttgggtggttatgtttgcatgcttaagcacacatttgaaaattaattatagctgtactacccgatgtttttccttggggatgatggccttgttcctttttaaattctgatgcttgaattctattttctagtgatttttcacatctccctttaagtttttgctgcagcaatttgagagagtacttttgattaaatgattctgatggtgggcaccaatctacaactatgtcattaactgaagatacatgttttaatcttgttgggaataagcttacccactttctccttggtaaagcgtttacttaacaaaataatacccgagaatgtaaggtctctaagtcattactaacaaagagcaaaaataatatctgcagtattgtttttcccattgattttaagtcagtttagagtacaaactgtatattagaatttgcctgtaaaatgaattctaaaaagcagatgtaaagtctctcctgaaaatgttggcatagtaaataaaaataaagttcataattataaagttaaaatgtct

SEQ ID NO: 68018 - DNA, 5860 bp, Homo sapiens
agcgggatgctagcatagatgtggtagtggagggacagcttatagaaagttgagatggtcctaatgtaggatattttgaataatcttgaatcatgtgaccttgaggatgatgatcttatgcttgatgtggatctgcctgaggatgcacctcttgaaaatgtggagtgtgacaatatgaaccgctttgaccgaccagacagaaatgttcggcagcctcaggaaggtttttggaaaaggccaccccagaggtggagtggacaggagcattaccacctcagccaccctgaccactatcatcaccatggaaaaagtgacttgagcagaggctctccctatagagaatctcctttgggtcattttgaaagctatggagggatgccctttttccaggctcagaagatgtttgttgatgtaccagaaaatacagtgatactggatgagatgacccttcggcacatggttcaggattgcactgctgtaaaaactcagttactcaaactgaaacgtctcctgcatcagcatgatggaagtggttcattgcatgatattcaactgtcattgccatccagtccagaaccagaagatggtgataaagtatataagaatgaagatttattaaatgaaataaaacaacttaaagacgaaataaagaaaaaagatgaaaagatccaactattagaacttcagcttgcaactcagcatatctgccaccaaaaatgtaaagaggaaaaatgcacttatgctgataaatatacccaaacaccctggagacgaattcctcctcaagtactacagccttccagcagccttcccagacccacagatcacacccagggaaaactaataaagccacaacgtatcgaggcccgcagtgaatgctcaatccaagacatgcatcagggcggtgcacatccggaagaaagctttacacacgtcttgcaccaagaaagcaactatggtttggaagagcagcctttttcatcaggcccacaattaacaatggatgtggctaagagtacaccttctgaagcaaacttaaacattactgtaaatgctcaagagccttatcatttggcaaacaatcaaattagtgacatgcagtttatacccacttctcttcagacacctcccgagtcaagtacagtagaccaggctaagagagttggaagaaatcagtctccgccagtgggttatatgtctcagcccaagtccttgcagcttttaaagccatccatattgagttctttggtaccgcctccagtttctgaatcatctccaagtaggactcccacttgtaaaaagtcaccaataatcacaacatgtaattcagcaaaacttcagccaacatctagtcaaacaaatcttgcaaataatcagaatctgaaagcatctaagctccgccccccctcaggctctttcaaacaaaaacaaacaaacagcccccaactagagcctcaaagcttccaggccaagacaagcatcccaaggccactaacacaacgaaaagaaatcatgcagaatccaaatggcaatttgcattctggggattgtttggcctctaatcgatattctcgtcttcctaaaccaaagatacattaagtacatagccatcacctgccaatttgtttcttaaaaacaatctcttctgtaatagctttatgtgcagcttgcagcttgctactgtggtggaggttccattgaaagcctgcaaatcttaaattaaaatgtggaagcttctactagtttggctccttcattttatatcctggttgaagtacatgccatttgagcataattatctcaggtaaacacgaaagtttgcttacccatttcagaggcctgccaaaggcccaaatcatgttatccatccctctccaggtcagaaaattcataatattttactgagcaggcaagaagtgtgctttgctggtttagtcctattaaggtctgtatttattgtggttgtcagaacctcaccccttttcacttgtctctcctgtgaatatggctactattttaactaaagatatggtgataatggaagatggtagtctgtaagcagagttctggccagtgttttgtatatttaaaaggtctatgcaaaagctttgtgatgaataaaggagattaggcttttaatggaaagtctatgtaagttttatttttccttgccagggtcagtcagctaatgttactgttgattcatttcccaaattccccagactgaaaatgtttcttattacatataaatcagttatatattcctttacatcttgttttacaaacacatgtgcatgcacacacacacatacacacacataccatttatgtttgtatttgttactgggtaaattttggagcgcttgagatacaccttgaaacctgtacctaaagatgtattcatttgtaacatatgttggtgctagagttttgctggtaattcaggtttgaacccttaggcttgtggatccatgatagccattttaaggttccacagcattatgtctttaattgtaatatttatatttattgattttctgctaatatctgaagactgaaataatgaacttgaaacatttgcacaaaactttgatggggtataaatataccatatatagggattgtaaactattttctatagcaaaacaagttaaaatattttgagaaaaataacaaatttaaataagactatcttgagaaagctggagttcataatattctccccctcccccatctccagtctcctaggtttcccttttctgtgttttttgtttttttctgtttgttttttgagacagagtcttgctccattgcccaggctggattacagtggcgcaatctcggctcactgcaacttctgcctcccgggttcaagcgattctcctgcctcagcctcctgagtagctgggactacaggcatgtgccaccatgcctggctaatttttttgtatttttagtagagatgaggtttcaccttgttggtcaggctggtctcgaactcctgacctcaagtgatccacccacctcgtctatggtgtatttttgaaagacaattttttaaaggtagatttgggaaaaaaatagaattgaagatgggaaattttgttttattaaaaaggtgctagaagatgtttcaaagacaatattcttattttaatacgctgtagaaggtaggtgtggaacctccatgctaccatgtgcacaaacctaattatgctttgggtcacttgtcagttcagtaaatctgccttcctcttctcccaaatcatgtcatctttaggttgttcacctgcagctgctttaaatgaattagtatctttcagatagataaccttacaaggagaatgtttgttttgagcagctgaccaaaaatatatcaaacaggattatggccaaaaagtcactcaaatttctagagattcctttaaaagatgtatgttgatgaaattgcccctttataagaaaaacaacagcaagtcttttagtagaaatttgaaagaagtgtttgctaccattttgacccattattcccttacctatcagatgaatttgccattcactggatagaaaccattcttggatttggtaagaggtgagcaagacaaatcttgtaccatactcttatgtaccagcacttctgatggagaagcagtgaagttcagaacgttcttcacatagtccagatactgttagagtcaggcaaatcagcaaagcactttgttatggagatgacccatgatggctgcagttgtaagtgggcatacatgttctatcattttgaaggagaaagaaaaccgttctcacatgttgcaaatatgtgaatcatactatattcccctaaagtaaaaccagtgacttagtggtttttggtttatttagaagttggtttagacccttatgaaacattatttacgagttggccttatccttaagggaaaagttctaaatttttaaatttatttttaattccctagtctgagggaaatgtctttattgtccattacataaaaatgttgactccagtaatttatttttctctattttttcctccatgtatttactccatttttctctattttttccttccctgatggatttgcagaaatgttaaccaattagctcaacttttctctacctttgttgagtcttaatcttttagaagataggcttaccgtatatttatgaagcataatatattaaaagaaaacaaatctaggatgcttgcatgacataaagtatttgcctgcagttttcattaaaaactgcaagaatatcatgcttgtctgcttcttagtaaatgttaagtctgaaatggaagtgaggatgtaactctactgaataatcaaagatcatcttagatttggcttgatctgtgtttattgcttctattaatgtaaatcaactctgtgccaaatcctcctccacaaaccatttattgtcttagttctagtggtatcaatgaagatagttacagtatatgaattctaagtcctgaggaagaaattttatggggtttgttaagtttcacattcgtgaaagaggaaattagtagagtattcagactttgatatttggctgttaatgggatgcatatcaaatttttaaaagaaggcttggcctaaggagtttattggtacaggtgcagatgattttaaggcattaaaggattatagagttatgtcatttagactgtttctaataactgagaccatctaacatttttcttttggagtctcatttttatttgtgcaatattttcaggcatataggctactgttcattgtatttatatatatattagaatttactaagtactttaacaagtaaaaatctgaatatgaaagaaaatatcagatttgcactttaaatgagcttaattgcttgaagttgtgcctgaaatatcgaattgcctcctattgggtgtggctttgttgaaataaatttgtaattgttgctgtttgaagatatcagtacagctgttcacagaaatatattcccagcatgtcacttttccattaaagcactaagttttctttgaatgttccattgttccgataagtattttacttttttctcagtacatcagagagagcgtgatccccctacagctgtcacttccaaatgttcctgtagcataaatggtgttacagacactgaggtgcactcttggtttctgagcagagttgtcatactggtttcctggtctctagggcactggggatgtactttgaaatcaccgaacaggcttgcaattaagatcaataaggctgcagcaccatttcaatttactttccatcttacccagtagtttttgtgtttttaaattcgtttgggtggttatgtttgcatgcttaagcacacatttgaaaattaattatagctgtactacccgatgtttttccttggggatgatggccttgttcctttttaaattctgatgcttgaattctattttctagtgatttttcacatctccctttaagtttttgctgcagcaatttgagagagtacttttgattaaatgattctgatggtgggcaccaatctacaactatgtcattaactgaagatacatgttttaatcttgttgggaataagcttacccactttctccttggtaaagcgtttacttaacaaaataatacccgagaatgtaaggtctctaagtcattactaacaaagagcaaaaataatatctgcagtattgtttttcccattgattttaagtcagtttagagtacaaactgtatattagaatttgcctgtaaaatgaattctaaaaagcagatgtaaagtctctcctgaaaatgttggcatagtaaataaaaataaagttcataattataaagttaaaatgtct

SEQ ID NO: 68019 - DNA, 7103 bp, Homo sapiens
cggggctggcggggatgtgacgggcggccttcgtctcaccttccgtcctcgggcccgcaggtcgcagggcggctgcagctgggccgcggccgaggaggcagcgcgacctccgcacgattctttcaacttttaagaacaaatgcaccttatagctcatggaagaaaaaacacaaatcaagacatttttgggttccaagttgccaaagtatggaacaaaatctgtaagaagtacattgcagccaatgccaaatgggacacctgttaatttattaggaacttccaagaatagtaatgtcaaaagttacatcaaaaataatggctctgattgtccatcatctcattcatttaattggaggaaagcaaataaatatcagctttgtgcacaaggtgtcgaagagcctaacaatactcaaaattcacatgataaaataattgatcctgaaaaacgtgttcctactcaaggaatgtttgataaaaatgggataaagggaggtttgaaaagtgtttctttattcacatcaaagttagcaaagccatccactatgtttgtgtcatctacagaggagttaaaccaaaagtctttttctggaccatctaatttgggtaaattcaccaaaggcacattattaggaaggacttcatattcttcgatcaatactccaaaatcacagttgaatggattttatggaaaccgatcagctggtagcatgcaaaggcctagagcgaactcctgtgccaccagaagcagttctggagaaagcttagctcaatccccagacagtagtaaatctattaattgtgaaaaaatggtaaggtcacaaagtttttcacattccattcagaattcattccttccaccttcatctataaccagatcacattcctttaatagagctgtggatcttacaaagccttatcagaaccaacagctatccattagagtgcctctacggtcaagtatgctaacaagaaattcccggcagccagaagtactcaatgggaatgaacatttggggtatggatttaataggccttatgctgctggtggaaagaagttggctttaccaaatggcccaggtgtaacttctactttaggttatagaatggttcatccctctctactgaaatctagccgatctccattttctgggactatgacagttgatggaaataaaaattcacctgctgacacatgtgtagaggaagatgctacagttttggctaaggacagagctgctaataaggaccaagaactgattgaaaatgaaagttatagaacaaaaaacaaccagaccatgaaacatgatgctaaaatgagatacctgagtgatgatgtggatgacatttccttgtcgtctttgtcatcttctgataagaatgatttaagtgaagactttagtgatgattttatagatatagaagactccaacagaactagaataactccagaggaaatgtctctcaaagaagagaaacatgaaaatgggccaccacaggatatgtttgattcccccaaggaaaatgaaaaagccttcagtaaaactgatgaatggatagatataagtgtctctgacaggagtgaatgtacaaaacatacttctgggaataatttggtttcaccagatacagactacagagctggttcttcgtttgaactctctccatctgatagctctgatggaacatacatgtgggatgaagaaggcttggaacccattggaaatgtccatccagttgggagctatgagtcctctgaaatgaacagcatagatattttgaataatcttgaatcatgtgaccttgaggatgatgatcttatgcttgatgtggatctgcctgaggatgcacctcttgaaaatgtggagtgtgacaatatgaaccgctttgaccgaccagacagaaatgttcggcagcctcaggaaggtttttggaaaaggccaccccagaggtggagtggacaggagcattaccacctcagccaccctgaccactatcatcaccatggaaaaagtgacttgagcagcctcaagtactacagccttccagcagccttcccagacccacagatcacacccagggaaaactaataaagccacaacgtatcgaggcccgcagtgaatgctcaatccaagacatgcatcagggcggtgcacatccggaagaaagctttacacacgtcttgcaccaagaaagcaactatggtttggaagagcagcctttttcatcaggcccacaattaacaatggatgtggctaagagtacaccttctgaagcaaacttaaacattactgtaaatgctcaagagccttatcatttggcaaacaatcaaattagtgacatgcagtttatacccacttctcttcagacacctcccgagtcaagtacagtagaccaggctaagagagttggaagaaatcagtctccgccagtgggttatatgtctcagcccaagtccttgcagcttttaaagccatccatattgagttctttggtaccgcctccagtttctgaatcatctccaagtaggactcccacttgtaaaaagtcaccaataatcacaacatgtaattcagcaaaacttcagccaacatctagtcaaacaaatcttgcaaataatcagaatctgaaagcatctaagctccgccccccctcaggctctttcaaacaaaaacaaacaaacagcccccaactagagcctcaaagcttccaggccaagacaagcatcccaaggccactaacacaacgaaaagaaatcatgcagaatccaaatggcaatttgcattctggggattgtttggcctctaatcgatattctcgtcttcctaaaccaaagatacattaagtacatagccatcacctgccaatttgtttcttaaaaacaatctcttctgtaatagctttatgtgcagcttgcagcttgctactgtggtggaggttccattgaaagcctgcaaatcttaaattaaaatgtggaagcttctactagtttggctccttcattttatatcctggttgaagtacatgccatttgagcataattatctcaggtaaacacgaaagtttgcttacccatttcagaggcctgccaaaggcccaaatcatgttatccatccctctccaggtcagaaaattcataatattttactgagcaggcaagaagtgtgctttgctggtttagtcctattaaggtctgtatttattgtggttgtcagaacctcaccccttttcacttgtctctcctgtgaatatggctactattttaactaaagatatggtgataatggaagatggtagtctgtaagcagagttctggccagtgttttgtatatttaaaaggtctatgcaaaagctttgtgatgaataaaggagattaggcttttaatggaaagtctatgtaagttttatttttccttgccagggtcagtcagctaatgttactgttgattcatttcccaaattccccagactgaaaatgtttcttattacatataaatcagttatatattcctttacatcttgttttacaaacacatgtgcatgcacacacacacatacacacacataccatttatgtttgtatttgttactgggtaaattttggagcgcttgagatacaccttgaaacctgtacctaaagatgtattcatttgtaacatatgttggtgctagagttttgctggtaattcaggtttgaacccttaggcttgtggatccatgatagccattttaaggttccacagcattatgtctttaattgtaatatttatatttattgattttctgctaatatctgaagactgaaataatgaacttgaaacatttgcacaaaactttgatggggtataaatataccatatatagggattgtaaactattttctatagcaaaacaagttaaaatattttgagaaaaataacaaatttaaataagactatcttgagaaagctggagttcataatattctccccctcccccatctccagtctcctaggtttcccttttctgtgttttttgtttttttctgtttgttttttgagacagagtcttgctccattgcccaggctggattacagtggcgcaatctcggctcactgcaacttctgcctcccgggttcaagcgattctcctgcctcagcctcctgagtagctgggactacaggcatgtgccaccatgcctggctaatttttttgtatttttagtagagatgaggtttcaccttgttggtcaggctggtctcgaactcctgacctcaagtgatccacccacctcgtctatggtgtatttttgaaagacaattttttaaaggtagatttgggaaaaaaatagaattgaagatgggaaattttgttttattaaaaaggtgctagaagatgtttcaaagacaatattcttattttaatacgctgtagaaggtaggtgtggaacctccatgctaccatgtgcacaaacctaattatgctttgggtcacttgtcagttcagtaaatctgccttcctcttctcccaaatcatgtcatctttaggttgttcacctgcagctgctttaaatgaattagtatctttcagatagataaccttacaaggagaatgtttgttttgagcagctgaccaaaaatatatcaaacaggattatggccaaaaagtcactcaaatttctagagattcctttaaaagatgtatgttgatgaaattgcccctttataagaaaaacaacagcaagtcttttagtagaaatttgaaagaagtgtttgctaccattttgacccattattcccttacctatcagatgaatttgccattcactggatagaaaccattcttggatttggtaagaggtgagcaagacaaatcttgtaccatactcttatgtaccagcacttctgatggagaagcagtgaagttcagaacgttcttcacatagtccagatactgttagagtcaggcaaatcagcaaagcactttgttatggagatgacccatgatggctgcagttgtaagtgggcatacatgttctatcattttgaaggagaaagaaaaccgttctcacatgttgcaaatatgtgaatcatactatattcccctaaagtaaaaccagtgacttagtggtttttggtttatttagaagttggtttagacccttatgaaacattatttacgagttggccttatccttaagggaaaagttctaaatttttaaatttatttttaattccctagtctgagggaaatgtctttattgtccattacataaaaatgttgactccagtaatttatttttctctattttttcctccatgtatttactccatttttctctattttttccttccctgatggatttgcagaaatgttaaccaattagctcaacttttctctacctttgttgagtcttaatcttttagaagataggcttaccgtatatttatgaagcataatatattaaaagaaaacaaatctaggatgcttgcatgacataaagtatttgcctgcagttttcattaaaaactgcaagaatatcatgcttgtctgcttcttagtaaatgttaagtctgaaatggaagtgaggatgtaactctactgaataatcaaagatcatcttagatttggcttgatctgtgtttattgcttctattaatgtaaatcaactctgtgccaaatcctcctccacaaaccatttattgtcttagttctagtggtatcaatgaagatagttacagtatatgaattctaagtcctgaggaagaaattttatggggtttgttaagtttcacattcgtgaaagaggaaattagtagagtattcagactttgatatttggctgttaatgggatgcatatcaaatttttaaaagaaggcttggcctaaggagtttattggtacaggtgcagatgattttaaggcattaaaggattatagagttatgtcatttagactgtttctaataactgagaccatctaacatttttcttttggagtctcatttttatttgtgcaatattttcaggcatataggctactgttcattgtatttatatatatattagaatttactaagtactttaacaagtaaaaatctgaatatgaaagaaaatatcagatttgcactttaaatgagcttaattgcttgaagttgtgcctgaaatatcgaattgcctcctattgggtgtggctttgttgaaataaatttgtaattgttgctgtttgaagatatcagtacagctgttcacagaaatatattcccagcatgtcacttttccattaaagcactaagttttctttgaatgttccattgttccgataagtattttacttttttctcagtacatcagagagagcgtgatccccctacagctgtcacttccaaatgttcctgtagcataaatggtgttacagacactgaggtgcactcttggtttctgagcagagttgtcatactggtttcctggtctctagggcactggggatgtactttgaaatcaccgaacaggcttgcaattaagatcaataaggctgcagcaccatttcaatttactttccatcttacccagtagtttttgtgtttttaaattcgtttgggtggttatgtttgcatgcttaagcacacatttgaaaattaattatagctgtactacccgatgtttttccttggggatgatggccttgttcctttttaaattctgatgcttgaattctattttctagtgatttttcacatctccctttaagtttttgctgcagcaatttgagagagtacttttgattaaatgattctgatggtgggcaccaatctacaactatgtcattaactgaagatacatgttttaatcttgttgggaataagcttacccactttctccttggtaaagcgtttacttaacaaaataatacccgagaatgtaaggtctctaagtcattactaacaaagagcaaaaataatatctgcagtattgtttttcccattgattttaagtcagtttagagtacaaactgtatattagaatttgcctgtaaaatgaattctaaaaagcagatgtaaagtctctcctgaaaatgttggcatagtaaataaaaataaagttcataattataaagttaaaatgtct

SEQ ID NO: 68020 - DNA, 5155 bp, Homo sapiens
  misc_feature (70)..(70): n is a, c, g, or t
agaggggaagtgaaatgtaacgaatatggttttatatttctcaggtggggagaaagttgacgtgaaacgnctacccctcaagtactacagccttccagcagccttcccagacccacagatcacacccagggaaaactaataaagccacaacgtatcgaggcccgcagtgaatgctcaatccaagacatgcatcagggcggtgcacatccggaagaaagctttacacacgtcttgcaccaagaaagcaactatggtttggaagagcagcctttttcatcaggcccacaattaacaatggatgtggctaagagtacaccttctgaagcaaacttaaacattactgtaaatgctcaagagccttatcatttggcaaacaatcaaattagtgacatgcagtttatacccacttctcttcagacacctcccgagtcaagtacagtagaccaggctaagagagttggaagaaatcagtctccgccagtgggttatatgtctcagcccaagtccttgcagcttttaaagccatccatattgagttctttggtaccgcctccagtttctgaatcatctccaagtaggactcccacttgtaaaaagtcaccaataatcacaacatgtaattcagcaaaacttcagccaacatctagtcaaacaaatcttgcaaataatcagaatctgaaagcatctaagctccgccccccctcaggctctttcaaacaaaaacaaacaaacagcccccaactagagcctcaaagcttccaggccaagacaagcatcccaaggccactaacacaacgaaaagaaatcatgcagaatccaaatggcaatttgcattctggggattgtttggcctctaatcgatattctcgtcttcctaaaccaaagatacattaagtacatagccatcacctgccaatttgtttcttaaaaacaatctcttctgtaatagctttatgtgcagcttgcagcttgctactgtggtggaggttccattgaaagcctgcaaatcttaaattaaaatgtggaagcttctactagtttggctccttcattttatatcctggttgaagtacatgccatttgagcataattatctcaggtaaacacgaaagtttgcttacccatttcagaggcctgccaaaggcccaaatcatgttatccatccctctccaggtcagaaaattcataatattttactgagcaggcaagaagtgtgctttgctggtttagtcctattaaggtctgtatttattgtggttgtcagaacctcaccccttttcacttgtctctcctgtgaatatggctactattttaactaaagatatggtgataatggaagatggtagtctgtaagcagagttctggccagtgttttgtatatttaaaaggtctatgcaaaagctttgtgatgaataaaggagattaggcttttaatggaaagtctatgtaagttttatttttccttgccagggtcagtcagctaatgttactgttgattcatttcccaaattccccagactgaaaatgtttcttattacatataaatcagttatatattcctttacatcttgttttacaaacacatgtgcatgcacacacacacatacacacacataccatttatgtttgtatttgttactgggtaaattttggagcgcttgagatacaccttgaaacctgtacctaaagatgtattcatttgtaacatatgttggtgctagagttttgctggtaattcaggtttgaacccttaggcttgtggatccatgatagccattttaaggttccacagcattatgtctttaattgtaatatttatatttattgattttctgctaatatctgaagactgaaataatgaacttgaaacatttgcacaaaactttgatggggtataaatataccatatatagggattgtaaactattttctatagcaaaacaagttaaaatattttgagaaaaataacaaatttaaataagactatcttgagaaagctggagttcataatattctccccctcccccatctccagtctcctaggtttcccttttctgtgttttttgtttttttctgtttgttttttgagacagagtcttgctccattgcccaggctggattacagtggcgcaatctcggctcactgcaacttctgcctcccgggttcaagcgattctcctgcctcagcctcctgagtagctgggactacaggcatgtgccaccatgcctggctaatttttttgtatttttagtagagatgaggtttcaccttgttggtcaggctggtctcgaactcctgacctcaagtgatccacccacctcgtctatggtgtatttttgaaagacaattttttaaaggtagatttgggaaaaaaatagaattgaagatgggaaattttgttttattaaaaaggtgctagaagatgtttcaaagacaatattcttattttaatacgctgtagaaggtaggtgtggaacctccatgctaccatgtgcacaaacctaattatgctttgggtcacttgtcagttcagtaaatctgccttcctcttctcccaaatcatgtcatctttaggttgttcacctgcagctgctttaaatgaattagtatctttcagatagataaccttacaaggagaatgtttgttttgagcagctgaccaaaaatatatcaaacaggattatggccaaaaagtcactcaaatttctagagattcctttaaaagatgtatgttgatgaaattgcccctttataagaaaaacaacagcaagtcttttagtagaaatttgaaagaagtgtttgctaccattttgacccattattcccttacctatcagatgaatttgccattcactggatagaaaccattcttggatttggtaagaggtgagcaagacaaatcttgtaccatactcttatgtaccagcacttctgatggagaagcagtgaagttcagaacgttcttcacatagtccagatactgttagagtcaggcaaatcagcaaagcactttgttatggagatgacccatgatggctgcagttgtaagtgggcatacatgttctatcattttgaaggagaaagaaaaccgttctcacatgttgcaaatatgtgaatcatactatattcccctaaagtaaaaccagtgacttagtggtttttggtttatttagaagttggtttagacccttatgaaacattatttacgagttggccttatccttaagggaaaagttctaaatttttaaatttatttttaattccctagtctgagggaaatgtctttattgtccattacataaaaatgttgactccagtaatttatttttctctattttttcctccatgtatttactccatttttctctattttttccttccctgatggatttgcagaaatgttaaccaattagctcaacttttctctacctttgttgagtcttaatcttttagaagataggcttaccgtatatttatgaagcataatatattaaaagaaaacaaatctaggatgcttgcatgacataaagtatttgcctgcagttttcattaaaaactgcaagaatatcatgcttgtctgcttcttagtaaatgttaagtctgaaatggaagtgaggatgtaactctactgaataatcaaagatcatcttagatttggcttgatctgtgtttattgcttctattaatgtaaatcaactctgtgccaaatcctcctccacaaaccatttattgtcttagttctagtggtatcaatgaagatagttacagtatatgaattctaagtcctgaggaagaaattttatggggtttgttaagtttcacattcgtgaaagaggaaattagtagagtattcagactttgatatttggctgttaatgggatgcatatcaaatttttaaaagaaggcttggcctaaggagtttattggtacaggtgcagatgattttaaggcattaaaggattatagagttatgtcatttagactgtttctaataactgagaccatctaacatttttcttttggagtctcatttttatttgtgcaatattttcaggcatataggctactgttcattgtatttatatatatattagaatttactaagtactttaacaagtaaaaatctgaatatgaaagaaaatatcagatttgcactttaaatgagcttaattgcttgaagttgtgcctgaaatatcgaattgcctcctattgggtgtggctttgttgaaataaatttgtaattgttgctgtttgaagatatcagtacagctgttcacagaaatatattcccagcatgtcacttttccattaaagcactaagttttctttgaatgttccattgttccgataagtattttacttttttctcagtacatcagagagagcgtgatccccctacagctgtcacttccaaatgttcctgtagcataaatggtgttacagacactgaggtgcactcttggtttctgagcagagttgtcatactggtttcctggtctctagggcactggggatgtactttgaaatcaccgaacaggcttgcaattaagatcaataaggctgcagcaccatttcaatttactttccatcttacccagtagtttttgtgtttttaaattcgtttgggtggttatgtttgcatgcttaagcacacatttgaaaattaattatagctgtactacccgatgtttttccttggggatgatggccttgttcctttttaaattctgatgcttgaattctattttctagtgatttttcacatctccctttaagtttttgctgcagcaatttgagagagtacttttgattaaatgattctgatggtgggcaccaatctacaactatgtcattaactgaagatacatgttttaatcttgttgggaataagcttacccactttctccttggtaaagcgtttacttaacaaaataatacccgagaatgtaaggtctctaagtcattactaacaaagagcaaaaataatatctgcagtattgtttttcccattgattttaagtcagtttagagtacaaactgtatattagaatttgcctgtaaaatgaattctaaaaagcagatgtaaagtctctcctgaaaatgttggcatagtaaataaaaataaagttcataattataaagttaaaatgtct

SEQ ID NO: 68021 - DNA, 7358 bp, Homo sapiens
cggggctggcggggatgtgacgggcggccttcgtctcaccttccgtcctcgggcccgcaggtcgcagggcggctgcagctgggccgcggccgaggaggcagcgcgacctccgcacgattctttcaacttttaagaacaaatgcaccttatagctcatggaagaaaaaacacaaatcaagacatttttgggttccaagttgccaaagtatggaacaaaatctgtaagaagtacattgcagccaatgccaaatgggacacctgttaatttattaggaacttccaagaatagtaatgtcaaaagttacatcaaaaataatggctctgattgtccatcatctcattcatttaattggaggaaagcaaataaatatcagctttgtgcacaaggtgtcgaagagcctaacaatactcaaaattcacatgataaaataattgatcctgaaaaacgtgttcctactcaaggaatgtttgataaaaatgggataaagggaggtttgaaaagtgtttctttattcacatcaaagttagcaaagccatccactatgtttgtgtcatctacagaggagttaaaccaaaagtctttttctggaccatctaatttgggtaaattcaccaaaggcacattattaggaaggacttcatattcttcgatcaatactccaaaatcacagttgaatggattttatggaaaccgatcagctggtagcatgcaaaggcctagagcgaactcctgtgccaccagaagcagttctggagaaagcttagctcaatccccagacagtagtaaatctattaattgtgaaaaaatggtaaggtcacaaagtttttcacattccattcagaattcattccttccaccttcatctataaccagatcacattcctttaatagagctgtggatcttacaaagccttatcagaaccaacagctatccattagagtgcctctacggtcaagtatgctaacaagaaattcccggcagccagaagtactcaatgggaatgaacatttggggtatggatttaataggccttatgctgctggtggaaagaagttggctttaccaaatggcccaggtgtaacttctactttaggttatagaatggttcatccctctctactgaaatctagccgatctccattttctgggactatgacagttgatggaaataaaaattcacctgctgacacatgtgtagaggaagatgctacagttttggctaaggacagagctgctaataaggaccaagaactgattgaaaatgaaagttatagaacaaaaaacaaccagaccatgaaacatgatgctaaaatgagatacctgagtgatgatgtggatgacatttccttgtcgtctttgtcatcttctgataagaatgatttaagtgaagactttagtgatgattttatagatatagaagactccaacagaactagaataactccagaggaaatgtctctcaaagaagagaaacatgaaaatgggccaccacaggatatgtttgattcccccaaggaaaatgaaaaagccttcagtaaaactgatgaatggatagatataagtgtctctgacaggagtgaatgtacaaaacatacttctgggaataatttggtttcaccagatacagactacagagctggttcttcgtttgaactctctccatctgatagctctgatggaacatacatgtgggatgaagaaggcttggaacccattggaaatgtccatccagttgggagctatgagtcctctgaaatgaacagcatagatattttgaataatcttgaatcatgtgaccttgaggatgatgatcttatgcttgatgtggatctgcctgaggatgcacctcttgaaaatgtggagtgtgacaatatgaaccgctttgaccgaccagacagaaatgttcggcagcctcaggaaggtttttggaaaaggccaccccagaggtggagtggacaggagcattaccacctcagccaccctgaccactatcatcaccatggaaaaagtgacttgagcagaggctctccctatagagaatctcctttgggtcattttgaaagctatggagggatgccctttttccaggctcagaagatgtttgttgatgtaccagaaaatacagtgatactggatgagatgacccttcggcacatggttcaggattgcactgctgtaaaaactcagttactcaaactgaaacgtctcctgcatcagcatgatggaagtggttcattgcatgatattcaactgtcattgccatccagtccagaaccagaagatggtgataaagtatataagaatgaagatttattaaatgaaataaaacaacttaaagacgaaataaagaaaaaagatgaaaagatccaactattagaacttcagcttgcaactcagcatatctgccaccaaaaatgtaaagaggaaaaatgcacttatgctgataaatatacccaaacaccctggagacgaattcctcctcaagtactacagccttccagcagccttcccagacccacagatcacacccagggaaaactaataaagccacaacgtatcgaggcccgcagtgaatgctcaatccaagacatgcatcagggcggtgcacatccggaagaaagctttacacacgtcttgcaccaagaaagcaactatggtttggaagagcagcctttttcatcaggcccacaattaacaatggatgtggctaagagtacaccttctgaagcaaacttaaacattactgtaaatgctcaagagccttatcatttggcaaacaatcaaattagtgacatgcagtttatacccacttctcttcagacacctcccgagtcaagtacagtagaccaggctaagagagttggaagaaatcagtctccgccagtgggttatatgtctcagcccaagtccttgcagcttttaaagccatccatattgagttctttggtaccgcctccagtttctgaatcatctccaagtaggactcccacttgtaaaaagtcaccaataatcacaacatgtaattcagcaaaacttcagccaacatctagtcaaacaaatcttgcaaataatcagaatctgaaagcatctaagctccgccccccctcaggctctttcaaacaaaaacaaacaaacagcccccaactagagcctcaaagcttccaggccaagacaagcatcccaaggccactaacacaacgaaaagaaatcatgcagaatccaaatggcaatttgcattctggggattgtttggcctctaatcgatattctcgtcttcctaaaccaaagatacattaagtacatagccatcacctgccaatttgtttcttaaaaacaatctcttctgtaatagctttatgtgcagcttgcagcttgctactgtggtggaggttccattgaaagcctgcaaatcttaaattaaaatgtggaagcttctactagtttggctccttcattttatatcctggttgaagtacatgccatttgagcataattatctcaggtaaacacgaaagtttgcttacccatttcagaggcctgccaaaggcccaaatcatgttatccatccctctccaggtcagaaaattcataatattttactgagcaggcaagaagtgtgctttgctggtttagtcctattaaggtctgtatttattgtggttgtcagaacctcaccccttttcacttgtctctcctgtgaatatggctactattttaactaaagatatggtgataatggaagatggtagtctgtaagcagagttctggccagtgttttgtatatttaaaaggtctatgcaaaagctttgtgatgaataaaggagattaggcttttaatggaaagtctatgtaagttttatttttccttgccagggtcagtcagctaatgttactgttgattcatttcccaaattccccagactgaaaatgtttcttattacatataaatcagttatatattcctttacatcttgttttacaaacacatgtgcatgcacacacacacatacacacacataccatttatgtttgtatttgttactgggtaaattttggagcgcttgagatacaccttgaaacctgtacctaaagatgtattcatttgtaacatatgttggtgctagagttttgctggtaattcaggtttgaacccttaggcttgtggatccatgatagccattttaaggttccacagcattatgtctttaattgtaatatttatatttattgattttctgctaatatctgaagactgaaataatgaacttgaaacatttgcacaaaactttgatggggtataaatataccatatatagggattgtaaactattttctatagcaaaacaagttaaaatattttgagaaaaataacaaatttaaataagactatcttgagaaagctggagttcataatattctccccctcccccatctccagtctcctaggtttcccttttctgtgttttttgtttttttctgtttgttttttgagacagagtcttgctccattgcccaggctggattacagtggcgcaatctcggctcactgcaacttctgcctcccgggttcaagcgattctcctgcctcagcctcctgagtagctgggactacaggcatgtgccaccatgcctggctaatttttttgtatttttagtagagatgaggtttcaccttgttggtcaggctggtctcgaactcctgacctcaagtgatccacccacctcgtctatggtgtatttttgaaagacaattttttaaaggtagatttgggaaaaaaatagaattgaagatgggaaattttgttttattaaaaaggtgctagaagatgtttcaaagacaatattcttattttaatacgctgtagaaggtaggtgtggaacctccatgctaccatgtgcacaaacctaattatgctttgggtcacttgtcagttcagtaaatctgccttcctcttctcccaaatcatgtcatctttaggttgttcacctgcagctgctttaaatgaattagtatctttcagatagataaccttacaaggagaatgtttgttttgagcagctgaccaaaaatatatcaaacaggattatggccaaaaagtcactcaaatttctagagattcctttaaaagatgtatgttgatgaaattgcccctttataagaaaaacaacagcaagtcttttagtagaaatttgaaagaagtgtttgctaccattttgacccattattcccttacctatcagatgaatttgccattcactggatagaaaccattcttggatttggtaagaggtgagcaagacaaatcttgtaccatactcttatgtaccagcacttctgatggagaagcagtgaagttcagaacgttcttcacatagtccagatactgttagagtcaggcaaatcagcaaagcactttgttatggagatgacccatgatggctgcagttgtaagtgggcatacatgttctatcattttgaaggagaaagaaaaccgttctcacatgttgcaaatatgtgaatcatactatattcccctaaagtaaaaccagtgacttagtggtttttggtttatttagaagttggtttagacccttatgaaacattatttacgagttggccttatccttaagggaaaagttctaaatttttaaatttatttttaattccctagtctgagggaaatgtctttattgtccattacataaaaatgttgactccagtaatttatttttctctattttttcctccatgtatttactccatttttctctattttttccttccctgatggatttgcagaaatgttaaccaattagctcaacttttctctacctttgttgagtcttaatcttttagaagataggcttaccgtatatttatgaagcataatatattaaaagaaaacaaatctaggatgcttgcatgacataaagtatttgcctgcagttttcattaaaaactgcaagaatatcatgcttgtctgcttcttagtaaatgttaagtctgaaatggaagtgaggatgtaactctactgaataatcaaagatcatcttagatttggcttgatctgtgtttattgcttctattaatgtaaatcaactctgtgccaaatcctcctccacaaaccatttattgtcttagttctagtggtatcaatgaagatagttacagtatatgaattctaagtcctgaggaagaaattttatggggtttgttaagtttcacattcgtgaaagaggaaattagtagagtattcagactttgatatttggctgttaatgggatgcatatcaaatttttaaaagaaggcttggcctaaggagtttattggtacaggtgcagatgattttaaggcattaaaggattatagagttatgtcatttagactgtttctaataactgagaccatctaacatttttcttttggagtctcatttttatttgtgcaatattttcaggcatataggctactgttcattgtatttatatatatattagaatttactaagtactttaacaagtaaaaatctgaatatgaaagaaaatatcagatttgcactttaaatgagcttaattgcttgaagttgtgcctgaaatatcgaattgcctcctattgggtgtggctttgttgaaataaatttgtaattgttgctgtttgaagatatcagtacagctgttcacagaaatatattcccagcatgtcacttttccattaaagcactaagttttctttgaatgttccattgttccgataagtattttacttttttctcagtacatcagagagagcgtgatccccctacagctgtcacttccaaatgttcctgtagcataaatggtgttacagacactgaggtgcactcttggtttctgagcagagttgtcatactggtttcctggtctctagggcactggggatgtactttgaaatcaccgaacaggcttgcaattaagatcaataaggctgcagcaccatttcaatttactttccatcttacccagtagtttttgtgtttttaaattcgtttgggtggttatgtttgcatgcttaagcacacatttgaaaattaattatagctgtactacccgatgtttttccttggggatgatggccttgttcctttttaaattctgatgcttgaattctattttctagtgatttttcacatctcccttgttttgtgggccatggaagtcttgtcatgttctggggggcaccaaattatgttcgaaacagttattgggggaagcccccctcggggggttaaaacacgaaggggcggttaaaacaaattgggtctgttttaaaagagttggttaaggttgggtataagaaaaagaggaatgaaaggtgt

SEQ ID NO: 68022 - DNA, 7137 bp, Homo sapiens
  misc_feature (6789)..(6789): n is a, c, g, or t
cggggctggcggggatgtgacgggcggccttcgtctcaccttccgtcctcgggcccgcaggtcgcagggcggctgcagctgggccgcggccgaggaggcagcgcgacctccgcacgattctttcaacttttaagaacaaatgcaccttatagctcatggaagaaaaaacacaaatcaagacatttttgggttccaagttgccaaagtatggaacaaaatctgtaagaagtacattgcagccaatgccaaatgggacacctgttaatttattaggaacttccaagaatagtaatgtcaaaagttacatcaaaaataatggctctgattgtccatcatctcattcatttaattggaggaaagcaaataaatatcagctttgtgcacaaggtgtcgaagagcctaacaatactcaaaattcacatgataaaataattgatcctgaaaaacgtgttcctactcaaggaatgtttgataaaaatgggataaagggaggtttgaaaagtgtttctttattcacatcaaagttagcaaagccatccactatgtttgtgtcatctacagaggagttaaaccaaaagtctttttctggaccatctaatttgggtaaattcaccaaaggcacattattaggaaggacttcatattcttcgatcaatactccaaaatcacagttgaatggattttatggaaaccgatcagctggtagcatgcaaaggcctagagcgaactcctgtgccaccagaagcagttctggagaaagcttagctcaatccccagacagtagtaaatctattaattgtgaaaaaatggtaaggtcacaaagtttttcacattccattcagaattcattccttccaccttcatctataaccagatcacattcctttaatagagctgtggatcttacaaagccttatcagaaccaacagctatccattagagtgcctctacggtcaagtatgctaacaagaaattcccggcagccagaagtactcaatgggaatgaacatttggggtatggatttaataggccttatgctgctggtggaaagaagttggctttaccaaatggcccaggtgtaacttctactttaggttatagaatggttcatccctctctactgaaatctagccgatctccattttctgggactatgacagttgatggaaataaaaattcacctgctgacacatgtgtagaggaagatgctacagttttggctaaggacagagctgctaataaggaccaagaactgattgaaaatgaaagttatagaacaaaaaacaaccagaccatgaaacatgatgctaaaatgagatacctgagtgatgatgtggatgacatttccttgtcgtctttgtcatcttctgataagaatgatttaagtgaagactttagtgatgattttatagatatagaagactccaacagaactagaataactccagaggaaatgtctctcaaagaagagaaacatgaaaatgggccaccacaggatatgtttgattcccccaaggaaaatgaaaaagccttcagtaaaactgatgaatggatagatataagtgtctctgacaggagtgaatgtacaaaacatacttctgggaataatttggtttcaccagatacagactacagagctggttcttcgtttgaactctctccatctgatagctctgatggaacatacatgtgggatgaagaaggcttggaacccattggaaatgtccatccagttgggagctatgagtcctctgaaatgaacagcatagatattttgaataatcttgaatcatgtgaccttgaggatgatgatcttatgcttgatgtggatctgcctgaggatgcacctcttgaaaatgtggagtgtgacaatatgaaccgctttgaccgaccagacagaaatgttcggcagcctcaggaaggtttttggaaaaggccaccccagaggtggagtggacaggagcattaccacctcagccaccctgaccactatcatcaccatggaaaaagtgacttgagcagaggctctccctatagagaatctcctttgggtcattttgaaagctatggagggatgccctttttccaggctcagaagatgtttgttgatgtaccagaaaatacagtgatactggatgagatgacccttcggcacatggttcaggattgcactgctgtaaaaactcagttactcaaactgaaacgtctcctgcatcagcatgatggaagtggttcattgcatgatattcaactgtcattgccatccagtccagaaccagaagatggtgataaagtatataagaatgaagatttattaaatgaaataaaacaacttaaagacgaaataaagaaaaaagatgaaaagatccaactattagaacttcagcttgcaactcagcatatctgccaccaaaaatgtaaagaggaaaaatgcacttatgctgataaatatacccaaacaccctggagacgaattcctcctcaagtactacagccttccagcagccttcccagacccacagatcacacccagggaaaactaataaagccacaacgtatcgaggcccgcagtgaatgctcaatccaagacatgcatcagggcggtgcacatccggaagaaagctttacacacgtcttgcaccaagaaagcaactatggtttggaagagcagcctttttcatcaggcccacaattaacaatggatgtggctaagagtacaccttctgaagcaaacttaaacattactgtaaatgctcaagagccttatcatttggcaaacaatcaaattagtgacatgcagtttatacccacttctcttcagacacctcccgagtcaagtacagtagaccaggctaagagagttggaagaaatcagtctccgccagtgggttatatgtctcagcccaagtccttgcagcttttaaagccatccatattgagttctttggtaccgcctccagtttctgaatcatctccaagtaggactcccacttgtaaaaagtcaccaataatcacaacatgtaattcagcaaaacttcagccaacatctagtcaaacaaatcttgcaaataatcagaatctgaaagcatctaagctccgccccccctcaggctctttcaaacaaaaacaaacaaacagcccccaactagagcctcaaagcttccaggccaagacaagcatcccaaggccactaacacaacgaaaagaaatcatgcagaatccaaatggcaatttgcattctggggattgtttggcctctaatcgatattctcgtcttcctaaaccaaagatacattaagtacatagccatcacctgccaatttgtttcttaaaaacaatctcttctgtaatagctttatgtgcagcttgcagcttgctactgtggtggaggttccattgaaagcctgcaaatcttaaattaaaatgtggaagcttctactagtttggctccttcattttatatcctggttgaagtacatgccatttgagcataattatctcaggtaaacacgaaagtttgcttacccatttcagaggcctgccaaaggcccaaatcatgttatccatccctctccaggtcagaaaattcataatattttactgagcaggcaagaagtgtgctttgctggtttagtcctattaaggtctgtatttattgtggttgtcagaacctcaccccttttcacttgtctctcctgtgaatatggctactattttaactaaagatatggtgataatggaagatggtagtctgtaagcagagttctggccagtgttttgtatatttaaaaggtctatgcaaaagctttgtgatgaataaaggagattaggcttttaatggaaagtctatgtaagttttatttttccttgccagggtcagtcagctaatgttactgttgattcatttcccaaattccccagactgaaaatgtttcttattacatataaatcagttatatattcctttacatcttgttttacaaacacatgtgcatgcacacacacacatacacacacataccatttatgtttgtatttgttactgggtaaattttggagcgcttgagatacaccttgaaacctgtacctaaagatgtattcatttgtaacatatgttggtgctagagttttgctggtaattcaggtttgaacccttaggcttgtggatccatgatagccattttaaggttccacagcattatgtctttaattgtaatatttatatttattgattttctgctaatatctgaagactgaaataatgaacttgaaacatttgcacaaaactttgatggggtataaatataccatatatagggattgtaaactattttctatagcaaaacaagttaaaatattttgagaaaaataacaaatttaaataagactatcttgagaaagctggagttcataatattctccccctcccccatctccagtctcctaggtttcccttttctgtgttttttgtttttttctgtttgttttttgagacagagtcttgctccattgcccaggctggattacagtggcgcaatctcggctcactgcaacttctgcctcccgggttcaagcgattctcctgcctcagcctcctgagtagctgggactacaggcatgtgccaccatgcctggctaatttttttgtatttttagtagagatgaggtttcaccttgttggtcaggctggtctcgaactcctgacctcaagtgatccacccacctcgtctatggtgtatttttgaaagacaattttttaaaggtagatttgggaaaaaaatagaattgaagatgggaaattttgttttattaaaaaggtgctagaagatgtttcaaagacaatattcttattttaatacgctgtagaaggtaggtgtggaacctccatgctaccatgtgcacaaacctaattatgctttgggtcacttgtcagttcagtaaatctgccttcctcttctcccaaatcatgtcatctttaggttgttcacctgcagctgctttaaatgaattagtatctttcagatagataaccttacaaggagaatgtttgttttgagcagctgaccaaaaatatatcaaacaggattatggccaaaaagtcactcaaatttctagagattcctttaaaagatgtatgttgatgaaattgcccctttataagaaaaacaacagcaagtcttttagtagaaatttgaaagaagtgtttgctaccattttgacccattattcccttacctatcagatgaatttgccattcactggatagaaaccattcttggatttggtaagaggtgagcaagacaaatcttgtaccatactcttatgtaccagcacttctgatggagaagcagtgaagttcagaacgttcttcacatagtccagatactgttagagtcaggcaaatcagcaaagcactttgttatggagatgacccatgatggctgcagttgtaagtgggcatacatgttctatcattttgaaggagaaagaaaaccgttctcacatgttgcaaatatgtgaatcatactatattcccctaaagtaaaaccagtgacttagtggtttttggtttatttagaagttggtttagacccttatgaaacattatttacgagttggccttatccttaagggaaaagttctaaatttttaaatttatttttaattccctagtctgagggaaatgtctttattgtccattacataaaaatgttgactccagtaatttatttttctctattttttcctccatgtatttactccatttttctctattttttccttccctgatggatttgcagaaatgttaaccaattagctcaacttttctctacctttgttgagtcttaatcttttagaagataggcttaccgtatatttatgaagcataatatattaaaagaaaacaaatctaggatgcttgcatgacataaagtatttgcctgcagttttcattaaaaactgcaagaatatcatgcttgtctgcttcttagtaaatgttaagtctgaaatggaagtgaggatgtaactctactgaataatcaaagatcatcttagatttggcttgatctgtgtttattgcttctattaatgtaaatcaactctgtgccaaatcctcctccacaaaccatttattgtcttagttctagtggtatcaatgaagatagttacagtatatgaattctaagtcctgaggaagaaattttatggggtttgttaagtttcacattcgtgaaagaggaaattagtagagtattcagactttgatatttggctgttaatgggatgcatatcaaatttttaaaagaaggcttggcctaaggagtttattggtacaggtgcagatgattttaaggcattaaaggattatagagttatgtcatttagactgtttctaataactgagaccatctaacatttttcttttggagtctcatttttatttgtgcaatattttcaggcatataggctactgttcattgtatttatatatatattagaatttactaagtactttaacaagtaaaaatctgaatatgaaagaaaatatcagatttgcactttaaatgagcttaattgcttgaagttgtgcctgaaatatcgaattgcctcctattgggtgtggctttgttgaaataaatttgtaattgttgctgtttgaagatatcagtacagctgttcacagaaatatattcccagcatgtcacttttccattaaagcactaagttttctttgaatgttccattgttccactgatcttttacacctccgcttacttctctcgtcncccctctcccttcttacttttatcttctacatctttctctctttctcatgttctcttgatctcctcatgttcctctccccctctccccttctttttcacttccttacacttatcatcttcttcttccccctcttcctctctccctctccttcactcctccctctccttccttctatcttacttctcctcattctcgctactctttttctccgcctatcgttcctattcgtctccttcgtctctttttgtctctctgctcgactcccgtctttctccttcgcttcctctcaccccttcccttttactcctctctgtccctctctctacagctctctctcctcttactct

SEQ ID NO: 68023 - DNA, 1983 bp, Homo sapiens
cggggctggcggggatgtgacgggcggccttcgtctcaccttccgtcctcgggcccgcaggtcgcagggcggctgcagctgggccgcggccgaggaggcagcgcgacctccgcacgattctttcaacttttaagaacaaatgcaccttatagctcatggaagaaaaaacacaaatcaagacatttttgggttccaagttgccaaagtatggaacaaaatctgtaagaagtacattgcagccaatgccaaatgggacacctgttaatttattaggaacttccaagaatagtaatgtcaaaagttacatcaaaaataatggctctgattgtccatcatctcattcatttaattggaggaaagcaaataaatatcagctttgtgcacaaggtgtcgaagagcctaacaatactcaaaattcacatgataaaataattgatcctgaaaaacgtgttcctactcaaggaatgtttgataaaaatgggataaagggaggtttgaaaagtgtttctttattcacatcaaagttagcaaagccatccactatgtttgtgtcatctacagaggagttaaaccaaaagtctttttctggaccatctaatttgggtaaattcaccaaaggcacattattaggaaggacttcatattcttcgatcaatactccaaaatcacagttgaatggattttatggaaaccgatcagctggtagcatgcaaaggcctagagcgaactcctgtgccaccagaagcagttctggagaaagcttagctcaatccccagacagtagtaaatctattaattgtgaaaaaatggtaaggtcacaaagtttttcacattccattcagaattcattccttccaccttcatctataaccagatcacattcctttaatagagctgtggatcttacaaagccttatcagaaccaacagctatccattagagtgcctctacggtcaagtatgctaacaagaaattcccggcagccagaagtactcaatgggaatgaacatttggggtatggatttaataggccttatgctgctggtggaaagaagttggctttaccaaatggcccaggtgtaacttctactttaggttatagaatggttcatccctctctactgaaatctagccgatctccattttctgggactatgacagttgatggaaataaaaattcacctgctgacacatgtgtagaggaagatgctacagttttggctaaggacagagctgctaataaggaccaagaactgattgaaaatgaaagttatagaacaaaaaacaaccagaccatgaaacatgatgctaaaatgagatacctgagtgatgatgtggatgacatttccttgtcgtctttgtcatcttctgataagaatgatttaagtgaagactttagtgatgattttatagatatagaagactccaacagaactagaataactccagaggaaatgtctctcaaagaagagaaacatgaaaatgggccaccacaggatatgtttgattcccccaaggaaaatgaaaaagccttcagtaaaactgatgaatggatagatataagtgtctctgacaggagtgaatgtacaaaacatacttctgggaataatttggtttcaccagatacagactacagagctggttcttcgtttgaactctctccatctgatagctctgatggaacatacatgtgggatgaagaaggcttggaacccattggaaatgtccatccagttgggagctatgagtcctctgaaatgaacagcatagtatgtatggatttatatactcttggaatattttgtttaccctactatagagagacttgtgatatgattgattttgtaaaaaatttatgaattaactttactactttgagaaatggaaattcatatttgttaagagcctataaaatatctgactctaatatgaaataaagcatggagaatatatgacatttgacttaaatatactcaacatgtt

SEQ ID NO: 68024 - DNA, 537 bp, Homo sapiens
ctgattgcgccttttgtggaaacacatcagtgactgaggtgagtggaagtcagagccatggtgataatgataagtgatttgtaataatcactgcaataatttcattatctttatttctttctgaaattgtattgtatatcttttccctccaccttcttccctgcccttccagaggctctccctatagagaatctcctttgggtcattttgaaagctatggagggatgccctttttccaggctcagaagatgtttgttgatgtaccagaaaatacagtgatactggatgagatgacccttcggcacatggttcaggattgcactgctgtaaaaactcagttactcaaactgaaacgtctcctgcatcaggtgagtacataatgaacatttccagctctgatattttgaattgcaaaatggattgactttagttttttttaaaaaaatacttactgggtttctcatgtctttttagatttctgtagaataatgcttgtaaatagtatatagtagaaagttttgtggaaaaaacctgtgg

SEQ ID NO: 68025 - DNA, 686 bp, Homo sapiens
agcgggatgctagcatagatgtggtagtggagggacagcttatagaaagttgagatggtcctaatgtaggatattttgaataatcttgaatcatgtgaccttgaggatgatgatcttatgcttgatgtggatctgcctgaggatgcacctcttgaaaatgtggagtgtgacaatatgaaccgctttgaccgaccagacagaaatgttcggcagcctcaggaaggtttttggaaaaggccaccccagaggtggagtggacaggagcattaccacctcagccaccctgaccactatcatcaccatggaaaaagtgacttgagcagaggctctccctatagagaatctcctttgggtcattttgaaagctatggagggatgccctttttccaggctcagaagatgtttgttgatgtaccagaaaatacagtgatactggatgagatgacccttcggcacatggttcaggattgcactgctgtaaaaactcagttactcaaactgaaacgtctcctgcatcagcatgatggaagtggttcattgcatgatattcaactgtcattgccatccagtccagaaccagaagatggtgataaagtatataagaatgaagatttattaaatgaaaataaaaacagatgcggccgaagccgctctcattatagttgagcactacaatcctgcactct

SEQ ID NO: 68026 - DNA, 5803 bp, Homo sapiens
tgggtacaactatgtctgagtaggcagccggtaacacaatgtctcccttgtgcaaagtaactctcttagtgagtgctcagatatgtgaggaaaaagtatttggtggagtgtgacaatatgaaccgctttgaccgaccagacagaaatgttcggcagcctcaggaaggtttttggaaaaggccaccccagaggtggagtggacaggagcattaccacctcagccaccctgaccactatcatcaccatggaaaaagtgacttgagcagaggctctccctatagagaatctcctttgggtcattttgaaagctatggagggatgccctttttccaggctcagaagatgtttgttgatgtaccagaaaatacagtgatactggatgagatgacccttcggcacatggttcaggattgcactgctgtaaaaactcagttactcaaactgaaacgtctcctgcatcagcatgatggaagtggttcattgcatgatattcaactgtcattgccatccagtccagaaccagaagatggtgataaagtatataagaatgaagatttattaaatgaaataaaacaacttaaagacgaaataaagaaaaaagatgaaaagatccaactattagaacttcagcttgcaactcagcatatctgccaccaaaaatgtaaagaggaaaaatgcacttatgctgataaatatacccaaacaccctggagacgaattcctcctcaagtactacagccttccagcagccttcccagacccacagatcacacccagggaaaactaataaagccacaacgtatcgaggcccgcagtgaatgctcaatccaagacatgcatcagggcggtgcacatccggaagaaagctttacacacgtcttgcaccaagaaagcaactatggtttggaagagcagcctttttcatcaggcccacaattaacaatggatgtggctaagagtacaccttctgaagcaaacttaaacattactgtaaatgctcaagagccttatcatttggcaaacaatcaaattagtgacatgcagtttatacccacttctcttcagacacctcccgagtcaagtacagtagaccaggctaagagagttggaagaaatcagtctccgccagtgggttatatgtctcagcccaagtccttgcagcttttaaagccatccatattgagttctttggtaccgcctccagtttctgaatcatctccaagtaggactcccacttgtaaaaagtcaccaataatcacaacatgtaattcagcaaaacttcagccaacatctagtcaaacaaatcttgcaaataatcagaatctgaaagcatctaagctccgccccccctcaggctctttcaaacaaaaacaaacaaacagcccccaactagagcctcaaagcttccaggccaagacaagcatcccaaggccactaacacaacgaaaagaaatcatgcagaatccaaatggcaatttgcattctggggattgtttggcctctaatcgatattctcgtcttcctaaaccaaagatacattaagtacatagccatcacctgccaatttgtttcttaaaaacaatctcttctgtaatagctttatgtgcagcttgcagcttgctactgtggtggaggttccattgaaagcctgcaaatcttaaattaaaatgtggaagcttctactagtttggctccttcattttatatcctggttgaagtacatgccatttgagcataattatctcaggtaaacacgaaagtttgcttacccatttcagaggcctgccaaaggcccaaatcatgttatccatccctctccaggtcagaaaattcataatattttactgagcaggcaagaagtgtgctttgctggtttagtcctattaaggtctgtatttattgtggttgtcagaacctcaccccttttcacttgtctctcctgtgaatatggctactattttaactaaagatatggtgataatggaagatggtagtctgtaagcagagttctggccagtgttttgtatatttaaaaggtctatgcaaaagctttgtgatgaataaaggagattaggcttttaatggaaagtctatgtaagttttatttttccttgccagggtcagtcagctaatgttactgttgattcatttcccaaattccccagactgaaaatgtttcttattacatataaatcagttatatattcctttacatcttgttttacaaacacatgtgcatgcacacacacacatacacacacataccatttatgtttgtatttgttactgggtaaattttggagcgcttgagatacaccttgaaacctgtacctaaagatgtattcatttgtaacatatgttggtgctagagttttgctggtaattcaggtttgaacccttaggcttgtggatccatgatagccattttaaggttccacagcattatgtctttaattgtaatatttatatttattgattttctgctaatatctgaagactgaaataatgaacttgaaacatttgcacaaaactttgatggggtataaatataccatatatagggattgtaaactattttctatagcaaaacaagttaaaatattttgagaaaaataacaaatttaaataagactatcttgagaaagctggagttcataatattctccccctcccccatctccagtctcctaggtttcccttttctgtgttttttgtttttttctgtttgttttttgagacagagtcttgctccattgcccaggctggattacagtggcgcaatctcggctcactgcaacttctgcctcccgggttcaagcgattctcctgcctcagcctcctgagtagctgggactacaggcatgtgccaccatgcctggctaatttttttgtatttttagtagagatgaggtttcaccttgttggtcaggctggtctcgaactcctgacctcaagtgatccacccacctcgtctatggtgtatttttgaaagacaattttttaaaggtagatttgggaaaaaaatagaattgaagatgggaaattttgttttattaaaaaggtgctagaagatgtttcaaagacaatattcttattttaatacgctgtagaaggtaggtgtggaacctccatgctaccatgtgcacaaacctaattatgctttgggtcacttgtcagttcagtaaatctgccttcctcttctcccaaatcatgtcatctttaggttgttcacctgcagctgctttaaatgaattagtatctttcagatagataaccttacaaggagaatgtttgttttgagcagctgaccaaaaatatatcaaacaggattatggccaaaaagtcactcaaatttctagagattcctttaaaagatgtatgttgatgaaattgcccctttataagaaaaacaacagcaagtcttttagtagaaatttgaaagaagtgtttgctaccattttgacccattattcccttacctatcagatgaatttgccattcactggatagaaaccattcttggatttggtaagaggtgagcaagacaaatcttgtaccatactcttatgtaccagcacttctgatggagaagcagtgaagttcagaacgttcttcacatagtccagatactgttagagtcaggcaaatcagcaaagcactttgttatggagatgacccatgatggctgcagttgtaagtgggcatacatgttctatcattttgaaggagaaagaaaaccgttctcacatgttgcaaatatgtgaatcatactatattcccctaaagtaaaaccagtgacttagtggtttttggtttatttagaagttggtttagacccttatgaaacattatttacgagttggccttatccttaagggaaaagttctaaatttttaaatttatttttaattccctagtctgagggaaatgtctttattgtccattacataaaaatgttgactccagtaatttatttttctctattttttcctccatgtatttactccatttttctctattttttccttccctgatggatttgcagaaatgttaaccaattagctcaacttttctctacctttgttgagtcttaatcttttagaagataggcttaccgtatatttatgaagcataatatattaaaagaaaacaaatctaggatgcttgcatgacataaagtatttgcctgcagttttcattaaaaactgcaagaatatcatgcttgtctgcttcttagtaaatgttaagtctgaaatggaagtgaggatgtaactctactgaataatcaaagatcatcttagatttggcttgatctgtgtttattgcttctattaatgtaaatcaactctgtgccaaatcctcctccacaaaccatttattgtcttagttctagtggtatcaatgaagatagttacagtatatgaattctaagtcctgaggaagaaattttatggggtttgttaagtttcacattcgtgaaagaggaaattagtagagtattcagactttgatatttggctgttaatgggatgcatatcaaatttttaaaagaaggcttggcctaaggagtttattggtacaggtgcagatgattttaaggcattaaaggattatagagttatgtcatttagactgtttctaataactgagaccatctaacatttttcttttggagtctcatttttatttgtgcaatattttcaggcatataggctactgttcattgtatttatatatatattagaatttactaagtactttaacaagtaaaaatctgaatatgaaagaaaatatcagatttgcactttaaatgagcttaattgcttgaagttgtgcctgaaatatcgaattgcctcctattgggtgtggctttgttgaaataaatttgtaattgttgctgtttgaagatatcagtacagctgttcacagaaatatattcccagcatgtcacttttccattaaagcactaagttttctttgaatgttccattgttccgataagtattttacttttttctcagtacatcagagagagcgtgatccccctacagctgtcacttccaaatgttcctgtagcataaatggtgttacagacactgaggtgcactcttggtttctgagcagagttgtcatactggtttcctggtctctagggcactggggatgtactttgaaatcaccgaacaggcttgcaattaagatcaataaggctgcagcaccatttcaatttactttccatcttacccagtagtttttgtgtttttaaattcgtttgggtggttatgtttgcatgcttaagcacacatttgaaaattaattatagctgtactacccgatgtttttccttggggatgatggccttgttcctttttaaattctgatgcttgaattctattttctagtgatttttcacatctccctttaagtttttgctgcagcaatttgagagagtacttttgattaaatgattctgatggtgggcaccaatctacaactatgtcattaactgaagatacatgttttaatcttgttgggaataagcttacccactttctccttggtaaagcgtttacttaacaaaataatacccgagaatgtaaggtctctaagtcattactaacaaagagcaaaaataatatctgcagtattgtttttcccattgattttaagtcagtttagagtacaaactgtatattagaatttgcctgtaaaatgaattctaaaaagcagatgtaaagtctctcctgaaaatgttggcatagtaaataaaaataaagttcataattataaagttaaaatgtct

SEQ ID NO: 68027 - DNA, 5435 bp, Homo sapiens
agcggagtcatttcaagtatccatgtccattgcagctgctctggaactcacaggaagatctcagtttttgcaaactcatggaagaatcacctggcatgatggaagtggttcattgcatgatattcaactgtcattgccatccagtccagaaccagaagatggtgataaagtatataagaatgaagatttattaaatgaaataaaacaacttaaagacgaaataaagaaaaaagatgaaaagatccaactattagaacttcagcttgcaactcagcatatctgccaccaaaaatgtaaagaggaaaaatgcacttatgctgataaatatacccaaacaccctggagacgaattcctcctcaagtactacagccttccagcagccttcccagacccacagatcacacccagggaaaactaataaagccacaacgtatcgaggcccgcagtgaatgctcaatccaagacatgcatcagggcggtgcacatccggaagaaagctttacacacgtcttgcaccaagaaagcaactatggtttggaagagcagcctttttcatcaggcccacaattaacaatggatgtggctaagagtacaccttctgaagcaaacttaaacattactgtaaatgctcaagagccttatcatttggcaaacaatcaaattagtgacatgcagtttatacccacttctcttcagacacctcccgagtcaagtacagtagaccaggctaagagagttggaagaaatcagtctccgccagtgggttatatgtctcagcccaagtccttgcagcttttaaagccatccatattgagttctttggtaccgcctccagtttctgaatcatctccaagtaggactcccacttgtaaaaagtcaccaataatcacaacatgtaattcagcaaaacttcagccaacatctagtcaaacaaatcttgcaaataatcagaatctgaaagcatctaagctccgccccccctcaggctctttcaaacaaaaacaaacaaacagcccccaactagagcctcaaagcttccaggccaagacaagcatcccaaggccactaacacaacgaaaagaaatcatgcagaatccaaatggcaatttgcattctggggattgtttggcctctaatcgatattctcgtcttcctaaaccaaagatacattaagtacatagccatcacctgccaatttgtttcttaaaaacaatctcttctgtaatagctttatgtgcagcttgcagcttgctactgtggtggaggttccattgaaagcctgcaaatcttaaattaaaatgtggaagcttctactagtttggctccttcattttatatcctggttgaagtacatgccatttgagcataattatctcaggtaaacacgaaagtttgcttacccatttcagaggcctgccaaaggcccaaatcatgttatccatccctctccaggtcagaaaattcataatattttactgagcaggcaagaagtgtgctttgctggtttagtcctattaaggtctgtatttattgtggttgtcagaacctcaccccttttcacttgtctctcctgtgaatatggctactattttaactaaagatatggtgataatggaagatggtagtctgtaagcagagttctggccagtgttttgtatatttaaaaggtctatgcaaaagctttgtgatgaataaaggagattaggcttttaatggaaagtctatgtaagttttatttttccttgccagggtcagtcagctaatgttactgttgattcatttcccaaattccccagactgaaaatgtttcttattacatataaatcagttatatattcctttacatcttgttttacaaacacatgtgcatgcacacacacacatacacacacataccatttatgtttgtatttgttactgggtaaattttggagcgcttgagatacaccttgaaacctgtacctaaagatgtattcatttgtaacatatgttggtgctagagttttgctggtaattcaggtttgaacccttaggcttgtggatccatgatagccattttaaggttccacagcattatgtctttaattgtaatatttatatttattgattttctgctaatatctgaagactgaaataatgaacttgaaacatttgcacaaaactttgatggggtataaatataccatatatagggattgtaaactattttctatagcaaaacaagttaaaatattttgagaaaaataacaaatttaaataagactatcttgagaaagctggagttcataatattctccccctcccccatctccagtctcctaggtttcccttttctgtgttttttgtttttttctgtttgttttttgagacagagtcttgctccattgcccaggctggattacagtggcgcaatctcggctcactgcaacttctgcctcccgggttcaagcgattctcctgcctcagcctcctgagtagctgggactacaggcatgtgccaccatgcctggctaatttttttgtatttttagtagagatgaggtttcaccttgttggtcaggctggtctcgaactcctgacctcaagtgatccacccacctcgtctatggtgtatttttgaaagacaattttttaaaggtagatttgggaaaaaaatagaattgaagatgggaaattttgttttattaaaaaggtgctagaagatgtttcaaagacaatattcttattttaatacgctgtagaaggtaggtgtggaacctccatgctaccatgtgcacaaacctaattatgctttgggtcacttgtcagttcagtaaatctgccttcctcttctcccaaatcatgtcatctttaggttgttcacctgcagctgctttaaatgaattagtatctttcagatagataaccttacaaggagaatgtttgttttgagcagctgaccaaaaatatatcaaacaggattatggccaaaaagtcactcaaatttctagagattcctttaaaagatgtatgttgatgaaattgcccctttataagaaaaacaacagcaagtcttttagtagaaatttgaaagaagtgtttgctaccattttgacccattattcccttacctatcagatgaatttgccattcactggatagaaaccattcttggatttggtaagaggtgagcaagacaaatcttgtaccatactcttatgtaccagcacttctgatggagaagcagtgaagttcagaacgttcttcacatagtccagatactgttagagtcaggcaaatcagcaaagcactttgttatggagatgacccatgatggctgcagttgtaagtgggcatacatgttctatcattttgaaggagaaagaaaaccgttctcacatgttgcaaatatgtgaatcatactatattcccctaaagtaaaaccagtgacttagtggtttttggtttatttagaagttggtttagacccttatgaaacattatttacgagttggccttatccttaagggaaaagttctaaatttttaaatttatttttaattccctagtctgagggaaatgtctttattgtccattacataaaaatgttgactccagtaatttatttttctctattttttcctccatgtatttactccatttttctctattttttccttccctgatggatttgcagaaatgttaaccaattagctcaacttttctctacctttgttgagtcttaatcttttagaagataggcttaccgtatatttatgaagcataatatattaaaagaaaacaaatctaggatgcttgcatgacataaagtatttgcctgcagttttcattaaaaactgcaagaatatcatgcttgtctgcttcttagtaaatgttaagtctgaaatggaagtgaggatgtaactctactgaataatcaaagatcatcttagatttggcttgatctgtgtttattgcttctattaatgtaaatcaactctgtgccaaatcctcctccacaaaccatttattgtcttagttctagtggtatcaatgaagatagttacagtatatgaattctaagtcctgaggaagaaattttatggggtttgttaagtttcacattcgtgaaagaggaaattagtagagtattcagactttgatatttggctgttaatgggatgcatatcaaatttttaaaagaaggcttggcctaaggagtttattggtacaggtgcagatgattttaaggcattaaaggattatagagttatgtcatttagactgtttctaataactgagaccatctaacatttttcttttggagtctcatttttatttgtgcaatattttcaggcatataggctactgttcattgtatttatatatatattagaatttactaagtactttaacaagtaaaaatctgaatatgaaagaaaatatcagatttgcactttaaatgagcttaattgcttgaagttgtgcctgaaatatcgaattgcctcctattgggtgtggctttgttgaaataaatttgtaattgttgctgtttgaagatatcagtacagctgttcacagaaatatattcccagcatgtcacttttccattaaagcactaagttttctttgaatgttccattgttccgataagtattttacttttttctcagtacatcagagagagcgtgatccccctacagctgtcacttccaaatgttcctgtagcataaatggtgttacagacactgaggtgcactcttggtttctgagcagagttgtcatactggtttcctggtctctagggcactggggatgtactttgaaatcaccgaacaggcttgcaattaagatcaataaggctgcagcaccatttcaatttactttccatcttacccagtagtttttgtgtttttaaattcgtttgggtggttatgtttgcatgcttaagcacacatttgaaaattaattatagctgtactacccgatgtttttccttggggatgatggccttgttcctttttaaattctgatgcttgaattctattttctagtgatttttcacatctccctttaagtttttgctgcagcaatttgagagagtacttttgattaaatgattctgatggtgggcaccaatctacaactatgtcattaactgaagatacatgttttaatcttgttgggaataagcttacccactttctccttggtaaagcgtttacttaacaaaataatacccgagaatgtaaggtctctaagtcattactaacaaagagcaaaaataatatctgcagtattgtttttcccattgattttaagtcagtttagagtacaaactgtatattagaatttgcctgtaaaatgaattctaaaaagcagatgtaaagtctctcctgaaaatgttggcatagtaaataaaaataaagttcataattataaagttaaaatgtct

SEQ ID NO: 68028 - DNA, 5550 bp, Homo sapiens
agcggagtcatttcaagtatccatgtccattgcagctgctctggaactcacaggaagatctcagtttttgcaaactcatggaagaatcacctggcatgatggaagtggttcattgcatgatattcaactgtcattgccatccagtccagaaccagaagatggtgataaagtatataagaatgaagatttattaaatgaaataaaacaacttaaagacgaaataaagaaaaaagatgaaaagatccaactattagaacttcagcttagactgcaccagttgtcctgaataatatctcatcttgaaaataatttttagaaagatttaagaaatattgaagagcatcctaaagaaagaaaagtgaaagcattaatctttatcagcaactcagcatatctgccaccaaaaatgtaaagaggaaaaatgcacttatgctgataaatatacccaaacaccctggagacgaattcctcctcaagtactacagccttccagcagccttcccagacccacagatcacacccagggaaaactaataaagccacaacgtatcgaggcccgcagtgaatgctcaatccaagacatgcatcagggcggtgcacatccggaagaaagctttacacacgtcttgcaccaagaaagcaactatggtttggaagagcagcctttttcatcaggcccacaattaacaatggatgtggctaagagtacaccttctgaagcaaacttaaacattactgtaaatgctcaagagccttatcatttggcaaacaatcaaattagtgacatgcagtttatacccacttctcttcagacacctcccgagtcaagtacagtagaccaggctaagagagttggaagaaatcagtctccgccagtgggttatatgtctcagcccaagtccttgcagcttttaaagccatccatattgagttctttggtaccgcctccagtttctgaatcatctccaagtaggactcccacttgtaaaaagtcaccaataatcacaacatgtaattcagcaaaacttcagccaacatctagtcaaacaaatcttgcaaataatcagaatctgaaagcatctaagctccgccccccctcaggctctttcaaacaaaaacaaacaaacagcccccaactagagcctcaaagcttccaggccaagacaagcatcccaaggccactaacacaacgaaaagaaatcatgcagaatccaaatggcaatttgcattctggggattgtttggcctctaatcgatattctcgtcttcctaaaccaaagatacattaagtacatagccatcacctgccaatttgtttcttaaaaacaatctcttctgtaatagctttatgtgcagcttgcagcttgctactgtggtggaggttccattgaaagcctgcaaatcttaaattaaaatgtggaagcttctactagtttggctccttcattttatatcctggttgaagtacatgccatttgagcataattatctcaggtaaacacgaaagtttgcttacccatttcagaggcctgccaaaggcccaaatcatgttatccatccctctccaggtcagaaaattcataatattttactgagcaggcaagaagtgtgctttgctggtttagtcctattaaggtctgtatttattgtggttgtcagaacctcaccccttttcacttgtctctcctgtgaatatggctactattttaactaaagatatggtgataatggaagatggtagtctgtaagcagagttctggccagtgttttgtatatttaaaaggtctatgcaaaagctttgtgatgaataaaggagattaggcttttaatggaaagtctatgtaagttttatttttccttgccagggtcagtcagctaatgttactgttgattcatttcccaaattccccagactgaaaatgtttcttattacatataaatcagttatatattcctttacatcttgttttacaaacacatgtgcatgcacacacacacatacacacacataccatttatgtttgtatttgttactgggtaaattttggagcgcttgagatacaccttgaaacctgtacctaaagatgtattcatttgtaacatatgttggtgctagagttttgctggtaattcaggtttgaacccttaggcttgtggatccatgatagccattttaaggttccacagcattatgtctttaattgtaatatttatatttattgattttctgctaatatctgaagactgaaataatgaacttgaaacatttgcacaaaactttgatggggtataaatataccatatatagggattgtaaactattttctatagcaaaacaagttaaaatattttgagaaaaataacaaatttaaataagactatcttgagaaagctggagttcataatattctccccctcccccatctccagtctcctaggtttcccttttctgtgttttttgtttttttctgtttgttttttgagacagagtcttgctccattgcccaggctggattacagtggcgcaatctcggctcactgcaacttctgcctcccgggttcaagcgattctcctgcctcagcctcctgagtagctgggactacaggcatgtgccaccatgcctggctaatttttttgtatttttagtagagatgaggtttcaccttgttggtcaggctggtctcgaactcctgacctcaagtgatccacccacctcgtctatggtgtatttttgaaagacaattttttaaaggtagatttgggaaaaaaatagaattgaagatgggaaattttgttttattaaaaaggtgctagaagatgtttcaaagacaatattcttattttaatacgctgtagaaggtaggtgtggaacctccatgctaccatgtgcacaaacctaattatgctttgggtcacttgtcagttcagtaaatctgccttcctcttctcccaaatcatgtcatctttaggttgttcacctgcagctgctttaaatgaattagtatctttcagatagataaccttacaaggagaatgtttgttttgagcagctgaccaaaaatatatcaaacaggattatggccaaaaagtcactcaaatttctagagattcctttaaaagatgtatgttgatgaaattgcccctttataagaaaaacaacagcaagtcttttagtagaaatttgaaagaagtgtttgctaccattttgacccattattcccttacctatcagatgaatttgccattcactggatagaaaccattcttggatttggtaagaggtgagcaagacaaatcttgtaccatactcttatgtaccagcacttctgatggagaagcagtgaagttcagaacgttcttcacatagtccagatactgttagagtcaggcaaatcagcaaagcactttgttatggagatgacccatgatggctgcagttgtaagtgggcatacatgttctatcattttgaaggagaaagaaaaccgttctcacatgttgcaaatatgtgaatcatactatattcccctaaagtaaaaccagtgacttagtggtttttggtttatttagaagttggtttagacccttatgaaacattatttacgagttggccttatccttaagggaaaagttctaaatttttaaatttatttttaattccctagtctgagggaaatgtctttattgtccattacataaaaatgttgactccagtaatttatttttctctattttttcctccatgtatttactccatttttctctattttttccttccctgatggatttgcagaaatgttaaccaattagctcaacttttctctacctttgttgagtcttaatcttttagaagataggcttaccgtatatttatgaagcataatatattaaaagaaaacaaatctaggatgcttgcatgacataaagtatttgcctgcagttttcattaaaaactgcaagaatatcatgcttgtctgcttcttagtaaatgttaagtctgaaatggaagtgaggatgtaactctactgaataatcaaagatcatcttagatttggcttgatctgtgtttattgcttctattaatgtaaatcaactctgtgccaaatcctcctccacaaaccatttattgtcttagttctagtggtatcaatgaagatagttacagtatatgaattctaagtcctgaggaagaaattttatggggtttgttaagtttcacattcgtgaaagaggaaattagtagagtattcagactttgatatttggctgttaatgggatgcatatcaaatttttaaaagaaggcttggcctaaggagtttattggtacaggtgcagatgattttaaggcattaaaggattatagagttatgtcatttagactgtttctaataactgagaccatctaacatttttcttttggagtctcatttttatttgtgcaatattttcaggcatataggctactgttcattgtatttatatatatattagaatttactaagtactttaacaagtaaaaatctgaatatgaaagaaaatatcagatttgcactttaaatgagcttaattgcttgaagttgtgcctgaaatatcgaattgcctcctattgggtgtggctttgttgaaataaatttgtaattgttgctgtttgaagatatcagtacagctgttcacagaaatatattcccagcatgtcacttttccattaaagcactaagttttctttgaatgttccattgttccgataagtattttacttttttctcagtacatcagagagagcgtgatccccctacagctgtcacttccaaatgttcctgtagcataaatggtgttacagacactgaggtgcactcttggtttctgagcagagttgtcatactggtttcctggtctctagggcactggggatgtactttgaaatcaccgaacaggcttgcaattaagatcaataaggctgcagcaccatttcaatttactttccatcttacccagtagtttttgtgtttttaaattcgtttgggtggttatgtttgcatgcttaagcacacatttgaaaattaattatagctgtactacccgatgtttttccttggggatgatggccttgttcctttttaaattctgatgcttgaattctattttctagtgatttttcacatctccctttaagtttttgctgcagcaatttgagagagtacttttgattaaatgattctgatggtgggcaccaatctacaactatgtcattaactgaagatacatgttttaatcttgttgggaataagcttacccactttctccttggtaaagcgtttacttaacaaaataatacccgagaatgtaaggtctctaagtcattactaacaaagagcaaaaataatatctgcagtattgtttttcccattgattttaagtcagtttagagtacaaactgtatattagaatttgcctgtaaaatgaattctaaaaagcagatgtaaagtctctcctgaaaatgttggcatagtaaataaaaataaagttcataattataaagttaaaatgtct

SEQ ID NO: 68029 - DNA, 5217 bp, Homo sapiens
ttgtatcaagtcaagtacacaataataaaaaaacccaaacacaaacacgctgggtgggtattctgctccctccttctctccttggcagggctccttccaggggatcccacggactgttccaccgcaccgcagacagacctcaagtactacagccttccagcagccttcccagacccacagatcacacccagggaaaactaataaagccacaacgtatcgaggcccgcagtgaatgctcaatccaagacatgcatcagggcggtgcacatccggaagaaagctttacacacgtcttgcaccaagaaagcaactatggtttggaagagcagcctttttcatcaggcccacaattaacaatggatgtggctaagagtacaccttctgaagcaaacttaaacattactgtaaatgctcaagagccttatcatttggcaaacaatcaaattagtgacatgcagtttatacccacttctcttcagacacctcccgagtcaagtacagtagaccaggctaagagagttggaagaaatcagtctccgccagtgggttatatgtctcagcccaagtccttgcagcttttaaagccatccatattgagttctttggtaccgcctccagtttctgaatcatctccaagtaggactcccacttgtaaaaagtcaccaataatcacaacatgtaattcagcaaaacttcagccaacatctagtcaaacaaatcttgcaaataatcagaatctgaaagcatctaagctccgccccccctcaggctctttcaaacaaaaacaaacaaacagcccccaactagagcctcaaagcttccaggccaagacaagcatcccaaggccactaacacaacgaaaagaaatcatgcagaatccaaatggcaatttgcattctggggattgtttggcctctaatcgatattctcgtcttcctaaaccaaagatacattaagtacatagccatcacctgccaatttgtttcttaaaaacaatctcttctgtaatagctttatgtgcagcttgcagcttgctactgtggtggaggttccattgaaagcctgcaaatcttaaattaaaatgtggaagcttctactagtttggctccttcattttatatcctggttgaagtacatgccatttgagcataattatctcaggtaaacacgaaagtttgcttacccatttcagaggcctgccaaaggcccaaatcatgttatccatccctctccaggtcagaaaattcataatattttactgagcaggcaagaagtgtgctttgctggtttagtcctattaaggtctgtatttattgtggttgtcagaacctcaccccttttcacttgtctctcctgtgaatatggctactattttaactaaagatatggtgataatggaagatggtagtctgtaagcagagttctggccagtgttttgtatatttaaaaggtctatgcaaaagctttgtgatgaataaaggagattaggcttttaatggaaagtctatgtaagttttatttttccttgccagggtcagtcagctaatgttactgttgattcatttcccaaattccccagactgaaaatgtttcttattacatataaatcagttatatattcctttacatcttgttttacaaacacatgtgcatgcacacacacacatacacacacataccatttatgtttgtatttgttactgggtaaattttggagcgcttgagatacaccttgaaacctgtacctaaagatgtattcatttgtaacatatgttggtgctagagttttgctggtaattcaggtttgaacccttaggcttgtggatccatgatagccattttaaggttccacagcattatgtctttaattgtaatatttatatttattgattttctgctaatatctgaagactgaaataatgaacttgaaacatttgcacaaaactttgatggggtataaatataccatatatagggattgtaaactattttctatagcaaaacaagttaaaatattttgagaaaaataacaaatttaaataagactatcttgagaaagctggagttcataatattctccccctcccccatctccagtctcctaggtttcccttttctgtgttttttgtttttttctgtttgttttttgagacagagtcttgctccattgcccaggctggattacagtggcgcaatctcggctcactgcaacttctgcctcccgggttcaagcgattctcctgcctcagcctcctgagtagctgggactacaggcatgtgccaccatgcctggctaatttttttgtatttttagtagagatgaggtttcaccttgttggtcaggctggtctcgaactcctgacctcaagtgatccacccacctcgtctatggtgtatttttgaaagacaattttttaaaggtagatttgggaaaaaaatagaattgaagatgggaaattttgttttattaaaaaggtgctagaagatgtttcaaagacaatattcttattttaatacgctgtagaaggtaggtgtggaacctccatgctaccatgtgcacaaacctaattatgctttgggtcacttgtcagttcagtaaatctgccttcctcttctcccaaatcatgtcatctttaggttgttcacctgcagctgctttaaatgaattagtatctttcagatagataaccttacaaggagaatgtttgttttgagcagctgaccaaaaatatatcaaacaggattatggccaaaaagtcactcaaatttctagagattcctttaaaagatgtatgttgatgaaattgcccctttataagaaaaacaacagcaagtcttttagtagaaatttgaaagaagtgtttgctaccattttgacccattattcccttacctatcagatgaatttgccattcactggatagaaaccattcttggatttggtaagaggtgagcaagacaaatcttgtaccatactcttatgtaccagcacttctgatggagaagcagtgaagttcagaacgttcttcacatagtccagatactgttagagtcaggcaaatcagcaaagcactttgttatggagatgacccatgatggctgcagttgtaagtgggcatacatgttctatcattttgaaggagaaagaaaaccgttctcacatgttgcaaatatgtgaatcatactatattcccctaaagtaaaaccagtgacttagtggtttttggtttatttagaagttggtttagacccttatgaaacattatttacgagttggccttatccttaagggaaaagttctaaatttttaaatttatttttaattccctagtctgagggaaatgtctttattgtccattacataaaaatgttgactccagtaatttatttttctctattttttcctccatgtatttactccatttttctctattttttccttccctgatggatttgcagaaatgttaaccaattagctcaacttttctctacctttgttgagtcttaatcttttagaagataggcttaccgtatatttatgaagcataatatattaaaagaaaacaaatctaggatgcttgcatgacataaagtatttgcctgcagttttcattaaaaactgcaagaatatcatgcttgtctgcttcttagtaaatgttaagtctgaaatggaagtgaggatgtaactctactgaataatcaaagatcatcttagatttggcttgatctgtgtttattgcttctattaatgtaaatcaactctgtgccaaatcctcctccacaaaccatttattgtcttagttctagtggtatcaatgaagatagttacagtatatgaattctaagtcctgaggaagaaattttatggggtttgttaagtttcacattcgtgaaagaggaaattagtagagtattcagactttgatatttggctgttaatgggatgcatatcaaatttttaaaagaaggcttggcctaaggagtttattggtacaggtgcagatgattttaaggcattaaaggattatagagttatgtcatttagactgtttctaataactgagaccatctaacatttttcttttggagtctcatttttatttgtgcaatattttcaggcatataggctactgttcattgtatttatatatatattagaatttactaagtactttaacaagtaaaaatctgaatatgaaagaaaatatcagatttgcactttaaatgagcttaattgcttgaagttgtgcctgaaatatcgaattgcctcctattgggtgtggctttgttgaaataaatttgtaattgttgctgtttgaagatatcagtacagctgttcacagaaatatattcccagcatgtcacttttccattaaagcactaagttttctttgaatgttccattgttccgataagtattttacttttttctcagtacatcagagagagcgtgatccccctacagctgtcacttccaaatgttcctgtagcataaatggtgttacagacactgaggtgcactcttggtttctgagcagagttgtcatactggtttcctggtctctagggcactggggatgtactttgaaatcaccgaacaggcttgcaattaagatcaataaggctgcagcaccatttcaatttactttccatcttacccagtagtttttgtgtttttaaattcgtttgggtggttatgtttgcatgcttaagcacacatttgaaaattaattatagctgtactacccgatgtttttccttggggatgatggccttgttcctttttaaattctgatgcttgaattctattttctagtgatttttcacatctccctttaagtttttgctgcagcaatttgagagagtacttttgattaaatgattctgatggtgggcaccaatctacaactatgtcattaactgaagatacatgttttaatcttgttgggaataagcttacccactttctccttggtaaagcgtttacttaacaaaataatacccgagaatgtaaggtctctaagtcattactaacaaagagcaaaaataatatctgcagtattgtttttcccattgattttaagtcagtttagagtacaaactgtatattagaatttgcctgtaaaatgaattctaaaaagcagatgtaaagtctctcctgaaaatgttggcatagtaaataaaaataaagttcataattataaagttaaaatgtct

SEQ ID NO: 68030 - DNA, 3439 bp, Homo sapiens
cggggctggcggggatgtgacgggcggccttcgtctcaccttccgtcctcgggcccgcaggtcgcagggcggctgcagctgggccgcggccgaggaggcagcgcgacctccgcacgattctttcaacttttaagaacaaatgcaccttatagctcatggaagaaaaaacacaaatcaagacatttttgggttccaagttgccaaagtatggaacaaaatctgtaagaagtacattgcagccaatgccaaatgggacacctgttaatttattaggaacttccaagaatagtaatgtcaaaagttacatcaaaaataatggctctgattgtccatcatctcattcatttaattggaggaaagcaaataaatatcagctttgtgcacaaggtgtcgaagagcctaacaatactcaaaattcacatgataaaataattgatcctgaaaaacgtgttcctactcaaggaatgtttgataaaaatgggataaagggaggtttgaaaagtgtttctttattcacatcaaagttagcaaagccatccactatgtttgtgtcatctacagaggagttaaaccaaaagtctttttctggaccatctaatttgggtaaattcaccaaaggcacattattaggaaggacttcatattcttcgatcaatactccaaaatcacagttgaatggattttatggaaaccgatcagctggtagcatgcaaaggcctagagcgaactcctgtgccaccagaagcagttctggagaaagcttagctcaatccccagacagtagtaaatctattaattgtgaaaaaatggtaaggtcacaaagtttttcacattccattcagaattcattccttccaccttcatctataaccagatcacattcctttaatagagctgtggatcttacaaagccttatcagaaccaacagctatccattagagtgcctctacggtcaagtatgctaacaagaaattcccggcagccagaagtactcaatgggaatgaacatttggggtatggatttaataggccttatgctgctggtggaaagaagttggctttaccaaatggcccaggtgtaacttctactttaggttatagaatggttcatccctctctactgaaatctagccgatctccattttctgggactatgacagttgatggaaataaaaattcacctgctgacacatgtgtagaggaagatgctacagttttggctaaggacagagctgctaataaggaccaagaactgattgaaaatgaaagttatagaacaaaaaacaaccagaccatgaaacatgatgctaaaatgagatacctgagtgatgatgtggatgacatttccttgtcgtctttgtcatcttctgataagaatgatttaagtgaagactttagtgatgattttatagatatagaagactccaacagaactagaataactccagaggaaatgtctctcaaagaagagaaacatgaaaatgggccaccacaggatatgtttgattcccccaaggaaaatgaaaaagccttcagtaaaactgatgaatggatagatataagtgtctctgacaggagtgaatgtacaaaacatacttctgggaataatttggtttcaccagatacagactacagagctggttcttcgtttgaactctctccatctgatagctctgatggaacatacatgtgggatgaagaaggcttggaacccattggaaatgtccatccagttgggagctatgagtcctctgaaatgaacagcatagatattttgaataatcttgaatcatgtgaccttgaggatgatgatcttatgcttgatgtggatctgcctgaggatgcacctcttgaaaatgtggagtgtgacaatatgaaccgctttgaccgaccagacagaaatgttcggcagcctcaggaaggtttttggaaaaggccaccccagaggtggagtggacaggagcattaccacctcagccaccctgaccactatcatcaccatggaaaaagtgacttgagcagaggctctccctatagagaatctcctttgggtcattttgaaagctatggagggatgccctttttccaggctcagaagatgtttgttgatgtaccagaaaatacagtgatactggatgagatgacccttcggcacatggttcaggattgcactgctgtaaaaactcagttactcaaactgaaacgtctcctgcatcagcatgatggaagtggttcattgcatgatattcaactgtcattgccatccagtccagaaccagaagatggtgataaagtatataagaatgaagatttattaaatgaaataaaacaacttaaagacgaaataaagaaaaaagatgaaaagatccaactattagaacttcagcttgcaactcagcatatctgccaccaaaaatgtaaagaggaaaaatgcacttatgctgataaatatacccaaacaccctggagacgaattcctcctcaagtactacagccttccagcagccttcccagacccacagatcacacccagggaaaactaataaagccacaacgtatcgaggcccgcagtgaatgctcaatccaagacatgcatcagggcggtgcacatccggaagaaagctttacacacgtcttgcaccaagaaagcaactatggtttggaagagcagcctttttcatcaggcccacaattaacaatggatgtggctaagagtacaccttctgaagcaaacttaaacattactgtaaatgctcaagagccttatcatttggcaaacaatcaaattagtgacatgcagtttatacccacttctcttcagacacctcccgagtcaagtacagtagaccaggctaagagagttggaagaaatcagtctccgccagtgggttatatgtctcagcccaagtccttgcagcttttaaagccatccatattgagttctttggtaccgcctccagtttctgaatcatctccaagtaggactcccacttgtaaaaagtcaccaataatcacaacatgtaattcagcaaaacttcagccaacatctagtcaaacaaatcttgcaaataatcagaatctgaaagcatctaagctccgccccccctcaggctctttcaaacaaaaacaaacaaacagcccccaactagagcctcaaagcttccaggccaagacaagcatcccaaggccactaacacaacgaaaagaaatcatgcagaatccaaatggcaatttgcattctggggattgtttggcctctaatcgatattctcgtcttcctaaaccaaagatacattaagtacatagccatcacctgccaatttgtttcttaaaaacaatctcttctgtaatagctttatgtgcagcttgcagcttgctactgtggtggaggttccattgaaagcctgcaaatcttaaattaaaatgtggaagcttcta

SEQ ID NO: 68031 - DNA, 2386 bp, Homo sapiens
cggggctggcggggatgtgacgggcggccttcgtctcaccttccgtcctcgggcccgcaggtcgcagggcggctgcagctgggccgcggccgaggaggcagcgcgacctccgcacgattctttcaacttttaagaacaaatgcaccttatagctcatggaagaaaaaacacaaatcaagacatttttgggttccaagttgccaaagtatggaacaaaatctgtaagaagtacattgcagccaatgccaaatgggacacctgttaatttattaggaacttccaagaatagtaatgtcaaaagttacatcaaaaataatggctctgattgtccatcatctcattcatttaattggaggaaagcaaataaatatcagctttgtgcacaaggtgtcgaagagcctaacaatactcaaaattcacatgataaaataattgatcctgaaaaacgtgttcctactcaaggaatgtttgataaaaatgggataaagggaggtttgaaaagtgtttctttattcacatcaaagttagcaaagccatccactatgtttgtgtcatctacagaggagttaaaccaaaagtctttttctggaccatctaatttgggtaaattcaccaaaggcacattattaggaaggacttcatattcttcgatcaatactccaaaatcacagttgaatggattttatggaaaccgatcagctggtagcatgcaaaggcctagagcgaactcctgtgccaccagaagcagttctggagaaagcttagctcaatccccagacagtagtaaatctattaattgtgaaaaaatggtaaggtcacaaagtttttcacattccattcagaattcattccttccaccttcatctataaccagatcacattcctttaatagagctgtggatcttacaaagccttatcagaaccaacagctatccattagagtgcctctacggtcaagtatgctaacaagaaattcccggcagccagaagtactcaatgggaatgaacatttggggtatggatttaataggccttatgctgctggtggaaagaagttggctttaccaaatggcccaggtgtaacttctactttaggttatagaatggttcatccctctctactgaaatctagccgatctccattttctgggactatgacagttgatggaaataaaaattcacctgctgacacatgtgtagaggaagatgctacagttttggctaaggacagagctgctaataaggaccaagaactgattgaaaatgaaagttatagaacaaaaaacaaccagaccatgaaacatgatgctaaaatgagatacctgagtgatgatgtggatgacatttccttgtcgtctttgtcatcttctgataagaatgatttaagtgaagactttagtgatgattttatagatatagaagactccaacagaactagaataactccagaggaaatgtctctcaaagaagagaaacatgaaaatgggccaccacaggatatgtttgattcccccaaggaaaatgaaaaagccttcagtaaaactgatgaatggatagatataagtgtctctgacaggagtgaatgtacaaaacatacttctgggaataatttggtttcaccagatacagactacagagctggttcttcgtttgaactctctccatctgatagctctgatggaacatacatgtgggatgaagaaggcttggaacccattggaaatgtccatccagttgggagctatgagtcctctgaaatgaacagcatagatattttgaataatcttgaatcatgtgaccttgaggatgatgatcttatgcttgatgtggatctgcctgaggatgcacctcttgaaaatgtggagtgtgacaatatgaaccgctttgaccgaccagacagaaatgttcggcagcctcaggaaggtttttggaaaaggccaccccagaggtggagtggacaggagcattaccacctcagccaccctgaccactatcatcaccatggaaaaagtgacttgagcagaggctctccctatagagaatctcctttgggtcattttgaaagctatggagggatgccctttttccaggctcagaagatgtttgttgatgtaccagaaaatacagtgatactggatgagatgacccttcggcacatggttcaggattgcactgctgtaaaaactcagttactcaaactgaaacgtctcctgcatcagcatgatggaagtggttcattgcatgatattcaactgtcattgccatccagtccagaaccagaagatggtgataaagtatataagaatgaagatttattaaatgaaaataaaaacagatgcggccgaagccgctctcattatagttgagcactacaatcctgcactct

SEQ ID NO: 68032 - DNA, 1116 bp, Homo sapiens
cagcacggccacgacacggccacttccagacagagcccctggctgctgggtagggaccgcagcacctcagagaaccctttctggggtcacttctggcaccctctgcaaacctcaagggggagcgtgaggctgggggctgtccatcagggtccaggcacctcctgaaggaacctctcaaagccagccgatcaccggctccagacccacgctgtcagacatctctgtggccaccagaccactgccactctcacgggtgtgatgacatgggacctgcctactggtagtcttctgccttcgtggaattctgcaacttccttcctgcctcggccacagcatgtcagccaagcacctgtcagggtccctccctggcaggacgatgtttagaagctcaacaccttgctcctgcctcctcttcagacccatcagaacttgctaccatgggtgtgttttaataaataacttcatttctgcagcaaataaataaataaataaatgtagttgcaatattgcctttaaaagcacttttaagcatcaattgtgaaataaaaagcccgagcaaaagccctctttgagcgtgaagtgtctaaacgtttatttgtactactattgttgtaaagggtagattttgtagcattttgaggtggtgattcaactgcattaacagcatcccgagaccgcctgccacgatctggaggaaacgcacggccagggcccacgtgcagggtagggtcctgccaggctcccaaaatgccccgtcccagcactcagtcccatggaggcagcacagcctcagggaggccagcgactctgggcctgcgggtgagtccttcagcccctgcacagcccaatccatctgccacccacttggtgaccccaaattgtagtaagtcaacacttccagttactcaacagcttctgaaatttaaatctctggaacaatttacagtaataagaccctaggtgcacctgtctactatccttgtcctccctaatgaaatgggctaggcgtggtggctcatgcctgtaatctcccattttgggaggccaaggcaggagaactgcttgagcccaggtgttgggagaccagcctgggtaacatggcgagacctcacatct

SEQ ID NO: 68033 - DNA, 469 bp, Homo sapiens
tatccctgcaaatatccataaacatacactgcaaaattttacaacaatcaaaaggatggggtatcactgttgcctattggataatcagggacatccaggggttcattttgtgatagttcagttttgttcttaggaaaagattgagtttccttagaaagacatatgaactcatttaagacatgtaaaagtggccgggcgcagtggctaacgcctgtaatcccagcattttgggatgccgaggcgggtggatcatgaggtcaggagatcgagaccatcctggccaacatggtgaaactccgtctctattgaaaatacaaaaattagccaggtgtggtggtgtgcacctgtagtcccagctgcttgagaggctgaggcaggggaatcacttgaacctgggaggcggatgttgcagtgagcggagatcactcctctgcactccagcctgtcaagagagcaagatcccatctca

SEQ ID NO: 68034 - DNA, 1431 bp, Homo sapiens
ctcccaagtagctgggattacaagcatgtgccgtcacgcccagctaatttttgtatttttagtagagatggagtttcaccatgttggtgaggcttgtcttgaactcctgacctcaagtgatcgcacctgcctcagcctcccgaagtgccgtcgtccccagccaatattatatgtgttttaacataagtatacaatgtgtatcagccatccagatcaagatatagaatgttcccatcagcctagaatgttccctcatgctctttcttggcaaaataaaacaaagcaaaataactctccatatctcactccctaaaattatcactattctgaaacttctatcactataaattggttgcttattgttgggcttttttttttttttttgagacagggtcttgctctgtcgtctggctagctagagtacagtggctggatcatggctcactgcagcctcaaccttccaggctcaaggaattctcccacctcagcctcttgaatagctgggactacagtaggtgcacgccatcacacctggctaattttagtattctttgtagagacgaggttttaccatgttgcttaggctggtcttgaactcctgagctcgagcaatctgcctgccttggcctcccaaagtgctgaggttacagatgtgagccactgtgcccagcctattctttagcttttataaatagattcataaagtatatactgtttggttttggtttctttcattcaacataatgttttttagatttatacatgatggtgagtttattcttttttattgctgtatagcatttcattgtgtaactatattatgctttatttttaccatttgttcgtgatcatttgggttgttcctagtttttggttataaatacattcttgtacatgtcttttggtagacatatacatgcatttactttgaagagcatacttaggagtataattgagtaacagatttattatatgtttaactttgatactgccaaatggttttctaatgcagttgaatgaacgtacgcttttcaccagtaacatctgagagttctacttgctctacattcccaccagcatttggtagtgtcactctttaattttagtcattttgggagagtatagtgctatctcattgtgggttttaagttgcataccccagcgagttctgttattgaacaacttcatcataggtttgttggacatttgggatcttcttttgtcaaaatgctggttcaaatttttgtctacttcacaactgagttgtcttttttattgatttgtaggagttctttatatactttggatatgaatccttcatcagatgtatatactgtgaatattttctcctagtttgtggcatcttcattcactttcttaatggtatattttaataacaaattattttaataaagcctaatttatcaatct

SEQ ID NO: 68035 - DNA, 360 bp, Homo sapiens
ctactactactaaattcgcggccgcgtcgacgcatgtttctctttaaggattattttaaaggacatctaatcacctcccacaaggtgtctccccaaacacgtgaggattacagtctggattacaattcaagatgagattgaggattacaatctggattacaattcaagatgagattatgggtggggtcacagccaaaccatatcagtggcacacacctgtagtcagtcccagctattcaggaggctgaggcaagaagttcgcttcagcatgggaggtctaggctgcagtgagccatgatcgcaccactgcactacagcctgggtgacagagcaagacccgtttcaaaaataaaaaaaaaa

SEQ ID NO: 68036 - DNA, 949 bp, Homo sapiens
gctgccttccccagtccctggtccaccctagttagcaggtctgtctaacaactgcatctcagctcttcctttcccctcagtctattccaccaattaagttggacctaggatggtattctttccctacaatggaatcaggaggaaaaataaatgcttttaatagcactgccctggatatctgattatttgcaagactagaatgctttttacaatgcagtttgatttagccacttaacttctaatcacttccatttttcagggcttggagggaaaacatgtcctttttattgctaatgtaatgatttatccatctatagcacacaggatccctaatgatctggataacttagctaacacttcatgggctcaagtatttttccagaattgctcccctattttccttgaacataggcagggagaagccaggcctgcttgggagccaagaggacagggaggagtaaccagttcaggacaaagaaccataaccctcaagcaagagaacaaggagaagaatagtgctagagtatggggtgaaatgtcagtttttaattccataggaatggacaataaaaacaaaaattttatgtttaaatggttttacctgaaattatatgactagagcatgtttctctttaaggattattttaaaggacatctaatcacctcccacaaggtgtctccccaaacacgtgaggattacagtctggattacaattcaagatgagattgaggattacaatctggattacaattcaagatgagattatgggtggggtcacagccaaaccatatcagtggcacacacctgtagtcagtcccagctattcaggaggctgaggcaagaagttcgcttcagcatgggaggtctaggctgcagtgagccatgatcgcaccactgcactacagcctgggtgacagagcaagacccgtttcaaaaataaaaaaaaaa

SEQ ID NO: 68037 - DNA, 130 bp, Homo sapiens
ttttcccccccaaagtattttcaatccacgattggttgtttctgaggttggttgactcctgggatgtgaaacccacagatagagagtgccaggcgtatatgtaatttttcaaaaaggaaaattttcaagt

SEQ ID NO: 68038 - DNA, 1073 bp, Homo sapiens
  misc_feature (26)..(26): n is a, c, g, or t
  misc_feature (58)..(58): n is a, c, g, or t
  misc_feature (780)..(780): n is a, c, g, or t
gtaaaactagggcatttagaaaatgnaaattagtatgttcactatttaaggcctatgnacagagcaaagtcttcagaaaacctagaggccaaagttcaaggttacccatctcaagtagcctagcaacatttgcaacatcccaatggccctgtccttttctttactgatggccgtgctggtgctcagctacaaatccatctgttctctaggctgtgatctgcctcagacccacagcctgggtaataggagggccttgatactcctggcacaaatgggaagaatctctcctttctcctgcctgaaggacagacatgactttggacttccccaggaggagtttgatggcaaccagttccagaagactcaagccatctctgtcctccatgagatgatccagcagaccttcaatctcttcagcacagaggactcatctgctgcttgggaacagagcctcctagaaaaattttccactgaactttaccagcaactgaataacctggaagcatgtgtgatacaggaggttgggatggaagagactcccctgatgaatgaggactccatcctggctgtgaggaaatacttccaaagaatcactctttatctaacagagaagaaatacagcccttgtgcctgggaggttgtcagagcagaaatcatgagatccctctctttttcaacaaacttgcaaaaaatattaaggaggaaggattgaaaactggttcaacatggcaatgatcctgattgactaatacattatctcacactttcatgagttcctcnatttcaaagactcacttctataaccaccacgagttgaatcaaaattttcaaatgttttcagcagtgtaaagaagcgtcgtgtatacctgtgcaggcactagtactttacagatgaccatgctgatgtctctgttcatctatttatttaaatatttatttaattatttttaagatttaaattatttttttatgtaatatcatgtgtacctttacattgtggtgaatgtaacaatatatgttcttcatatttagccaatatattaatttcctttttcattaaatttttactatac

SEQ ID NO: 68039 - DNA, 426 bp, Homo sapiens
ataaaccgtacgtacagaggaacagatgagtgcactgtggaatgggagggagagttactttcctaaagtggacttggaaagatggtaaggaaaaggctttctagcacagagctgctggagatgacacagggaagcgcttattgttttgcagaacctacacaagatctatatggttcgtgaaagatgtggatttgattttgtgaataaagtttttgatcagtagagggatataatcacaactgtgctttgaagaagcccctcctgattttaaaggcacttgtgttattatacaccccattttacagacggagtttcactcttgttgcccaggctagagtgcaatggcgcgatcttggttcgtcgcaacctccacctcccaggttctcctgcctcagcctcccaagtaggtaggattacaggcatgcg

SEQ ID NO: 68040 - DNA, 228 bp, Homo sapiens
caggtttgtaacagaaaagagaccaagctggttgggaacatggtgttctcagtgtaataagatgtattgtaagtccaaggaaaatgcatcttggtggggctgaccttattgcaccccttccccaagatttcccggagagaaacattattctggggatagtttctgttcttgtttgccaatcaataatgaattgaggttggcaaaggctgggtttttagtggaagtggg

SEQ ID NO: 68041 - DNA, 779 bp, Homo sapiens
gtgacattgtgccgaaccttgaaggtgagcaggtagggagggcgtggaggagtgtgtttggatgaaagtacgccaggagagctgtgatgtccaaaagaggtgagggaccacgaggactgagaaaagaccctaatgtgatttgtaaggcaggtgaacattgatatccatagtaagcagtgcagagggagtcagataaggggctcaggaaccatctggtggtgacaaaataatgccgcttagtgtggactggcattctgggtagtgtggtgatgaacagaagaaaacaggcaggggattcaagagaagggaaaggtgtggagaaaaagacagacacaagtgattcaagatttaagagataagggattgtcctgctttctagctataaaacctttctacactacctaaaagagatgactgcttctcccttaaggactatacccagctttttcctcaccaggctaataaatgcacttagcatttgcttaaaaatattgggattgtggccagtcgcggtggctcacgcctgtaatcccagcactttgggaggccaaggtgggtggatcacgaggtcgggagttagagaccagcctggccaatatggtgaaaccttgtttctactaaaaaatacaaaaaactagccaggtgtggtggcatgtgcctgtagtcccagctactcaggaggctgaggcaggagaattgtttgaacctgggaggtggaggttgcggtgagccaaaatcgcaccactgcactccagcctgggcaacagagcgagactccg

SEQ ID NO: 68042 - DNA, 455 bp, Homo sapiens
ctttgccctttcagttcatttggtagaggacagcttagctgggccttgaagcacttggaaggtcattctgtgcatgaatgttttttggcatttatttctgccttctatattttattttatccactgccaagggggcattttgattggcacgggagccaagtgaaacaaaacactccctccgagggacatacactaagcagctctatgagaaccacctcctttctgtcatataagggctgactttcttcctcttcactttgtttctgagagatttttgatgttttcctggccctgtcaattttattcccggcttggcttattcaccaacaccacaagacactatcagctcagacccagaaacaggatgccaacattggcagaatccatttagacatggtaacgtctagtctgaggcttacaggggactgtgactaaatttattttaaagcttaaat

SEQ ID NO: 68043 - DNA, 785 bp, Homo sapiens
cacaacctcttggcatggtgtacagtctccaacccagcatcctgaaggttacccagaaaggatccccaagttacataccttctggcgtctgtgctggctaagtgtctcagcacctctatccaaaaaccacatgacgcttgacacaggtcttctcatgggccgtatgcagcttaagccaattagatagcaggtgatccaaaccttgggtccagcttttaatccctcctatgccactggagcagctaattggctggctattgtgatagatgtcctggaagcaatactagggtctctagcctcgggtctggtccattggcagccatggactgtgttgtaaaggggcccaggtgatggagggtaccataaaaaggcgtgtttgggcaggtagggtggtcctcttggccacaccacctgtcaccactcctgcccagccctagtccccattgcaatttcaccagtcttattcttcaggcagtcccagacagcacagaccccaagattctgccctgccccaggagggcttctgggaggaggaagggccaagagaggtcttgaactgaagagccagacctggtgcagagaaggcagggtctggatgtcagtttctagcagttctacccctcacctgaacctcacactaggcctatgtactttaggcctaaaaataggcaactgggtcagacagacacccataatcccaacactggaaggccaaggtgggaggactgcttgagtccgggaatttgagactagccagagcaacatagcaagaccttgtctctact

SEQ ID NO: 68044 - DNA, 522 bp, Homo sapiens
taaattattacttatttttcatttatatttgcagtactgttatgcaggtatacacagaaagtctaggatattatttagttatataatgtgacacacttagttatatgagcccgacatttatatccacaagacatttcttagtttaaatattctcctgttaaatgttgtgggaaattatacagagatttagaatttttacagaagaaaatgtaaattatgtggtggcttactaaagggctttctcatggagtcttgggagagaaggggaggagttttacccccagtagactttaataaacatttaaaaacttttctctggtcgtgggaattatggttggtttgggtgtcttctgaacttttggtactaaacatttgccatctgtaaacacttactggacttacaatgattggagaagacacaggcatgtttgtagcaaagggaatataggacagctccaagatccggggcggcttatagtctttgcggaggaggtgagtgaatgctcagactcagtagatggc

SEQ ID NO: 68045 - DNA, 946 bp, Homo sapiens
aaaatggagggaagtgaatcctcaagacttcatgaacatttcccaaaactgaaagactcgtgttttcagataggaagcgcctactcactgaatgctaaacatgatgaattaaaataatgcacatcaaggcacagtgttatgaaattgtagaccgttaggtataaaaataaggatctggctgggcacagtggctcatgcctgtaatcccagcactttgggaggctgaggcaagaggattgcatgagtccagaagtttgaaaccagcctgggcaacatagtaaaaccctgtctctacaaaaaataaaaaaattagccaggtgcgatggtacatgcctgtaatcccagctactcaggaagctgaggtaggaggatcgcttgagtccagggaggttgaggttgcagtgagcttgtgccactgtactccagcctgagtgacagagcgagaccctgttgccaaaaaaatttttttttaaaagggatcctacatgcatccagagattaaacgaaaacaatcacctgaaaaggctctgaactcagattgatgcttctcaccagcactggaagctagatggtattggaataatacctcacagttctgaaggaaaaatatttccaagccagaattctaaacctagacaaactatcaaatataagtagaaagaagtaaacaaacacattttcagaaatgcaagatttcaaaaaatatatatctcccatgcactgttcttcagaaagccttgggagaatgtaccctaccaaaagagggagtaataaactaggaaaagttgaatttgggaaatggaatcaacttagaaagaagcaaagaggcctgtaatgataaaggggttttctaggatgacagctccatagctggaatgggggacaaccagaccagaatggagctttagtagatatattctagagcaggaaattcgagaatatataa

SEQ ID NO: 68046 - DNA, 156 bp, Homo sapiens
caaggacgcagaatgttgcatctgagaaaaacagcctaacagggctcccacactcctgtgctggagtaaacaaaacacttttcaaaacgaggtatttccaggtatttttgacaatagcgttttcacggtttaccccctaatggctcccagatacag

SEQ ID NO: 68047 - DNA, 463 bp, Homo sapiens
gccctagtacaaagatggagagctcagagcccaaaagtcatcctgtgttaaggagacatagctaagagtctcggtttgccaaggtagctggagtctacagagcagagtacaggagagaaaaaacttcagagatatagagggccatccccaagtattcagctgagtataatctgtgtttgcatatagaaaaagaccagaggatgggtaaagaaccacctgaaaggattatacgggaagcaattcccaaggcttatacagaaaacatgatagttctcatttcaaccagcttgagtaaaaaaaactcataactcatgaagcattaggtagagaatataggaaggttgtgtctcagtaatgggaggggaatttgtcttaaaatgtatgctgcaataatctcatcgagaaatgtttagaatcaagactccccaaaagatcatattgtttccaagtaacttaaccatgt

SEQ ID NO: 68048 - DNA, 468 bp, Homo sapiens
gagatgaagtctagctctgtcacccaggctggagtggagtggcacaatctctgctcactgcaacctccaccacccgggttcaagtgattctcctgcctcagcctcccaagtagctgggattacaggcacccgccaccatgcctagctaatttttgtatttctgatagagatggggtttcaccatgttggccaggcttgtctcaaactcctgacctcaggcgatctgcctgcctcggcctcccaaagtattgggattacaggcatgagccactactcccggctaaatgttagttttttatcagtaacctctcatttcttttacccaggtatgttattttgttcgttatccctaggcaagaccctctagattgcctgtaacagtttcacactcttatcaaggatgtatatattcctgcattctcttttctatagttagtcatcatttcattagaaagatatttaagaatt

SEQ ID NO: 68049 - DNA, 784 bp, Homo sapiens
gtaagtggcagctgaatttggactcagatcatctatgcagataatattaaaattaataagatatggctctgttttcaaagggcttacaatccaattagagttgaaaagtatataggtttctttatgctgtgaaacaaattaaggatcataaaatgatagttttatctagttgaggggatcaggaagggcttctgaagaaagtagcatttcagtactaagagaaaatacagggttaattttgaatctcatggtggaggtatttgaaatgcaacctaaggcatataaactttgttcaatgagcagtagagaacattgagagttaaagaaactatggcccaaagataataaatattttcaacagctagttactgtcagataggatttaaacctaaatctgaggtgagaggtggctattgtggcttttctagatgtcagttctttgtttcagttagtgaacaagacttgttgactcttccttaaaacattttaaatttattagttccatgcatttggatcacatttatgtcaatatatgtccatattccatacctgattctcatggcgtagcctgcagaccagtctccttcagtgtattccctttctaatgctctctcacttgacaaaataagaagtaccttttaatttgattattagctattcagattatagttctaaagcagtgcttttgtcatgtgacagctacagaattttagaatcttggagatataagcttttaaaaaaaattctagtgggtaaaatacatgttccttacccattcagtgca

SEQ ID NO: 68050 - DNA, 290 bp, Homo sapiens
tgcccgcctcgcctcccaaagtgctgggattacaggcatgagccaccacgcctggccaagttctttttttaaaaagccacttgcaccaaggggagagaaaaccactgaccgcatgtcaggagatgagggtcccagacagctgtaccaccaaatgaatcaggaccatggacaggtcatctgccctttgggcccctgcccactcagcagaaaacaatgaatggacaccttatgtgttgggacagggggtacagtagggaacaagcagacatggacttgccttgtggagcttg

SEQ ID NO: 68051 - DNA, 440 bp, Homo sapiens
ggatgcattcctctgtaataaaaactaggcacactgtctagtgtctgcttagaagaggactgaacccagggagtgaggaaattcttggggatgagataaaccagagactgatgctcagaggttacggtcaacctagtcctgacctgagctccctggcaagaaagagtaaccccaaggcagatcatcactactcgccaggtgcaccgagactggagctaccaccaggcttctggaagagaatatttagatttgaactctcttctattcagtgaaacataccagaactcagtctaaagctgattgtatatgtgagaccaacattagctataaagaaatagtaggccaggcacagtggttcaaccctttgggaggccaaggtgggaagatcctttgagcccaggagttcatgactagcctgggcaacatagaccctgtctcta

SEQ ID NO: 68052 - DNA, 234 bp, Homo sapiens
agctggatttcatctctgcctttataaaacagtccttttatgcagtgtgaaaactacacaacagtatgtggtatcttcagttctatagttggtacccaaattatgagcttgtggagatctattctttaaagacgtgcatgaaaatattagatgcatagaatttatggaaacatgaatccatatgttagaaaatatggggcagtgatggaatgttctactatttcattttaatcc

SEQ ID NO: 68053 - DNA, 1044 bp, Homo sapiens
  misc_feature (893)..(893): n is a, c, g, or t
  misc_feature (925)..(925): n is a, c, g, or t
  misc_feature (944)..(944): n is a, c, g, or t
cattaacaaagaggtgccgttgtgctaggataggctggagtaggaaccatgtgcccatacaaataatacagatccagatacctaaacccaagaagattatgatctagtggaagaaacggacctgaaacatggagtattaaggctctatctgacactatccacagtggagcactggggaaagttaaatgtggcaggtcccatctaacaaacaatatattgccagttgaataaatgccattcatccaggaggaaggaacagaatgatccactggccaaggacagcaatagctgtgttcttttcctggtagtgagcatcccagccagtggatcacagactggttcagttattaatgggacttaaaagctgagactattttcggcaccatacaaagaagagtgaccataagcatcttgctccctctgtgtctcccaaaccacatcagtttcatcttttgctattacagaaagttggatgggagactgccaagatgaaagcagacctttaataaatcttctgagatcagtatgaaggaggcactcaagggaagagagactagaataagtatatcctggatattatcagacttagaatggagaggaaaagtcaatatgccacatattctgaagaaatgagagatcaagcatctaacttgtattttgctagaaactcctgattacaaatattctggcccattttccccatgaaaacataatgatgtcaacatggtggtgtcaaagccagggttcccagaaaaattacttcattgagctatgatataaaaattcttcgtcagctattaggtttcaagttgatatcgctgtgacggagaatatgaaggctcgtaaccgctcggactactaaacatatgcttaactaatgcacctttgatcancgatgcacgctcgatctatattaatggtagcntgagtctcgaattgtccanagagatggtggtggaagatctcaagacgccatgcgaggggtacatgttactaggaataggtggacaacgatgcttcgcttctctagtggttgcaagccct

SEQ ID NO: 68054 - DNA, 515 bp, Homo sapiens
ttctggggtattgtgggtttggctcccttttcaaaaaccagcctgatgtggatgcttatggatgaaactgaactgctcctaccctaccctgttggcttcacaatgtataggaaaacataggtttttctccagaagaaaatctgcctgcagaatgtatctggaggttgttttccttgttgctgacatatgcactgcatgtagacaactcacataatcaactgtataagatgacccatttttttccttctcatggatctccaagtgtctgtggcttttaatagatcttttctagaggaggagtcttgatagatctttttaaggtaatctgaaaagccatcaggagaaaaattaaagcaacacatatttaagaatactttaatttttcttgttcttaattatatgctaactgtgcttaaactgcaatttctttctgttaccttttactgctgaaagtagtgattatccttgccttttagatttgaaattaattttcgtgagaacaccctgggatatca

SEQ ID NO: 68055 - DNA, 997 bp, Homo sapiens
agctgcggaagcccaggacagttcgctgggaccagtgctaatggcagcttctgctcctgacccccatcaggtctctttcctcagacatccccaaagcttgtctgcctgtgggtctttcattaaaggtgacgggcaagggttttctcttccttccaagacacacttctaggctggcttgtgggtcccctgagacgaaggctgagcagggtgagcctcgaaaaccccatagcactggcccagagcactgcggtcaatgtccgaaggaccagagagggagggtgacttgctcaaggtcacaaacctaactggagctaggaagtaggtccccagactcccagtctgaggaaattggatgtggacagggctttggtctcctggccagagcaaacgcccagggatctgaacaggctgcccatctctggcctcaactcagcaccccaactggctccagtgccaaccattggcctctctcactggttggcacaggctgggtgagcctggccctttgccctgggttcaggagagaggtatggctttgcctggcagtcaggggaggtgttccaacctgggagcccctgggggaggagcgtgtgtgtgaacgcttgtgcctgttcatcagaaggggtgagcatggtgtgtatgcgtgggcatgcagaatgcagggtgatgacctgtctgcccgccctgagtgtcacagacacctgtgtgtcccctgtactagtgcctcccagatgctcttctcctgactggctctttgtgacctaaatttcaactgctccaccccacaaggaggaaaccagggccacaaatgtagtgagattttcataaagctaaatgtattcagtggaaacgaccttcctctgatctaaaagcatgcatgcctttgttttattactggagtattaaattagcccttacttatggaataggaggacagtaggtggcaattgttttctaatgctcttacttcacaaaataaaatggtggcagcacaatg

SEQ ID NO: 68056 - DNA, 83 bp, Homo sapiens
tcatgaaccacaacataaaaccatcccttcagggaacagggctttactttctctatggctcctgggtacacttaattctcccc

SEQ ID NO: 68057 - DNA, 540 bp, Homo sapiens
gggaaatcgagaaagatgagagaatcaggaagtcatgttggcagtttacacattaaagaagacaaattaatcggacgttgtgaaagtcacaaactgacacattccaaatggtctcttatcttggcctgcagcccctttctaaaccagagaaacgggaatgccttcttccagactttggggtcacatttactgactctgcccttcagggcacggctgagaaatggtgtgtgagggactagcatgatcagaggcccccagctctaaattctgccttccccaaagacctgttggaaggcccactgccagctgttattcttacccatcaccactggggatcttccaaatgacacagagttccatagagggcctcctcatcatggacatgaagactcgctttgcaattgtattctagcaagaaggaaaaaacccatgtcagtcaccctgtggcacgagcaaattaaaaccaaagttcaacggccaggcctaggactagtggattccaaaggaaagggcgggcttcgggctattgggtggaggctc

SEQ ID NO: 68058 - DNA, 933 bp, Homo sapiens
atcatgcctggctaattttttttattttttagtagaggcaaggtttcaccatgttggccaggccaggctggtcttgaacccctgagctcaggcagtccacccacctcggcctcccaaagtgctaagattacaggtgtaagccaccacacccagctttaattcttgcatttaggtctatgattcattttatgttaacttttgtgtgtgtggcctggggtgggggttcaaattattatttttttttgagacagagtctcactctgtcacccaggctggagtgcagtggctcaatctcggctcattgcaacctctgcctcccaggttcaagttcaagcagttctccctgcctcagcctcccaagtagctgggattacaggcgcccaccaccatgcccagctaatttttgtatttttagtagagacggggttttgccatgttggccaggctgatctcgaactcctgacctcaggtgatccgcccgcatcagcctcccaaagtgctgggattacaggcgtgagccaccgtgctcggcccaaattcattcttttacatgtggatatcccattgtcccggcaccatttgttgaaaagactattctttcttcattgaatggtcttgtcgcccttatcaaaaatcagttaaccacagatgtatgtaggtgtactgccttttgaagtagttattacttaaaagttattgatacaatttctggcagtagctgttcaataatacataatagctgatcagattatttttacatcactgagagtttgtaagtgatagagctaggatttgatcccaagaatgggtgactacaaagcatgcttttatttctgtattatactgcaggctgctaaagtggatagcgtctagctgcagctgtcaaggtcagagtcaagcagctcagcatcattcacatactctgtctagctt

SEQ ID NO: 68059 - DNA, 686 bp, Homo sapiens
  misc_feature (635)..(635): n is a, c, g, or t
ggtagaagtcaaacccgacaggagacagagactaggggcccacacaccaggaggaagaacccagtgcagagagtgccagcaggaagccacaggggcagggaaggcgctcctgggagggtgggtggctgcgtcctgaggctgagcagggggagctggcctcgggacaggatgtgcgcaggcgtggagcaggaagttcctggaatgatgggcaagagggagcaggtcactgggggcaggtctaaatactgggggctgcattgggatagcagaggcctcggacaggcccgctcagcatgtagactcccctccctggccccttccctaggatgacagtggaggtccatccccaggtggtggtgagggcaatcctgacacagagaccccagcccagctggcaggggaaggggagcccccaaggacccctgtatgttggggcgtgtcccgccaggcggccctccatggtgcccagcagcagccctgcttgcggaccctctttagtccccactgttaaaaaaataattcagtgaaaattgacactagctgggcatggtggtaggtgcctataatcccagctactcgggaggctgagacgggagaatcgcttgaaccagggagtcgggaggttgcagtgagcngagatggcgccactgcactccagcctgggtgacagagtgagactccgtctc

SEQ ID NO: 68060 - DNA, 476 bp, Homo sapiens
ctttcctaggagaatgatttgtgatggagttttacccagagcaggaataggtacggctgtgagtcacaaggtggtaggactctttatttgcttttttgcccaaatgtcatggaggacacagagcagagaacctggaaaaatgtgccattgggagaacgtgatgcaccattttaggccagaatgacgcatggaagcgtaaagtaaaaaattgcggagacaccaaaatgcatctgtgtggattgttaacaaaaaagcatgaaaatgtttgatactggttgttatagggaatcattcaaaatttcttatgcgtgtattaaatctgaaatggcaaaattaaaagccactttatcaagagaaggtcctggtattttcatatcttttcaaaaactaggaattctaatacaaagtgccaattacctgacacacttatttgataagcagaggatggacgtgtccattctcagacataggcaagc

SEQ ID NO: 68061 - DNA, 471 bp, Homo sapiens
gccctgccctcatgaagagccccccggatgttcacctctgcccagagacccggcctgcccaggaagagcagtctctgctcttgtgtgggtccctctgcccccaccctgcccagggctccccagcagcctgaggcccctaaggaagaacagccctcaatggtgattctattggtgttatgagttgtgtccccaaagagatatatcagtgtcctgacccacagtacctcagaatgtgactgcatttggagatagggttcttccaggggtaaccaaggtagaatgaggtcgttagtgtgggccctaatccaatatgacggctatccttataaaaagaggaacatttaggctggatacagtggctcatgcctataatcccagcaccttgggaggctgaggcaggaggactgcttgagctcaggagttcaagaccagcctggggcaacatgtcgaaacgctgtgtctaccaaaaaa

SEQ ID NO: 68062 - DNA, 4298 bp, Homo sapiens
  misc_feature (403)..(403): n is a, c, g, or t
  misc_feature (784)..(784): n is a, c, g, or t
  misc_feature (1806)..(1806): n is a, c, g, or t
  misc_feature (2073)..(2073): n is a, c, g, or t
  misc_feature (2078)..(2078): n is a, c, g, or t
  misc_feature (2099)..(2099): n is a, c, g, or t
  misc_feature (2103)..(2103): n is a, c, g, or t
  misc_feature (2115)..(2115): n is a, c, g, or t
  misc_feature (2123)..(2123): n is a, c, g, or t
  misc_feature (2151)..(2151): n is a, c, g, or t
  misc_feature (2162)..(2162): n is a, c, g, or t
  misc_feature (2174)..(2174): n is a, c, g, or t
  misc_feature (2694)..(2694): n is a, c, g, or t
  misc_feature (2914)..(2914): n is a, c, g, or t
  misc_feature (2981)..(2981): n is a, c, g, or t
  misc_feature (3045)..(3045): n is a, c, g, or t
  misc_feature (3162)..(3162): n is a, c, g, or t
  misc_feature (3293)..(3293): n is a, c, g, or t
  misc_feature (3543)..(3543): n is a, c, g, or t
  misc_feature (3967)..(3967): n is a, c, g, or t
  misc_feature (3976)..(3976): n is a, c, g, or t
  misc_feature (4038)..(4038): n is a, c, g, or t
  misc_feature (4258)..(4258): n is a, c, g, or t
cattttacttcttcttcccttcctgcttaactatgaagaacactagagaccaacatcctaatggcagggtgtataagctcgctgaggctgagggatctgccttcttgcccctttggcaccttgcctggtggagcagtgggagagagctgctcaaataacactcactttagagactctgagagactctgccatggaggtcaggggaaatgttttggaagaaaacatccatttcagcctgtgtcactggtcactgcctttagtttcctgggttttttttgtgagactgaccgtatgaggtccttttagtatggcagatgtcctgtgttgaaaggatcttggcctaatcacgtcccttttctaaaccttggttttaccatctgcaaaaaaaataagtttgactagntggtgactggagatcttttaagctctagaagccatagattttctttcctcaggctcagaatggtagaaaatcagcattagggcatctaataggccctgtctcctacttcatacattaattccttaacaacatccataggaagagacgttggttttcatggatggtaccatatgaaaatctttttttttgagacggagtcttgctctttcacccaggctggagcacagtggcgcgatctcggctcactgcaagctccgcctcctgggttcacgccattctcctgcctcagcctcccgagtagctgggactacaggcacccgccaccacgcccggctaattttttgtatttttagtagagatggggtttcaccatgttagccnggatggtctcaatctcctgacctcgtgatccacccgcctcggcctcccaaagtgctgggattacaggcgtaagccaccatgccatttgctgttttagggaatctgttcattagcttagggcaaattaccattttaaaaatgttgttcatatgtttttcggctggaccatggcaccatgatctctattctacaccacaaataccacactgttgatgcttagccagttagactcacccagttcttatgcctacaaagtaagctaagtgtcacgtgacaaccctccccctattcgggaaaacccgttattcctaggctgataatatcccatcaatgcccatgacccagagcaatgctcaagccttttactgcagacactggcactttcttggcctagctcctgggttatcattttccacagctcccatgcccctcacaacaactggatgtattttatactctggctcagagaggacagattgtgtacggagcatggacttttgaatcatacagatgcaaaactgaatcttgccagttagtagcagtataaccttaggccatctactgcacctctctgagctttggggtttcttcctcaaataagtgaaataaggatgactctatctcaggattattgcaaatctttgtgtgggatcatctttttaagtcacacagcacaatttctagtagctagcatgggctcagtaactgctaattccctttccattgctgtccctggcgtgtttcctggtcatgctctctctccctttgtggcagctttgcccagtctgttctctctgctggtctgtcttgtccctgaagctctgtctggctatctgttccttgtgctctgaggcacagttatcttctgcaagcttatcttggtgctaattacgccttgcctgggttagacacctagcctccgtgctgcctctgaactatgtgaatatgcctctatcacagcacaaacgataccaacattggtgacaacattactaatggtcacttattgtgtacttacgacntgctaaacactgggcaagcacttcacaaacatgacttcatccaatcccacaaaaggatactccttagttactgttactcttcccatttctcagctgatgaccttgacgccggagaggttagataccacatggagaaccatgcaggcggaaaggctgagatacactcgagcccagacagcctggcttgaaggcccattctcctactgcttatctgcatcctttaatggcctttgatttcttggagggcaagggaaagaacttgctcangggcnggtacagctactaagagaccngacngagactcacgtncaagcaanttgactccagacactgcttgcttcaaanctctgctgttncttggacaatcngcttgaagaaggggcaaggatcttcccctccgttctattctatctctacatccccttaacccagtagtatggctggcgcattttgggcacccaatgaatgtttgtggaataattcctccaatctcagtccaagtctagcctgtactttttagatggggaatatatccaatactgaccactcccgattaggttcaggttagtcacggaaggagtattagttgcccaatgtctgggctgtggtgccagtatgtttctgcattatttcccatccggagaccgatcaggtttcctcctaatacacatcctcagtcttaccagtaaaggccaaacaggctcagtgctgtcctgggacactcagatcttaaagagttaggactcactttgcttgtagccttgtaggataatcataggcaaaagagatactatcatttggtcaggaacattcccatgtgctcataagagccaatattaaaataaattcatggcctgagacagggtaaagaaagaaaagtttctgggntgctctgtggatgtgtgcgcaaacccgtgtttgaaggacacgcagggccaatgccaggacattctggagtttgtgcttgacccaagataatcctaaattttgtttaatatatctgaaagcatttgtaaacagatacgagattatattttaacatgatgattattgtcataaacaatgacaaataaagaagaaaatcacaaaggtcatttatcagaaatcnaatccccccagacccttctctgcctgtaagtctacctgcctgccaggtgctgggcgctgttcttctntccttgctcctgtgtgtctgtcctcagtcccacgggcagagaaaatcccttgtttatttacacnatgcagggcctggagaagctgctttttttctgttccttttttcagttttcaatttcaatttgtgctttcctcatggcatttttctagggccactcgagaagaagaagcaaagcagcntcctttgtcttatgacaagaatggaaatacaaagggaaacaaaaagcagccccagtaggtttaccctgcaaaccagcttgacaaattaaaactaaagctggtgggagaatgcaagtcctcacgtaaaactncattttctgatctgacaatggaaaaacatgacttttctttttaatggtaaaagggactattagcctaaggccctgtcatattatccccatctacaatgaaccttattttgaaaagtgttctattatttcaagctcagatggaattcaatcaaagaaaaaacatttctgtttatcagctttattatcactttgggttcctaaacccaagtaatctctctctcttccttgagccaatatggacatagaaacntacatacattctatcactgaatagttgagtttattctcattattattatgcccattgcacaagtcatagttgctaactactccagggtcaaaactctgcataaaaattataggctacgattttcagactattaacttttttttagaatgactgtttaggagtgacagcttttctcccaagaggagtaattctttcctctctgtttctcttaagattgtttttactgttgcatgtcacatgtaaaaaattaagtggacctctctgactacttgtgaggaagtttcaagaagagtaattatcagtataattgtcattatcagtagttaataccactaatggtatatggttctccagcaaattcttttgtctcctcctttacattaaatccacaatttagccacttctcaccattccaggtctgggntactatccnctctcctaggttaccgctatagccccattaagaagtttccttgtggctgggctggctcacanctgtaatcccagcacttcgggaggccgaggagggtagatcacctgaggtcaggagttcgagaccagcctagccaacatggtgaaaccccgactctactaaaaatacaaaaattagccaggtgtggtggcatcagcttgtagtcccagctactcaggaggctggggcaggaggatcacttgaacccgggagacggaggttgcagtgagctgagatcgcatnaccgcactccagcttgggtgacagagcgagactctgtctc

SEQ ID NO: 68063 - DNA, 510 bp, Homo sapiens
ttgcccggagaattgaagtaatttgcacatgaatcagaaaatgaagctagtgtcctattcaggtaaaaatgtgttaagcaatacaaaataggaaacaacaggtggttctttatttcaagttaatatgacctgatatagggttttccctgtttagctttttatatttgtttcttttcatttttgttttccctagctttcatgaatttttttgtttccatctcctggtggacctttttgaaagtagagttaatttcctttttcttttctgatattttatagtaatatagaattaaataatatgttttgtaccctggtgactcagagttttaaaatctgggattatggagcaatataattcaggggcctatacgtgtagatgggaaagggttacatctttagttccattaacctgtaaatgaaagatagcatttatgaccgaacgcagtggctcacaccagtaatcccagcactctgaaaggcagaggtgggcagatcacttgaggccaggag

SEQ ID NO: 68064 - DNA, 738 bp, Homo sapiens
ggctcccccaccagtcgcgtctggggtgtcttattttttgtgtctattctctgggcggtctcgccctgtgtgtgacgtcccctctgtctgtttaggttgtttcccccccccttctttttgcgcgtctctcctgtgtctgcccgctccttttgtggatgattttttgtccgacagcaaccgccgtccccggtgtggttcctcccccccggggcgtctttgttgttatttgtgttggtgatatttctctcctcccctctctttttctcttgtcgccccgggggttgttcctgttttggggtccccggctttttgtgcccacaagtgtccagtgtggccgatttgtggggcccccgcgccgccgcaacacgatgttgttttatagaaagcgtttcttcgaggggcccctgaccgcgcccgcaccaagattgttttttgttttgtttttttttttttttttttgcttttccaactttatttagaaaaacaaatccaggtcccagtgccccctgtaccctccccgaccccagccataatttaaataacttagagacagagttggagggaggggacaggagaggttggggtcacggtggaaggaggaagagagcccactacagccgccgcagcgcccccttctgtcgtctttttcttggccgccagcttcttatcgcgctcgccagcatgcttcttggccatgggacctggatttgtttttctaaataaagttggaaaagcaga

SEQ ID NO: 68065 - DNA, 785 bp, Homo sapiens
ggctcccccaccagtcgcgtctggggtgtcttattttttgtgtctattctctgggcggtctcgccctgtgtgtgacgtcccctctgtctgtttaggttgtttcccccccccttctttttgcgcgtctctcctgtgtctgcccgctccttttgtggatgattttttgtccgacagcaaccgccgtccccggtgtggttcctcccccccggggcgtctttgttgttatttgtgttggtgatatttctctcctcccctctctttttctcttgtcgccccgggggttgttcctgttttggggtccccggctttttgtgcccacaagtgtccagtgtggccgatttgtggggcccccgcgccgccgcaacacgatgttgttttatagaaagcgtttcttcgaggggcccctgaccgcgcccgcaccaagattgttttttgttttgtttttttttttttttttttgcttttccaactttatttagaaaaacaaatccaggtcccagtgccccctgtaccctccccgaccccagccataatttaaataacttagagacagagttggagggaggggacaggagaggttggggtcacggtggaaggaggaagagagcccactacagccgccgcagcgcccccttctgtcgttttccaactttatttagaaaaacaaatccaggtcccagtgccccctgtaccctccccgaccccagccataatttaaataacttagagacagagttggagggaggggacaggagaggttggggtcacggtggaaggaggaagag

SEQ ID NO: 68066 - DNA, 756 bp, Homo sapiens
  misc_feature (693)..(693): n is a, c, g, or t
  misc_feature (696)..(696): n is a, c, g, or t
ggctcccccaccagtcgcgtctggggtgtcttattttttgtgtctattctctgggcggtctcgccctgtgtgtgacgtcccctctgtctgtttaggttgtttcccccccccttctttttgcgcgtctctcctgtgtctgcccgctccttttgtggatgattttttgtccgacagcaaccgccgtccccggtgtggttcctcccccccggggcgtctttgttgttatttgtgttggtgatatttctctcctcccctctctttttctcttgtcgccccgggggttgttcctgttttggggtccccggctttttgtgcccacaagtgtccagtgtggccgatttgtggggcccccgcgccgccgcaacacgatgttgttttatagaaagcgtttcttcgaggggcccctgaccgcgcccgcaccaagattgttttttgttttgtttttttttttttttttttgcttttccaactttatttagaaaaacaaatccaggtcccagtgccccctgtaccctccccgaccccagccataatttaaataacttagagacagagttggagggaggggacaggagaggttggggtctggggtgggggtggcaaactgggagtggccggcaggggtgcagggggtgaaacaggaggcccagggaccggtggaggcgggggttcctttggggggaaaggcactancancgggtcgggccccgggggctgtttttggctccgctccaggcccgacactttagggaccac

SEQ ID NO: 68067 - DNA, 727 bp, Homo sapiens
ggctcccccaccagtcgcgtctggggtgtcttattttttgtgtctattctctgggcggtctcgccctgtgtgtgacgtcccctctgtctgtttaggttgtttcccccccccttctttttgcgcgtctctcctgtgtctgcccgctccttttgtggatgattttttgtccgacagcaaccgccgtccccggtgtggttcctcccccccggggcgtctttgttgttatttgtgttggtgatatttctctcctcccctctctttttctcttgtcgccccgggggttgttcctgttttggggtccccggctttttgtgcccacaagtgtccagtgtggccgatttgtggggcccccgcgccgccgcaacacgatgttgttttatagaaagcgtttcttcgaggggcccctgaccgcgcccgcaccaagattgttttttgttttgtttttttttttttttttttgcttttccaactttatttagaaaaacaaatccaggtcccagtgccccctgtaccctccccgaccccagccataatttaaataacttagagacagagttggagggaggggacaggagaggttggggtcctgggaaaggggaaagatagaccctttagacagtcctgactttcggttttggaacacttcttgtggtcggccaatttagattggaccagtgagggtttgatttggtcttgaggcgccatagcccttgggggggcggcggag

SEQ ID NO: 68068 - DNA, 980 bp, Homo sapiens
ggctcccccaccagtcgcgtctggggtgtcttattttttgtgtctattctctgggcggtctcgccctgtgtgtgacgtcccctctgtctgtttaggttgtttcccccccccttctttttgcgcgtctctcctgtgtctgcccgctccttttgtggatgattttttgtccgacagcaaccgccgtccccggtgtggttcctcccccccggggcgtctttgttgttatttgtgttggtgatatttctctcctcccctctctttttctcttgtcgccccgggggttgttcctgttttggggtccccggctttttgtgcccacaagtgtccagtgtggccgatttgtggggcccccgcgccgccgcaacacgatgttgttttatagaaagcgtttcttcgaggggcccctgaccgcgcccgcaccaagattgttttttgttttgtttttttttttttttttttgcttttccaactttatttagaaaaacaaatccaggtcccagtgccccctgtaccctccccgaccccagccataatttaaataacttagagacagagttggagggaggggacaggagaggttggggtcacggtggaaggaggaagagagcccactacagccgccgcagcgcccccttctgtcgtctttttcttggccgccagcttcttatcgcgctcgccagcatgcttcttggccatgggaccctcagcccctcccaggccccctggggccccagggtcggtggaggaagctgcagtgccactggccagggcccgcccggcttcggccctgccgctggggcagtttctccacgttggagttcatggctgcggccggccgggggcgggtccccccggcccccttcctgcgttcttcggtccgccggccggggcgggggcccaactgctgccgctgcggccctggagaggccccggcggccccgctccgctccccgctgcctctgacgtccgccgcgcacagc

SEQ ID NO: 68069 - DNA, 674 bp, Homo sapiens
  misc_feature (645)..(646): n is a, c, g, or t
  misc_feature (651)..(651): n is a, c, g, or t
  misc_feature (654)..(655): n is a, c, g, or t
  misc_feature (657)..(657): n is a, c, g, or t
ggctcccccaccagtcgcgtctggggtgtcttattttttgtgtctattctctgggcggtctcgccctgtgtgtgacgtcccctctgtctgtttaggttgtttcccccccccttctttttgcgcgtctctcctgtgtctgcccgctccttttgtggatgattttttgtccgacagcaaccgccgtccccggtgtggttcctcccccccggggcgtctttgttgttatttgtgttggtgatatttctctcctcccctctctttttctcttgtcgccccgggggttgttcctgttttggggtccccggctttttgtgcccacaagtgtccagtgtggccgatttgtggggcccccgcgccgccgcaacacgatgttgttttatagaaagcgtttcttcgaggggcccctgaccgcgcccgcaccaagattgttttttgttttgtttttttttttttttttttgcttttccaactttatttagaaaaacaaatccaggtcccagtgccccctgtaccctccccgaccccagccataatttaaataacttagagacagagttggagggaggggacaggagaggttggggtcacggtggaaggaggaagagagcccactacagccgccgcagcgcccccttctgtctcgcnnccgcntannantagtagtaggcggccgc

SEQ ID NO: 68070 - DNA, 1905 bp, Homo sapiens
ggcggagggaggaaaagggaaaggaagccgacaggccttaaaggggccgcaactatttttttaagccactttttcctctctccaattttgcaacgacgggcgcggaggaggaggttcccggaagccacgcgcagctggagcagcggcgaccgcagctggaggcccggagcgcctgcggggctggcagaggcgagggaggttgcgggtaggaagggcggactgcgcgcgccccctgcgtcccgcgcacctcggggccggtccatgctcccgacggctgcgggcttcagcatctggggccaggttggggcggcggggtccagggcgcaggtggtgcggccgatgcgccgggccggaggctgaggccgcgctgcggggctgggacagcactggcatctccagagcaggcccggggcagcaagggaggcgccgcgatgccagacgaaaatatcttcctgttcgtgcccaacctcatcggttatgcccggattgtcttcgccatcatttctttctacttcatgccctgctgccccctcacggcctcctccttctacctgctcagcggcctgctggacgctttcgatggacacgctgctcgcgctcttaatcaaggaacccggtttggggccatgctggacatgctgacggaccgctgctccaccatgtgcctgttggtcaacctggccctgctgtaccctggagccacgctgttcttccaaatcagcatgagtttggatgtggccagtcactggctgcacctccacagttctgtggtccgaggcagtgagagtcacaagatgatcgacttgtccgggaatccggtgcttcggatctactacacctcgaggcctgctctgttcaccttgtgtgctgggaatgagctcttctactgcctcctctacctgttccatttctctgagggacctttagttggctctgtgggactgttccggatgggcctctgggtcactgcccccatcgccttgctgaagtcgctcatcagcgtcatccacctgatcacggccgcccgcaacatggctgccctggacgcagcagaccgcgccaagaagaagtgacgctggagccccgggtcctggctgcccacctgccctgggagtcttgctgtgccacacagctccccaccccctgctaggaggtcccagtctcacgccttcctcatgtgttgttctacctgctgggatgggggtcagcctctctttggtgacgtcacgttctctgggatcctgaggacccgggcctcaaatcagggaggatacgcgggaggccccctccatccaggcggtgctcctggggtgccgggaccgggcagtgtcacaccctgcctgctcagtcctggggtccgagatgctagggacgcttgagtgagggaggtggtgtgagggccaggtttcctgaaaggcgggagtcagacctccgcccccagccagagcaagcttggggcaccatgcccaggagggaagaagccatccacagccttccctgtcaccggctcctctgtcctgcctaccctggtcctggcgggacttcactatttgacttggtttcctttcagatattcttggctcagggcctgggttgagggagcttagggaaggacgtccgtctgggtgcttttcctccagtttgctggctggcttctccgtctacccacagtgacctcacagagaggccctcctgccacccatgctcatgtggtgtccccaccgcccacttgtttgatgtcactgactgtctacatgtatttatattcttgatattttctaccctcactagaatgtaaactccatgaaggcacagacttttcttgttctcttctctatccctagagtaagaccaacttgaacctggcatatagtagctgcttaataaatactcgtctgtcaatga

SEQ ID NO: 68071 - DNA, 463 bp, Homo sapiens
tcttggctcagggcctgggttgagggagcttagggaaggacgtccgtctgggtgcttttcctccagtttgctggctggcttctccgtctacccgcgggacttcactatttgacttggtttcctttcagatattcttggctcagggcctgggttgagggagcttagggaaggacgtccgtctgggtgcttttcctccagtttgctggctggcttctccgtctacccacagtgacctcacagagaggccctcctgccacccatgctcatgtggtgtccccaccgcccacttgtttgatgtcactgactgtctacatgtatttatattcttgatattttctaccctcactagaatgtaaactccatgaaggcacagacttttcttgttctcttctctatccctagagtaagaccaacttgaacctggcatatagtagctgcttaataaatactcgtctgtcaatga

SEQ ID NO: 68072 - DNA, 2485 bp, Homo sapiens
ggcggagggaggaaaagggaaaggaagccgacaggccttaaaggggccgcaactatttttttaagccactttttcctctctccaattttgcaacgacgggcgcggaggaggaggttcccggaagccacgcgcagctggagcagcggcgaccgcagctggaggcccggagcgcctgcggggctggcagaggcgagggaggttgcgggtaggaagggcggactgcgcgcgccccctgcgtcccgcgcacctcggggccggtccatgctcccgacggctgcgggcttcagcatctggggccaggttggggcggcggggtccagggcgcaggtggtgcggccgatgcgccgggccggaggctgaggccgcgctgcggggctgggacagcactggcatctccagagcaggcccggggcagcaagggaggcgccgcgatgccagacgaaaatatcttcctgttcgtgcccaacctcatcggttatgcccggattgtcttcgccatcatttctttctacttcatgccctgctgccccctcacggcctcctccttctacctgctcagcggcctgctggacgctttcgatggacacgctgctcgcgctcttaatcaaggaacccggtttggggccatgctggacatgctgacggaccgctgctccaccatgtgcctgttggtcaacctggccctgctgtaccctggagccacgctgttcttccaaatcagcatgagtttggatgtggccagtcactggctgcacctccacagttctgtggtccgaggcagtgagagtcacaagatgatcgacttgtccgggaatccggtgcttcggatctactacacctcgaggcctgctctgttcaccttgtgtgctgggaatgagctcttctactgcctcctctacctgttccatttctctgagggacctttagttggctctgtgggactgttccggatgggcctctgggtcactgcccccatcgccttgctgaagtcgctcatcagcgtcatccacctgatcacggccgcccgcaacatggctgccctggacgcagcagaccgcgccaagaagaagtgacgctggagccccgggtcctggctgcccacctgccctgggagtcttgctgtgccacacagctccccaccccctgctaggaggtcccagtctcacgccttcctcatgtgttgttctacctgctgggatgggggtcagcctctctttggtgacgtcacgttctctgggatcctgaggacccgggcctcaaatcagggaggatacgcgggaggccccctccatccaggcggtgctcctggggtgccgggaccgggcagtgtcacaccctgcctgctcagtcctggggtccgagatgctagggacgcttgagtgagggaggtggtgtgagggccaggtttcctgaaaggcgggagtcagacctccgcccccagccagagcaagcttggggcaccatgcccaggagggaagaagccatccacagccttccctgtcaccggctcctctgtcctgcctaccctggtcctggcgggacttcactatttgacttggtttcctttcagatattcttggctcagggcctgggttgagggagcttagggaaggacgtccgtctgggtgcttttcctccagtttgctggctggcttctccgtctacccacagtgacctcacagagaggccctcctgccacccatgctcatgtggtgtccccaccgcccacttgtttgatgtcactgactgtctacatgtatttatattcttgatattttctaccctcactagaatgtaaactccatgaaggcacagacttttcttgttctcttctctatccctagagtaagaccaacttgaacctggcatatagtagctgcttaataaatactcgtctgtcaatgaaaaaaaaaaaaaaaacaaaaaaaaacaaaaaacaacaaaacttaaacataaacacaaaaaggggggggccctcttatagaagatactcccgcggaggggcgcccaatttgtgcgtgttctccccgagtttttgtgacacacagggtgcccccaaattatagagcggcgcgttatataataaccgcggagccgtgggcgcacccgcgcctgttttacacaacgctgcgtgctgttgacagctcgcgcacacactgtgtccacctctgggggatacattttatgtggacggagacacactctctcatctcaggggggggggggacccaacatggggggcaaaacatctctccccctcagagacagacatatgtaaaaagcggcccccttgaggggggaacaaacttactacaacaacttttactcaagagcgggtgctattacgagtgggggtgcgaaccacacctgccgccgtgcgatatttagtggtgccgccgccgcggcgttcagaaaaaactttttgcacctcccaccggggaagatcttgatattttgcgcacacaaacttttttatcacccgggg

SEQ ID NO: 68073 - DNA, 2007 bp, Homo sapiens
ggcggagggaggaaaagggaaaggaagccgacaggccttaaaggggccgcaactatttttttaagccactttttcctctctccaattttgcaacgacgggcgcggaggaggaggttcccggaagccacgcgcagctggagcagcggcgaccgcagctggaggcccggagcgcctgcggggctggcagaggcgagggaggttgcgggtaggaagggcggactgcgcgcgccccctgcgtcccgcgcacctcggggccggtccatgctcccgacggctgcgggcttcagcatctggggccaggttggggcggcggggtccagggcgcaggtggtgcggccgatgcgccgggccggaggctgaggccgcgctgcggggctgggacagcactggcatctccagagcaggcccggggcagcaagggaggcgccgcgatgccagacgaaaatatcttcctgttcgtgcccaacctcatcggttatgcccggattgtcttcgccatcatttctttctacttcatgccctgctgccccctcacggcctcctccttctacctgctcagcggcctgctggacgctttcgatggacacgctgctcgcgctcttaatcaaggaacccggtttggggccatgctggacatgctgacggaccgctgctccaccatgtgcctgttggtcaacctggccctgctgtaccctggagccacgctgttcttccaaatcagcatgagtttggatgtggccagtcactggctgcacctccacagttctgtggtccgaggcagtgagagtcacaagatgatcgacttgtccgggaatccggtgcttcggatctactacacctcgaggcctgctctgttcaccttgtgtgctgggaatgagctcttctactgcctcctctacctgttccatttctctgagggacctttaggtaggagatgaggggctgggcaggaggatgggagggggatctggcctgcccagggagatggaggccccctccttcgggccccaaactccctctgcttctgcattggctctgtgggactgttccggatgggcctctgggtcactgcccccatcgccttgctgaagtcgctcatcagcgtcatccacctgatcacggccgcccgcaacatggctgccctggacgcagcagaccgcgccaagaagaagtgacgctggagccccgggtcctggctgcccacctgccctgggagtcttgctgtgccacacagctccccaccccctgctaggaggtcccagtctcacgccttcctcatgtgttgttctacctgctgggatgggggtcagcctctctttggtgacgtcacgttctctgggatcctgaggacccgggcctcaaatcagggaggatacgcgggaggccccctccatccaggcggtgctcctggggtgccgggaccgggcagtgtcacaccctgcctgctcagtcctggggtccgagatgctagggacgcttgagtgagggaggtggtgtgagggccaggtttcctgaaaggcgggagtcagacctccgcccccagccagagcaagcttggggcaccatgcccaggagggaagaagccatccacagccttccctgtcaccggctcctctgtcctgcctaccctggtcctggcgggacttcactatttgacttggtttcctttcagatattcttggctcagggcctgggttgagggagcttagggaaggacgtccgtctgggtgcttttcctccagtttgctggctggcttctccgtctacccacagtgacctcacagagaggccctcctgccacccatgctcatgtggtgtccccaccgcccacttgtttgatgtcactgactgtctacatgtatttatattcttgatattttctaccctcactagaatgtaaactccatgaaggcacagacttttcttgttctcttctctatccctagagtaagaccaacttgaacctggcatatagtagctgcttaataaatactcgtctgtcaatga

SEQ ID NO: 68074 - DNA, 1851 bp, Homo sapiens
ggcggagggaggaaaagggaaaggaagccgacaggccttaaaggggccgcaactatttttttaagccactttttcctctctccaattttgcaacgacgggcgcggaggaggaggttcccggaagccacgcgcagctggagcagcggcgaccgcagctggaggcccggagcgcctgcggggctggcagaggcgagggaggttgcgggtaggaagggcggactgcgcgcgccccctgcgtcccgcgcacctcggggccggtccatgctcccgacggctgcgggcttcagcatctggggccaggttggggcggcggggtccagggcgcaggtggtgcggccgatgcgccgggccggaggctgaggccgcgctgcggggctgggacagcactggcatctccagagcaggcccggggcagcaagggaggcgccgcgatgccagacgaaaatatcttcctgttcgtgcccaacctcatcggttatgcccggattgtcttcgccatcatttctttctacttcatgccctgctgccccctcacggcctcctccttctacctgctcagcggcctgctggacgctttcgatggacacgctgctcgcgctcttaatcaaggaacccggtttggggccatgctggacatgctgacggaccgctgctccaccatgtgcctgttggtcaacctggccctgctgtaccctggagccacgctgttcttccaaatcagcatgagtttggatgtggccagtcactggctgcacctccacagttctgtggtccgaggcagtgagagtcacaagatgatcgacttgtccgggaatccggtgcttcggatctactacacctcgaggcctgctctgttcaccttgtgtgctgggaatgagctcttctactgcctcctctacctgttccatttctctgagggacctttagttggctctgtgggactgttccggatgggcctctgggtcactgcccccatcgccttgctgaagtcgctcatcagcgtcatccacctgatcacggccgcccgcaacatggctgccctggacgcagcagaccgcgccaagaagaagtgacgctggagccccgggtcctggctgcccacctgccctgggagtcttgctgtgccacacagctccccaccccctgctaggaggtcccagtctcacgccttcctcatgtgttgttctacctgctgggatgggggtcagcctctctttggtgacgtcacgttctctgggatcctgaggacccgggcctcaaatcagggaggatacgcgggaggccccctccatccaggcggtgctcctggggtgccgggaccgggcagtgtcacaccctgcctgctcagtcctggggtccgagatgctagggacgcttgagtgagggaggtggtgtgagggccaggtttcctgaaaggcgggagtcagacctccgcccccagccagagcaagcttggggcaccatgcccaggagggaagaagccatccacagccttccctgtcaccggctcctctgtcctgcctaccctggtcctggcgggacttcactatttgacttggtttcctttcagatattcttgcctccagtttgctggctggcttctccgtctacccacagtgacctcacagagaggccctcctgccacccatgctcatgtggtgtccccaccgcccacttgtttgatgtcactgactgtctacatgtatttatattcttgatattttctaccctcactagaatgtaaactccatgaaggcacagacttttcttgttctcttctctatccctagagtaagaccaacttgaacctggcatatagtagctgcttaataaatactcgtctgtcaatga

SEQ ID NO: 68075 - DNA, 1614 bp, Homo sapiens
ggcggagggaggaaaagggaaaggaagccgacaggccttaaaggggccgcaactatttttttaagccactttttcctctctccaattttgcaacgacgggcgcggaggaggaggttcccggaagccacgcgcagctggagcagcggcgaccgcagctggaggcccggagcgcctgcggggctggcagaggcgagggaggttgcgggtaggaagggcggactgcgcgcgccccctgcgtcccgcgcacctcggggccggtccatgctcccgacggctgcgggcttcagcatctggggccaggttggggcggcggggtccagggcgcaggtggtgcggccgatgcgccgggccggaggctgaggccgcgctgcggggctgggacagcactggcatctccagagcaggcccggggcagcaagggaggcgccgcgatgccagacgaaaatatcttcctgttcgtgcccaacctcatcggttatgcccggattgtcttcgccatcatttctttctacttcatgccctgctgccccctcacggcctcctccttctacctgctcagcggcctgctggacgctttcgatggacacgctgctcgcgctcttaatcaaggaacccggtttggggccatgctggacatgctgacggaccgctgctccaccatgtgcctgttggtcaacctggccctgctgtaccctggagccacgctgttcttccaaatcagcatgagtttggatgtggccagtcactggctgcacctccacagttctgtggtccgaggcagtgagagtcacaagatgatcgacttgtccgggaatccggtgcttcggatctactacacctcgaggcctgctctgttcaccttgtgtgctgggaatgagctcttctactgcctcctctacctgttccatttctctgagggacctttagttggctctgtgggactgttccggatgggcctctgggtcactgcccccatcgccttgctgaagtcgctcatcagcgtcatccacctgatcacggccgcccgcaacatggctgccctggacgcagcagaccgcgccaagaagaagtgacgctggagccccgggtcctggctgcccacctgccctgggagtcttgctgtgccacacagctccccaccccctgctaggaggtcccagtctcacgccttcctcatgtgttgttctacctgctgggatgggggtcagcctctctttggtgacgtcacgttctctgggatcctggcgggacttcactatttgacttggtttcctttcagatattcttggctcagggcctgggttgagggagcttagggaaggacgtccgtctgggtgcttttcctccagtttgctggctggcttctccgtctacccacagtgacctcacagagaggccctcctgccacccatgctcatgtggtgtccccaccgcccacttgtttgatgtcactgactgtctacatgtatttatattcttgatattttctaccctcactagaatgtaaactccatgaaggcacagacttttcttgttctcttctctatccctagagtaagaccaacttgaacctggcatatagtagctgcttaataaatactcgtctgtcaatga

SEQ ID NO: 68076 - DNA, 1451 bp, Homo sapiens
ggcggagggaggaaaagggaaaggaagccgacaggccttaaaggggccgcaactatttttttaagccactttttcctctctccaattttgcaacgacgggcgcggaggaggaggttcccggaagccacgcgcagctggagcagcggcgaccgcagctggaggcccggagcgcctgcggggctggcagaggcgagggaggttgcgggtaggaagggcggactgcgcgcgccccctgcgtcccgcgcacctcggggccggtccatgctcccgacggctgcgggcttcagcatctggggccaggttggggcggcggggtccagggcgcaggtggtgcggccgatgcgccgggccggaggctgaggccgcgctgcggggctgggacagcactggcatctccagagcaggcccggggcagcaagggaggcgccgcgatgccagacgaaaatatcttcctgttcgtgcccaacctcatcggttatgcccggattgtcttcgccatcatttctttctacttcatgccctgctgccccctcacggcctcctccttctacctgctcagcggcctgctggacgctttcgatggacacgctgctcgcgctcttaatcaaggaacccggtttggggccatgctggacatgctgacggaccgctgctccaccatgtgcctgttggtcaacctggccctgctgtaccctggagccacgctgttcttccaaatcagcatgagtttggatgtggccagtcactggctgcacctccacagttctgtggtccgaggcagtgagagtcacaagatgatcgacttgtccgggaatccggtgcttcggatctactacacctcgaggcctgctctgttcaccttgtgtgctgggaatgagctcttctactgcctcctctacctgttccatttctctgagggacctttagttggctctgtgggactgttccggatgggcctctgggtcactgcccccatcgccttgctgaagtcgctcatcagcgtcatccacctgatcacggccgcccgcaacatggctgccctggacgcagcagaccgcgccaagaagaagtgacgctggagccccgggtcctggctgcccacctgccctgggagtcttgctgtgccacacagctccccaccccctgctaggaggtcccagtctcacgccttcctcatgtgttgttctacctgctgggatgggggtcagcctctctttggtgacgtcacgttctctgggatcctgaggacccgggcctcaaatcagggaggatacgcgggaggccccctccatccaggcggtgctcctggggtgccgggaccgggcagtgtcacaccctgcctgctcagtcctggggtccgagatgctagggacgcttgagtgagggaggtggtgtgagggccaggtttcctgaaaggcgggagtcagcgtagtggaagagtcagcatacgg

SEQ ID NO: 68077 - DNA, 1770 bp, Homo sapiens
ggcggagggaggaaaagggaaaggaagccgacaggccttaaaggggccgcaactatttttttaagccactttttcctctctccaattttgcaacgacgggcgcggaggaggaggttcccggaagccacgcgcagctggagcagcggcgaccgcagctggaggcccggagcgcctgcggggctggcagaggcgagggaggttgcgggtaggaagggcggactgcgcgcgccccctgcgtcccgcgcacctcggggccggtccatgctcccgacggctgcgggcttcagcatctggggccaggttggggcggcggggtccagggcgcaggtggtgcggccgatgcgccgggccggaggctgaggccgcgctgcggggctgggacagcactggcatctccagagcaggcccggggcagcaagggaggcgccgcgatgccagacgaaaatatcttcctgttcgtgcccaacctcatcggaacccggtttggggccatgctggacatgctgacggaccgctgctccaccatgtgcctgttggtcaacctggccctgctgtaccctggagccacgctgttcttccaaatcagcatgagtttggatgtggccagtcactggctgcacctccacagttctgtggtccgaggcagtgagagtcacaagatgatcgacttgtccgggaatccggtgcttcggatctactacacctcgaggcctgctctgttcaccttgtgtgctgggaatgagctcttctactgcctcctctacctgttccatttctctgagggacctttagttggctctgtgggactgttccggatgggcctctgggtcactgcccccatcgccttgctgaagtcgctcatcagcgtcatccacctgatcacggccgcccgcaacatggctgccctggacgcagcagaccgcgccaagaagaagtgacgctggagccccgggtcctggctgcccacctgccctgggagtcttgctgtgccacacagctccccaccccctgctaggaggtcccagtctcacgccttcctcatgtgttgttctacctgctgggatgggggtcagcctctctttggtgacgtcacgttctctgggatcctgaggacccgggcctcaaatcagggaggatacgcgggaggccccctccatccaggcggtgctcctggggtgccgggaccgggcagtgtcacaccctgcctgctcagtcctggggtccgagatgctagggacgcttgagtgagggaggtggtgtgagggccaggtttcctgaaaggcgggagtcagacctccgcccccagccagagcaagcttggggcaccatgcccaggagggaagaagccatccacagccttccctgtcaccggctcctctgtcctgcctaccctggtcctggcgggacttcactatttgacttggtttcctttcagatattcttggctcagggcctgggttgagggagcttagggaaggacgtccgtctgggtgcttttcctccagtttgctggctggcttctccgtctacccacagtgacctcacagagaggccctcctgccacccatgctcatgtggtgtccccaccgcccacttgtttgatgtcactgactgtctacatgtatttatattcttgatattttctaccctcactagaatgtaaactccatgaaggcacagacttttcttgttctcttctctatccctagagtaagaccaacttgaacctggcatatagtagctgcttaataaatactcgtctgtcaatga

SEQ ID NO: 68078 - DNA, 1818 bp, Homo sapiens
ggcggagggaggaaaagggaaaggaagccgacaggccttaaaggggccgcaactatttttttaagccactttttcctctctccaattttgcaacgacgggcgcggaggaggaggttcccggaagccacgcgcagctggagcagcggcgaccgcagctggaggcccggagcgcctgcggggctggcagaggcgagggaggttgcgggtaggaagggcggactgcgcgcgccccctgcgtcccgcgcacctcggggccggtccatgctcccgacggctgcgggcttcagcatctggggccaggttggggcggcggggtccagggcgcaggtggtgcggccgatgcgccgggccggaggctgaggccgcgctgcggggctgggacagcactggcatctccagagcaggcccggggcagcaagggaggcgccgcgatgccagacgaaaatatcttcctgttcgtgcccaacctcatcggcctgctggacgctttcgatggacacgctgctcgcgctcttaatcaaggaacccggtttggggccatgctggacatgctgacggaccgctgctccaccatgtgcctgttggtcaacctggccctgctgtaccctggagccacgctgttcttccaaatcagcatgagtttggatgtggccagtcactggctgcacctccacagttctgtggtccgaggcagtgagagtcacaagatgatcgacttgtccgggaatccggtgcttcggatctactacacctcgaggcctgctctgttcaccttgtgtgctgggaatgagctcttctactgcctcctctacctgttccatttctctgagggacctttagttggctctgtgggactgttccggatgggcctctgggtcactgcccccatcgccttgctgaagtcgctcatcagcgtcatccacctgatcacggccgcccgcaacatggctgccctggacgcagcagaccgcgccaagaagaagtgacgctggagccccgggtcctggctgcccacctgccctgggagtcttgctgtgccacacagctccccaccccctgctaggaggtcccagtctcacgccttcctcatgtgttgttctacctgctgggatgggggtcagcctctctttggtgacgtcacgttctctgggatcctgaggacccgggcctcaaatcagggaggatacgcgggaggccccctccatccaggcggtgctcctggggtgccgggaccgggcagtgtcacaccctgcctgctcagtcctggggtccgagatgctagggacgcttgagtgagggaggtggtgtgagggccaggtttcctgaaaggcgggagtcagacctccgcccccagccagagcaagcttggggcaccatgcccaggagggaagaagccatccacagccttccctgtcaccggctcctctgtcctgcctaccctggtcctggcgggacttcactatttgacttggtttcctttcagatattcttggctcagggcctgggttgagggagcttagggaaggacgtccgtctgggtgcttttcctccagtttgctggctggcttctccgtctacccacagtgacctcacagagaggccctcctgccacccatgctcatgtggtgtccccaccgcccacttgtttgatgtcactgactgtctacatgtatttatattcttgatattttctaccctcactagaatgtaaactccatgaaggcacagacttttcttgttctcttctctatccctagagtaagaccaacttgaacctggcatatagtagctgcttaataaatactcgtctgtcaatga

SEQ ID NO: 68079 - DNA, 1920 bp, Homo sapiens
ggcggagggaggaaaagggaaaggaagccgacaggccttaaaggggccgcaactatttttttaagccactttttcctctctccaattttgcaacgacgggcgcggaggaggaggttcccggaagccacgcgcagctggagcagcggcgaccgcagctggaggcccggagcgcctgcggggctggacatgagcgccgaagggagcgtgtgcagtgcgtagtgaaaaggcgcaggaacctgacgcgactgccccactggcgatccctgctgctactcctctgtgtgggcctgtgtcccactcgtctccctgtatcgagcatgacggatgctttcaggcaatcgttgcgtgcgcccatgcgatttggcgcgcaggtctgggtgctcgcatgtggacagctacgcgctgtgttgctgagcctgcattgtcgtgcctgtgcgcctggtatggcttgatggccgcctgcttgcgagcgcgcttgggacgagccactggcatctccagagcaggcccggggcagcaagggaggcgccgcgatgccagacgaaaatatcttcctgttcgtgcccaacctcatcggcctgctggacgctttcgatggacacgctgctcgcgctcttaatcaaggaacccggtttggggccatgctggacatgctgacggaccgctgctccaccatgtgcctgttggtcaacctggccctgctgtaccctggagccacgctgttcttccaaatcagcatgagtttggatgtggccagtcactggctgcacctccacagttctgtggtccgaggcagtgagagtcacaagatgatcgacttgtccgggaatccggtgcttcggatctactacacctcgaggcctgctctgttcaccttgtgtgctgggaatgagctcttctactgcctcctctacctgttccatttctctgagggacctttagttggctctgtgggactgttccggatgggcctctgggtcactgcccccatcgccttgctgaagtcgctcatcagcgtcatccacctgatcacggccgcccgcaacatggctgccctggacgcagcagaccgcgccaagaagaagtgacgctggagccccgggtcctggctgcccacctgccctgggagtcttgctgtgccacacagctccccaccccctgctaggaggtcccagtctcacgccttcctcatgtgttgttctacctgctgggatgggggtcagcctctctttggtgacgtcacgttctctgggatcctgaggacccgggcctcaaatcagggaggatacgcgggaggccccctccatccaggcggtgctcctggggtgccgggaccgggcagtgtcacaccctgcctgctcagtcctggggtccgagatgctagggacgcttgagtgagggaggtggtgtgagggccaggtttcctgaaaggcgggagtcagacctccgcccccagccagagcaagcttggggcaccatgcccaggagggaagaagccatccacagccttccctgtcaccggctcctctgtcctgcctaccctggtcctggcgggacttcactatttgacttggtttcctttcagatattcttggctcagggcctgggttgagggagcttagggaaggacgtccgtctgggtgcttttcctccagtttgctggctggcttctccgtctacccacagtgacctcacagagaggccctcctgccacccatgctcatgtggtgtccccaccgcccacttgtttgatgtcactgactgtctacatgtatttatattcttgatattttctaccctcactagaatgtaaactccatgaaggcacagacttttcttgttctcttctctatccctagagtaagaccaacttgaacctggcatatagtagctgcttaataaatactcgtctgtcaatga

SEQ ID NO: 68080 - DNA, 1718 bp, Homo sapiens
  misc_feature (297)..(297): n is a, c, g, or t
  misc_feature (321)..(321): n is a, c, g, or t
tctgtagtacctatcatctcggggccagtcttctccctaacggctttgttgttcacagtgggcgccatgttgagtcgtactgagttcataggcgcatgtgcggtgcgttcgatgcgctggtgcgtgggctgagtgctcgcttgggatctggtgatcaagatggtatcttctgatgctgtccggtgcttggaagggagtagctgacggatgagtgagacggactctatcttcctgtttcgtgctccaaacgtcgtcgtgttgtgctccggcattgtctttcgtactgtctatttcgtnttcgtacatgtctatgcctcttgnttgagctcctgtctacggtgcatccatcctttcttacctggtcctaggtcatagcctgctggacgctttcgatggacacgctgctcgcgctcttaatcaaggaacccggtttggggccatgctggacatgctgacggaccgctgctccaccatgtgcctgttggtcaacctggccctgctgtaccctggagccacgctgttcttccaaatcagcatgagtttggatgtggccagtcactggctgcacctccacagttctgtggtccgaggcagtgagagtcacaagatgatcgacttgtccgggaatccggtgcttcggatctactacacctcgaggcctgctctgttcaccttgtgtgctgggaatgagctcttctactgcctcctctacctgttccatttctctgagggacctttagttggctctgtgggactgttccggatgggcctctgggtcactgcccccatcgccttgctgaagtcgctcatcagcgtcatccacctgatcacggccgcccgcaacatggctgccctggacgcagcagaccgcgccaagaagaagtgacgctggagccccgggtcctggctgcccacctgccctgggagtcttgctgtgccacacagctccccaccccctgctaggaggtcccagtctcacgccttcctcatgtgttgttctacctgctgggatgggggtcagcctctctttggtgacgtcacgttctctgggatcctgaggacccgggcctcaaatcagggaggatacgcgggaggccccctccatccaggcggtgctcctggggtgccgggaccgggcagtgtcacaccctgcctgctcagtcctggggtccgagatgctagggacgcttgagtgagggaggtggtgtgagggccaggtttcctgaaaggcgggagtcagacctccgcccccagccagagcaagcttggggcaccatgcccaggagggaagaagccatccacagccttccctgtcaccggctcctctgtcctgcctaccctggtcctggcgggacttcactatttgacttggtttcctttcagatattcttggctcagggcctgggttgagggagcttagggaaggacgtccgtctgggtgcttttcctccagtttgctggctggcttctccgtctacccacagtgacctcacagagaggccctcctgccacccatgctcatgtggtgtccccaccgcccacttgtttgatgtcactgactgtctacatgtatttatattcttgatattttctaccctcactagaatgtaaactccatgaaggcacagacttttcttgttctcttctctatccctagagtaagaccaacttgaacctggcatatagtagctgcttaataaatactcgtctgtcaatga

SEQ ID NO: 68081 - DNA, 1648 bp, Homo sapiens
ggcggagggaggaaaagggaaaggaagccgacaggccttaaaggggccgcaactatttttttaagccactttttcctctctccaattttgcaacgacgggcgcggaggaggaggttcccggaagccacgcgcagctggagcagcggcgaccgcagctggaggcccggagcgcctgcggggctggcagaggcgagggaggttgcgggtaggaagggcggactgcgcgcgccccctgcgtcccgcgcacctcggggccggtccatgctcccgacggctgcgggcttcagcatctggggccaggttggggcggcggggtccagggcgcaggtggtgcggccgatgcgccgggccggaggctgaggccgcgctgcggggctgggacagcactggcatctccagagcaggcccggggcagcaagggaggcgccgcgatgccagacgaaaatatcttcctgttcgtgcccaacctcatcggttatgcccggattgtcttcgccatcatttctttctacttcatgccctgctgccccctcacggcctcctccttctacctgctcagcggcctgctggacgctttcgatggacacgcctgctctgttcaccttgtgtgctgggaatgagctcttctactgcctcctctacctgttccatttctctgagggacctttagttggctctgtgggactgttccggatgggcctctgggtcactgcccccatcgccttgctgaagtcgctcatcagcgtcatccacctgatcacggccgcccgcaacatggctgccctggacgcagcagaccgcgccaagaagaagtgacgctggagccccgggtcctggctgcccacctgccctgggagtcttgctgtgccacacagctccccaccccctgctaggaggtcccagtctcacgccttcctcatgtgttgttctacctgctgggatgggggtcagcctctctttggtgacgtcacgttctctgggatcctgaggacccgggcctcaaatcagggaggatacgcgggaggccccctccatccaggcggtgctcctggggtgccgggaccgggcagtgtcacaccctgcctgctcagtcctggggtccgagatgctagggacgcttgagtgagggaggtggtgtgagggccaggtttcctgaaaggcgggagtcagacctccgcccccagccagagcaagcttggggcaccatgcccaggagggaagaagccatccacagccttccctgtcaccggctcctctgtcctgcctaccctggtcctggcgggacttcactatttgacttggtttcctttcagatattcttggctcagggcctgggttgagggagcttagggaaggacgtccgtctgggtgcttttcctccagtttgctggctggcttctccgtctacccacagtgacctcacagagaggccctcctgccacccatgctcatgtggtgtccccaccgcccacttgtttgatgtcactgactgtctacatgtatttatattcttgatattttctaccctcactagaatgtaaactccatgaaggcacagacttttcttgttctcttctctatccctagagtaagaccaacttgaacctggcatatagtagctgcttaataaatactcgtctgtcaatga

SEQ ID NO: 68082 - DNA, 1109 bp, Homo sapiens
ctggtacggtcggaggtttgggatgcagtcactggctgcacctccacagttctgtggtccgaggcagtgagagtcacaagatgatcgacttgtccgggaatccggtgcttcggatctactacacctcgaggttggctctgtgggactgttccggatgggcctctgggtcactgcccccatcgccttgctgaagtcgctcatcagcgtcatccacctgatcacggccgcccgcaacatggctgccctggacgcagcagaccgcgccaagaagaagtgacgctggagccccgggtcctggctgcccacctgccctgggagtcttgctgtgccacacagctccccaccccctgctaggaggtcccagtctcacgccttcctcatgtgttgttctacctgctgggatgggggtcagcctctctttggtgacgtcacgttctctgggatcctgaggacccgggcctcaaatcagggaggatacgcgggaggccccctccatccaggcggtgctcctggggtgccgggaccgggcagtgtcacaccctgcctgctcagtcctggggtccgagatgctagggacgcttgagtgagggaggtggtgtgagggccaggtttcctgaaaggcgggagtcagacctccgcccccagccagagcaagcttggggcaccatgcccaggagggaagaagccatccacagccttccctgtcaccggctcctctgtcctgcctaccctggtcctggcgggacttcactatttgacttggtttcctttcagatattcttggctcagggcctgggttgagggagcttagggaaggacgtccgtctgggtgcttttcctccagtttgctggctggcttctccgtctacccacagtgacctcacagagaggccctcctgccacccatgctcatgtggtgtccccaccgcccacttgtttgatgtcactgactgtctacatgtatttatattcttgatattttctaccctcactagaatgtaaactccatgaaggcacagacttttcttgttctcttctctatccctagagtaagaccaacttgaacctggcatatagtagctgcttaataaatactcgtctgtcaatga

SEQ ID NO: 68083 - DNA, 925 bp, Homo sapiens
cctctctccccgtccgccccttccgcgccctccccaccctcccccaccaccacctccccccctatcgcagcagaccgcgccaagaagaagtgacgctggagccccgggtcctggctgcccacctgccctgggagtcttgctgtgccacacagctccccaccccctgctaggaggtcccagtctcacgccttcctcatgtgttgttctacctgctgggatgggggtcagcctctctttggtgacgtcacgttctctgggatcctgaggacccgggcctcaaatcagggaggatacgcgggaggccccctccatccaggcggtgctcctggggtgccgggaccgggcagtgtcacaccctgcctgctcagtcctggggtccgagatgctagggacgcttgagtgagggaggtggtgtgagggccaggtttcctgaaaggcgggagtcagacctccgcccccagccagagcaagcttggggcaccatgcccaggagggaagaagccatccacagccttccctgtcaccggctcctctgtcctgcctaccctggtcctggcgggacttcactatttgacttggtttcctttcagatattcttggctcagggcctgggttgagggagcttagggaaggacgtccgtctgggtgcttttcctccagtttgctggctggcttctccgtctacccacagtgacctcacagagaggccctcctgccacccatgctcatgtggtgtccccaccgcccacttgtttgatgtcactgactgtctacatgtatttatattcttgatattttctaccctcactagaatgtaaactccatgaaggcacagacttttcttgttctcttctctatccctagagtaagaccaacttgaacctggcatatagtagctgcttaataaatactcgtctgtcaatga

SEQ ID NO: 68084 - DNA, 1023 bp, Homo sapiens
ggatggtgattgtaaagaggatggagagtattagaggatgtcgtggttgtaagaggaggtgtagttcaacagaatgcctgcttttatgtggatgggggttgtcaaaggagtcataattgtaacagtcagttgtgtgccattcaccttgagcgtgtaccggtcgttgatgagaatctgctcttcgttaatgacgctggagccccgggtcctggctgcccacctgccctgggagtcttgctgtgccacacagctccccaccccctgctaggaggtcccagtctcacgccttcctcatgtgttgttctacctgctgggatgggggtcagcctctctttggtgacgtcacgttctctgggatcctgaggacccgggcctcaaatcagggaggatacgcgggaggccccctccatccaggcggtgctcctggggtgccgggaccgggcagtgtcacaccctgcctgctcagtcctggggtccgagatgctagggacgcttgagtgagggaggtggtgtgagggccaggtttcctgaaaggcgggagtcagacctccgcccccagccagagcaagcttggggcaccatgcccaggagggaagaagccatccacagccttccctgtcaccggctcctctgtcctgcctaccctggtcctggcgggacttcactatttgacttggtttcctttcagatattcttggctcagggcctgggttgagggagcttagggaaggacgtccgtctgggtgcttttcctccagtttgctggctggcttctccgtctacccacagtgacctcacagagaggccctcctgccacccatgctcatgtggtgtccccaccgcccacttgtttgatgtcactgactgtctacatgtatttatattcttgatattttctaccctcactagaatgtaaactccatgaaggcacagacttttcttgttctcttctctatccctagagtaagaccaacttgaacctggcatatagtagctgcttaataaatactcgtctgtcaatga

SEQ ID NO: 68085 - DNA, 861 bp, Homo sapiens
tgccccgtttacgcggagaacgtgacgtacgctggagccccgggtcctggctgcccacctgccctgggagtcttgctgtgccacacagctccccaccccctgctaggaggtcccagtctcacgccttcctcatgtgttgttctacctgctgggatgggggtcagcctctctttggtgacgtcacgttctctgggatcctgaggacccgggcctcaaatcagggaggatacgcgggaggccccctccatccaggcggtgctcctggggtgccgggaccgggcagtgtcacaccctgcctgctcagtcctggggtccgagatgctagggacgcttgagtgagggaggtggtgtgagggccaggtttcctgaaaggcgggagtcagacctccgcccccagccagagcaagcttggggcaccatgcccaggagggaagaagccatccacagccttccctgtcaccggctcctctgtcctgcctaccctggtcctggcgggacttcactatttgacttggtttcctttcagatattcttggctcagggcctgggttgagggagcttagggaaggacgtccgtctgggtgcttttcctccagtttgctggctggcttctccgtctacccacagtgacctcacagagaggccctcctgccacccatgctcatgtggtgtccccaccgcccacttgtttgatgtcactgactgtctacatgtatttatattcttgatattttctaccctcactagaatgtaaactccatgaaggcacagacttttcttgttctcttctctatccctagagtaagaccaacttgaacctggcatatagtagctgcttaataaatactcgtctgtcaatga

SEQ ID NO: 68086 - DNA, 1102 bp, Homo sapiens
ggcggagggaggaaaagggaaaggaagccgacaggccttaaaggggccgcaactatttttttaagccactttttcctctctccaattttgcaacgacgggcgcggaggaggaggttcccggaagccacgcgcagctggagcagcggcgaccgcagctggaggcccggagcgcctgcggggctggcagaggcgagggaggttgcgggtaggaagggcggactgcgcgcgccccctgcgtcccgcgcacctcggggccggtccatgctcccgacggctgcgggcttcagcatctggggccaggttggggcggcggggtccagggcgcaggtggtgcggccgatgcgccgggccggaggctgaggccgcgctgcggggctgggacagcactggcatctccagagcaggcccggggcagcaagggaggcgccgcgatgccagacgaaaatatcttcctgttcgtgcccaacctcatcggttatgcccggattgtcttcgccatcatttctttctacttcatgccctgctgccccctcacggcctcctccttctacctgctcagcggcctgctggacgctttcgatggacacgctgctcgcgctcttaatcaaggaacccggtttggggccatgctggacatgctgacggaccgctgctccaccatgtgcctgttggtcaacctggccctgctgtaccctggagccacgctgttcttccaaatcagcatgagtttggatgtggccagtcactggctgcacctccacagttctgtggtccgaggcagtgagagtcacaagatgatcgacttgtccgggaatccggtgcttcggatctactacacctcgaggcctgctctgttcaccttgtgtgctgggaatgagctcttcccctcctgccacccatgctcatgtggtgtccccaccgcccacttgtttgatgtcactgactgtctacatgtatttatattcttgatattttctaccctcactagaatgtaaactccatgaaggcacagacttttcttgttctcttctctatccctagagtaagaccaacttgaacctggcatatagtagctgcttaataaatactcgtctgtcaatga

SEQ ID NO: 68087 - DNA, 541 bp, Homo sapiens
tataatggtggaaatattccaaaattccatattttgggatttatacacaaaagataaacaaattagaggccaagaggctgccggaagggaaaaacggggcctggaaaggccgttgtgaggaatgagcttggcctaaagaggccactggcaggcagtagctggacctgccgaagtggccgaaaggcaggagctttggacgggggaggccgcagtgaggcgagagctagctgggcgtggagagtccactgtgaggccaaggccaaggccggcctccagtttgctggctggcttctccgtctacccacagtgacctcacagagaggccctcctgccacccatgctcatgtggtgtccccaccgcccacttgtttgatgtcactgactgtctacatgtatttatattcttgatattttctaccctcactagaatgtaaactccatgaaggcacagacttttcttgttctcttctctatccctagagtaagaccaacttgaacctggcatatagtagctgcttaataaatactcgtctgtcaatga

SEQ ID NO: 68088 - DNA, 1444 bp, Homo sapiens
tatcggctcactgcaacctctgcctgctgggttcaagcgattcttgtgcctcagcctcctgagtggctgggactaccggcacgtgccaccacactcggctaatttttgtattgttagtagagaggggtttcgccacgttggccaggctggtcccaaactcctgacctcaggtgatccgcctgtctcagcctcccaaagtgctgggactccaggcatgagccacacgcctggctgagaccaggagttttgaggctgcagtgctatgatcatactactgcattccaacctggatgagagagcgagaccctgtctgtaaaaaagaaaaaaaaataagagaagtaatatgccgagattgtgccttcattagtgctgggggggcagggggtggcacacgcctgcctcttgctaacgtggcctgtttgctgtgtgtgcagcctgctctgttcaccttgtgtgctgggaatgagctcttcccctccttcgggccccaaactccctctgcttctgcaccccatcgccttgctgaagtcgctcatcagcgtcatccacctgatcacggccgcccgcaacatggctgccctggacgcagcagaccgcgccaagaagaagtgacgctggagccccgggtcctggctgcccacctgccctgggagtcttgctgtgccacacagctccccaccccctgctaggaggtcccagtctcacgccttcctcatgtgttgttctacctgctgggatgggggtcagcctctctttggtgacgtcacgttctctgggatcctgaggacccgggcctcaaatcagggaggatacgcgggaggccccctccatccaggcggtgctcctggggtgccgggaccgggcagtgtcacaccctgcctgctcagtcctggggtccgagatgctagggacgcttgagtgagggaggtggtgtgagggccaggtttcctgaaaggcgggagtcagacctccgcccccagccagagcaagcttggggcaccatgcccaggagggaagaagccatccacagccttccctgtcaccggctcctctgtcctgcctaccctggtcctggcgggacttcactatttgacttggtttcctttcagatattcttggctcagggcctgggttgagggagcttagggaaggacgtccgtctgggtgcttttcctccagtttgctggctggcttctccgtctacccacagtgacctcacagagaggccctcctgccacccatgctcatgtggtgtccccaccgcccacttgtttgatgtcactgactgtctacatgtatttatattcttgatattttctaccctcactagaatgtaaactccatgaaggcacagacttttcttgttctcttctctatccctagagtaagaccaacttgaacctggcatatagtagctgcttaataaatactcgtctgtcaatga

SEQ ID NO: 68089 - DNA, 882 bp, Homo sapiens
  misc_feature (870)..(870): n is a, c, g, or t
  misc_feature (882)..(882): n is a, c, g, or t
ggcggagggaggaaaagggaaaggaagccgacaggccttaaaggggccgcaactatttttttaagccactttttcctctctccaattttgcaacgacgggcgcggaggaggaggttcccggaagccacgcgcagctggagcagcggcgaccgcagctggaggcccggagcgcctgcggggctggcagaggcgagggaggttgcgggtaggaagggcggactgcgcgcgccccctgcgtcccgcgcacctcggggccggtccatgctcccgacggctgcgggcttcagcatctggggccaggttggggcggcggggtccagggcgcaggtggtgcggccgatgcgccgggccggaggctgaggccgcgctgcggggctgggacagcactggcatctccagagcaggcccggggcagcaagggaggcgccgcgatgccagacgaaaatatcttcctgttcgtgcccaacctcatcggttatgcccggattgtcttcgccatcatttctttctacttcatgccctgctgccccctcacggcctcctccttctacctgctcagcggcctgctggacgctttcgatggacacgctgctcgcgctcttaatcaaggaacccggtttggggccatgctggacatgctgacggaccgctgctccaccatgtgcctgttggtcaacctggccctgctgtaccctggagccacgctgttcttccaaatcagcatgagtttggatgtggccagtcactggctgcacctccacagttctgtggtccgaggcagtgagagtcacaagatgatcgacttgtccgggaatccggtgcttcggatctactacacctcgaggctttgaaggccctggttcttgttcnaccctttggggn

SEQ ID NO: 68090 - DNA, 1716 bp, Homo sapiens
ggcggagggaggaaaagggaaaggaagccgacaggccttaaaggggccgcaactatttttttaagccactttttcctctctccaattttgcaacgacgggcgcggaggaggaggttcccggaagccacgcgcagctggagcagcggcgaccgcagctggaggcccggagcgcctgcggggctggcagaggcgagggaggttgcgggtaggaagggcggactgcgcgcgccccctgcgtcccgcgcacctcggggccggtccatgctcccgacggctgcgggcttcagcatctggggccaggttggggcggcggggtccagggcgcaggtggtgcggccgatgcgccgggccggaggctgaggccgcgctgcggggctgggacagcactggcatctccagagcaggcccggggcagcaagggaggcgccgcgatgccagacgaaaatatcttcctgttcgtgcccaacctcatcggttatgcccggattgtcttcgccatcatttctttctacttcatgccctgctgccccctcacggcctcctccttctacctgctcagcggcctgctggacgctttcgatggacacgctgctcgcgctcttaatcaaggaacccggtttggggccatgctggacatgctgacggaccgctgctccaccatgtgcctgttggtcaacctggccctgctgtaccctggagccacgctgttcttccaaatcagcatgagtttggatgtggccagtcactggctgcacctccacagttctgtggtccgaggcagtgagagtcacaagatgatcgacttgtccgggaatccggtgcttcggatctactacacctcgaggcctgctctgttcaccttgtgtgctgggaatgagctcttctactgcctcctctacctgttccatttctctgagggacctttagttggctctgtgggactgttccggatgggcctctgggtcactgcccccatcgccttgctgaagtcgctcatcagcgtcatccacctgatcacgcctctctttggtgacgtcacgttctctgggatcctgaggacccgggcctcaaatcagggaggatacgcgggaggccccctccatccaggcggtgctcctggggtgccgggaccgggcagtgtcacaccctgcctgctcagtcctggggtccgagatgctagggacgcttgagtgagggaggtggtgtgagggccaggtttcctgaaaggcgggagtcagacctccgcccccagccagagcaagcttggggcaccatgcccaggagggaagaagccatccacagccttccctgtcaccggctcctctgtcctgcctaccctggtcctggcgggacttcactatttgacttggtttcctttcagatattcttggctcagggcctgggttgagggagcttagggaaggacgtccgtctgggtgcttttcctccagtttgctggctggcttctccgtctacccacagtgacctcacagagaggccctcctgccacccatgctcatgtggtgtccccaccgcccacttgtttgatgtcactgactgtctacatgtatttatattcttgatattttctaccctcactagaatgtaaactccatgaaggcacagacttttcttgttctcttctctatccctagagtaagaccaacttgaacctggcatatagtagctgcttaataaatactcgtctgtcaatga

SEQ ID NO: 68091 - DNA, 1896 bp, Homo sapiens
ggcggagggaggaaaagggaaaggaagccgacaggccttaaaggggccgcaactatttttttaagccactttttcctctctccaattttgcaacgacgggcgcggaggaggaggttcccggaagccacgcgcagctggagcagcggcgaccgcagctggaggcccggagcgcctgcggggctggcagaggcgagggaggttgcgggtaggaagggcggactgcgcgcgccccctgcgtcccgcgcacctcggggccggtccatgctcccgacggctgcgggcttcagcatctggggccaggttggggcggcggggtccagggcgcaggtggtgcggccgatgcgccgggccggaggctgaggccgcgctgcggggctgggacagcactggcatctccagagcaggcccggggcagcaagggaggcgccgcgatgccagacgaaaatatcttcctgttcgtgcccaacctcatcggttatgcccggattgtcttcgccatcatttctttctacttcatgccctgctgccccctcacggcctcctccttctacctgctcagcggcctgctggacgctttcgatggacacgctgctcgcgctcttaatcaaggaacccggtttggggccatgctggacatgctgacggaccgctgctccaccatgtgcctgttggtcaacctggccctgctgtaccctggagccacgctgttcttccaaatcagcatgagtttggatgtggccagtcactggctgcacctccacagttctgtggtccgaggcagtgagagtcacaagatgatcgacttgtccgggaatccggtgcttcggatctactacacctcgaggcctgctctgttcaccttgtgtgctgggaatgagctcttctactgcctcctctacctgttccatttctctgagggacctttagttggctctgtgggactgttccggatgggcctctgggtcactgcccccatcgccttgctgaagtcgctcatcagcgtcatccacctgatcacggccgcccgcaacatggctgccctggacgcagcagaccgcgccaagaagaagtgacgctggagccccgggtcctggctgcccacctgccctgggagtcttgctgtgccacacagctccccaccccctgctaggaggtcccagtctcacgccttcctcatgtgttgttctacctgctgggatgggggtcagcctctctttggtgacgtcacgttctctgggatcctgaggacccgggcctcaaatcagggaggatacgcgggaggccccctccatccaggcggtgctcctggggtgccgggaccgggcagtgtcacaccctgcctgctcagtcctggggtccgagatgctagggacgcttgagtgagggaggtggtgtgagggccaggtttcctgaaaggcgggagtcagacctccgcccccagccagagcaagcttggggcaccatgcccaggagggaagaagccatccacagccttccctgtcaccggctcctctgtcctgcctaccctggtcctggcgggacttcactatttgacttggtttcctttcagatattcttggctcagggcctgggttgagggagcttagggaaggacgtccgtctgggtgcttttcctccagtttgctggctggcttctccgtctacccacagtgacctcacagagaggggagaggttgcagtgatccataatggtgccactccagcctgggaggcagagccaggcagtctcaaaaaaaaaaaaagcaactttggcccgtcttggaggctcacgcctggcctgtaatcccagcactttgggaggctgaggtgggaagatcacttgagtccaggagttcaagaccagcctgggtcacatggcaggaccccgtctctaca

SEQ ID NO: 68092 - DNA, 1823 bp, Homo sapiens
ggcggagggaggaaaagggaaaggaagccgacaggccttaaaggggccgcaactatttttttaagccactttttcctctctccaattttgcaacgacgggcgcggaggaggaggttcccggaagccacgcgcagctggagcagcggcgaccgcagctggaggcccggagcgcctgcggggctggcagaggcgagggaggttgcgggtaggaagggcggactgcgcgcgccccctgcgtcccgcgcacctcggggccggtccatgctcccgacggctgcgggcttcagcatctggggccaggttggggcggcggggtccagggcgcaggtggtgcggccgatgcgccgggccggaggctgaggccgcgctgcggggctgggacagcactggcatctccagagcaggcccggggcagcaagggaggcgccgcgatgccagacgaaaatatcttcctgttcgtgcccaacctcatcggttatgcccggattgtcttcgccatcatttctttctacttcatgccctgctgccccctcacggcctcctccttctacctgctcagcggcctgctggacgctttcgatggacacgctgctcgcgctcttaatcaaggaacccggtttggggccatgctggacatgctgacggaccgctgctccaccatgtgcctgttggtcaacctggccctgctgtaccctggagccacgctgttcttccaaatcagcatgagtttggatgtggccagtcactggctgcacctccacagttctgtggtccgaggcagtgagagtcacaagatgatcgacttgtccgggaatccggtgcttcggatctactacacctcgaggttggctctgtgggactgttccggatgggcctctgggtcactgcccccatcgccttgctgaagtcgctcatcagcgtcatccacctgatcacggccgcccgcaacatggctgccctggacgcagcagaccgcgccaagaagaagtgacgctggagccccgggtcctggctgcccacctgccctgggagtcttgctgtgccacacagctccccaccccctgctaggaggtcccagtctcacgccttcctcatgtgttgttctacctgctgggatgggggtcagcctctctttggtgacgtcacgttctctgggatcctgaggacccgggcctcaaatcagggaggatacgcgggaggccccctccatccaggcggtgctcctggggtgccgggaccgggcagtgtcacaccctgcctgctcagtcctggggtccgagatgctagggacgcttgagtgagggaggtggtgtgagggccaggtttcctgaaaggcgggagtcagacctccgcccccagccagagcaagcttggggcaccatgcccaggagggaagaagccatccacagccttccctgtcaccggctcctctgtcctgcctaccctggtcctggcgggacttcactatttgacttggtttcctttcagatattcttggctcagggcctgggttgagggagcttagggaaggacgtccgtctgggtgcttttcctccagtttgctggctggcttctccgtctacccacagtgacctcacagagaggccctcctgccacccatgctcatgtggtgtccccaccgcccacttgtttgatgtcactgactgtctacatgtatttatattcttgatattttctaccctcactagaatgtaaactccatgaaggcacagacttttcttgttctcttctctatccctagagtaagaccaacttgaacctggcatatagtagctgcttaataaatactcgtctgtcaatga

SEQ ID NO: 68093 - DNA, 1999 bp, Homo sapiens
ggcggagggaggaaaagggaaaggaagccgacaggccttaaaggggccgcaactatttttttaagccactttttcctctctccaattttgcaacgacgggcgcggaggaggaggttcccggaagccacgcgcagctggagcagcggcgaccgcagctggaggcccggagcgcctgcggggctggcagaggcgagggaggttgcgggtaggaagggcggactgcgcgcgccccctgcgtcccgcgcacctcggggccggtccatgctcccgacggctgcgggcttcagcatctggggccaggttggggcggcggggtccagggcgcaggtggtgcggccgatgcgccgggccggaggctgaggccgcgctgcggggctgggacagcactggcatctccagagcaggcccggggcagcaagggaggcgccgcgatgccagacgaaaatatcttcctgttcgtgcccaacctcatcggtgagtgctgcccacggccccgggccgaacgagagggcgaggggccttggcgggctccctgatcctgccctgtctccccgcgtcccgttccaaggttatgcccggattgtcttcgccatcatttctttctacttcatgccctgctgccccctcacggcctcctccttctacctgctcagcggcctgctggacgctttcgatggacacgctgctcgcgctcttaatcaaggaacccggtttggggccatgctggacatgctgacggaccgctgctccaccatgtgcctgttggtcaacctggccctgctgtaccctggagccacgctgttcttccaaatcagcatgagtttggatgtggccagtcactggctgcacctccacagttctgtggtccgaggcagtgagagtcacaagatgatcgacttgtccgggaatccggtgcttcggatctactacacctcgaggcctgctctgttcaccttgtgtgctgggaatgagctcttctactgcctcctctacctgttccatttctctgagggacctttagttggctctgtgggactgttccggatgggcctctgggtcactgcccccatcgccttgctgaagtcgctcatcagcgtcatccacctgatcacggccgcccgcaacatggctgccctggacgcagcagaccgcgccaagaagaagtgacgctggagccccgggtcctggctgcccacctgccctgggagtcttgctgtgccacacagctccccaccccctgctaggaggtcccagtctcacgccttcctcatgtgttgttctacctgctgggatgggggtcagcctctctttggtgacgtcacgttctctgggatcctgaggacccgggcctcaaatcagggaggatacgcgggaggccccctccatccaggcggtgctcctggggtgccgggaccgggcagtgtcacaccctgcctgctcagtcctggggtccgagatgctagggacgcttgagtgagggaggtggtgtgagggccaggtttcctgaaaggcgggagtcagacctccgcccccagccagagcaagcttggggcaccatgcccaggagggaagaagccatccacagccttccctgtcaccggctcctctgtcctgcctaccctggtcctggcgggacttcactatttgacttggtttcctttcagatattcttggctcagggcctgggttgagggagcttagggaaggacgtccgtctgggtgcttttcctccagtttgctggctggcttctccgtctacccacagtgacctcacagagaggccctcctgccacccatgctcatgtggtgtccccaccgcccacttgtttgatgtcactgactgtctacatgtatttatattcttgatattttctaccctcactagaatgtaaactccatgaaggcacagacttttcttgttctcttctctatccctagagtaagaccaacttgaacctggcatatagtagctgcttaataaatactcgtctgtcaatga

SEQ ID NO: 68094 - DNA, 1454 bp, Homo sapiens
gaaagaccccaggcaaacctgcctctctttaaagcttcagtcatgtttacagttgcattaagcaattcttaggactcttctggctgggtattctaggattccatataggtgacagcttataggaaggggcatgggagctttcaaatgtggcatttgaatcctgactctgcccccaaataggtaactgtggctttcggcaggatactggtccttagccgtgcccagttttccatctgtacaataggtgttaacatgaggattggatgcatggtagtggtcatgccttgtgggttcccctgttttctccccaagttctgtggtccgaggcagtgagagtcacaagatgatcgacttgtccgggaatccggtgcttcggatctactacacctcgaggcctgctctgttcaccttgtgtgctgggaatgagctcttctactgcctcctctacctgttccatttctctgagggacctttagttggctctgtgggactgttccggatgggcctctgggtcactgcccccatcgccttgctgaagtcgctcatcagcgtcatccacctgatcacggccgcccgcaacatggctgccctggacgcagcagaccgcgccaagaagaagtgacgctggagccccgggtcctggctgcccacctgccctgggagtcttgctgtgccacacagctccccaccccctgctaggaggtcccagtctcacgccttcctcatgtgttgttctacctgctgggatgggggtcagcctctctttggtgacgtcacgttctctgggatcctgaggacccgggcctcaaatcagggaggatacgcgggaggccccctccatccaggcggtgctcctggggtgccgggaccgggcagtgtcacaccctgcctgctcagtcctggggtccgagatgctagggacgcttgagtgagggaggtggtgtgagggccaggtttcctgaaaggcgggagtcagacctccgcccccagccagagcaagcttggggcaccatgcccaggagggaagaagccatccacagccttccctgtcaccggctcctctgtcctgcctaccctggtcctggcgggacttcactatttgacttggtttcctttcagatattcttggctcagggcctgggttgagggagcttagggaaggacgtccgtctgggtgcttttcctccagtttgctggctggcttctccgtctacccacagtgacctcacagagaggccctcctgccacccatgctcatgtggtgtccccaccgcccacttgtttgatgtcactgactgtctacatgtatttatattcttgatattttctaccctcactagaatgtaaactccatgaaggcacagacttttcttgttctcttctctatccctagagtaagaccaacttgaacctggcatatagtagctgcttaataaatactcgtctgtcaatga

SEQ ID NO: 68095 - DNA, 1206 bp, Homo sapiens
ccaagcaccggattcccggacaagtcgatcatcttgtggccagtcactggctgcacctccacagttctgtggtccgaggcagtgagagtcacaagatgatcgacttgtccgggaatccggtgcttcggatctactacacctcgaggcctgctctgttcaccttgtgtgctgggaatgagctcttctactgcctcctctacctgttccatttctctgagggacctttagttggctctgtgggactgttccggatgggcctctgggtcactgcccccatcgccttgctgaagtcgctcatcagcgtcatccacctgatcacggccgcccgcaacatggctgccctggacgcagcagaccgcgccaagaagaagtgacgctggagccccgggtcctggctgcccacctgccctgggagtcttgctgtgccacacagctccccaccccctgctaggaggtcccagtctcacgccttcctcatgtgttgttctacctgctgggatgggggtcagcctctctttggtgacgtcacgttctctgggatcctgaggacccgggcctcaaatcagggaggatacgcgggaggccccctccatccaggcggtgctcctggggtgccgggaccgggcagtgtcacaccctgcctgctcagtcctggggtccgagatgctagggacgcttgagtgagggaggtggtgtgagggccaggtttcctgaaaggcgggagtcagacctccgcccccagccagagcaagcttggggcaccatgcccaggagggaagaagccatccacagccttccctgtcaccggctcctctgtcctgcctaccctggtcctggcgggacttcactatttgacttggtttcctttcagatattcttggctcagggcctgggttgagggagcttagggaaggacgtccgtctgggtgcttttcctccagtttgctggctggcttctccgtctacccacagtgacctcacagagaggccctcctgccacccatgctcatgtggtgtccccaccgcccacttgtttgatgtcactgactgtctacatgtatttatattcttgatattttctaccctcactagaatgtaaactccatgaaggcacagacttttcttgttctcttctctatccctagagtaagaccaacttgaacctggcatatagtagctgcttaataaatactcgtctgtcaatga

SEQ ID NO: 68096 - DNA, 1146 bp, Homo sapiens
attcggcaacagaggtgaaaggcgggagtcacaagatgatcgacttgtccgggaatccggtgcttcggatctactacacctcgaggcctgctctgttcaccttgtgtgctgggaatgagctcttctactgcctcctctacctgttccatttctctgagggacctttagttggctctgtgggactgttccggatgggcctctgggtcactgcccccatcgccttgctgaagtcgctcatcagcgtcatccacctgatcacggccgcccgcaacatggctgccctggacgcagcagaccgcgccaagaagaagtgacgctggagccccgggtcctggctgcccacctgccctgggagtcttgctgtgccacacagctccccaccccctgctaggaggtcccagtctcacgccttcctcatgtgttgttctacctgctgggatgggggtcagcctctctttggtgacgtcacgttctctgggatcctgaggacccgggcctcaaatcagggaggatacgcgggaggccccctccatccaggcggtgctcctggggtgccgggaccgggcagtgtcacaccctgcctgctcagtcctggggtccgagatgctagggacgcttgagtgagggaggtggtgtgagggccaggtttcctgaaaggcgggagtcagacctccgcccccagccagagcaagcttggggcaccatgcccaggagggaagaagccatccacagccttccctgtcaccggctcctctgtcctgcctaccctggtcctggcgggacttcactatttgacttggtttcctttcagatattcttggctcagggcctgggttgagggagcttagggaaggacgtccgtctgggtgcttttcctccagtttgctggctggcttctccgtctacccacagtgacctcacagagaggccctcctgccacccatgctcatgtggtgtccccaccgcccacttgtttgatgtcactgactgtctacatgtatttatattcttgatattttctaccctcactagaatgtaaactccatgaaggcacagacttttcttgttctcttctctatccctagagtaagaccaacttgaacctggcatatagtagctgcttaataaatactcgtctgtcaatga

SEQ ID NO: 68097 - DNA, 950 bp, Homo sapiens
ggtttccttcttgatccttcacaagggaagattttcttttttagaggtacagattcctcttagtcaagtcctgattaaaactccagctaagacattagtaagccttggttagtgaagtggcatcaggaagtgcctacattttcatggcctggtagcgttcagtgaaaatgttcattaacagacacaggccattcagtcccgaatcccaagacactgaagactctgtttgaatcagactcacgggttccttcctagccactctcagggacaggaatgcttctggtgaagaagttttcggtggtggttcatggagcttccctacaccaacttggaaatggcattcattttattggcttttgttatcttttccttatttaccctggcttccatctacactactccggatgacagtaatgaagaggaagaacatgaaaaaaagggaagggaaaagaaaaggaaaaagtctgaaaagaagaaaaattgctcagaggaagagcacagaattgaagctgttgagctatgatctcatagccaccgatatttctcgctaagaagacagaggaagcaatccatgggaactacttatccacagttaaacaagaggaggggataatgaagaaagttaaaatcacttactgattaaacacgatgataataacctttaatgaactcaatactcgggaaaggcttcacatttctgggactcagcattatccaaaatatctattaagagccatacaccattctagctgcaattgattatacaaaaaaaaaagaccaaagtggttacaataataaaatagaacacagagaaagaagaaaactacatgtgttacaatttggtaagataaacaaacaaacaaaaaatttaatcactttttttggtcctgtgacacacatgataatttttgtcttaattctcctaacaaatgataatgaaaagctataag

SEQ ID NO: 68098 - DNA, 1068 bp, Homo sapiens
ggtttccttcttgatccttcacaagggaagattttcttttttagaggtacagattcctcttagtcaagtcctgattaaaactccagctaagacattagtaagccttggttagtgaagtggcatcaggaagtgcctacattttcatggcctggtagcgttcagtgaaaatgttcattaacagacacaggccattcagtcccgaatcccaagacactgaagactctgtttgaatcagactcacgggttccttcctagccactctcagggacaggaatgcttctggtgaagaagttttcggtggtggttcatggagcttccctacaccaacttggaaatggcattcattttattggcttttgttatcttttccttatttaccctggcttccatctacactactccggatgacagtaatgaagagtctcactctgtcagccaggctggaatgcagtggcgtgatcttggctcactgaaacatcggtctcccaggttcaagcgattctcctgcctcagcctcctgagtggctggaactacagaggaagaacatgaaaaaaagggaagggaaaagaaaaggaaaaagtctgaaaagaagaaaaattgctcagaggaagagcacagaattgaagctgttgagctatgatctcatagccaccgatatttctcgctaagaagacagaggaagcaatccatgggaactacttatccacagttaaacaagaggaggggataatgaagaaagttaaaatcacttactgattaaacacgatgataataacctttaatgaactcaatactcgggaaaggcttcacatttctgggactcagcattatccaaaatatctattaagagccatacaccattctagctgcaattgattatacaaaaaaaaaagaccaaagtggttacaataataaaatagaacacagagaaagaagaaaactacatgtgttacaatttggtaagataaacaaacaaacaaaaaatttaatcactttttttggtcctgtgacacacatgataatttttgtcttaattctcctaacaaatgataatgaaaagctataag

SEQ ID NO: 68099 - DNA, 915 bp, Homo sapiens
accccagtatataattgaagacactagtaacacctgactgcatctcatctcagcagagccagaatatggggacaaggttcagggtgccctgctgaatggtgtgaacagcaggatctcaaggatgtaatggaaagaactaccacactgaccatccagaatctaagagaccatctgggtgtttgggaaaccatctgacgaggcctgactctattccagttagattgacaataattgagcagcaggcatttttcatttctggtcaggaaagcattgtgcctttagcaaacaatcagtgtgcaacagtgatgtggtcatctagccagggaatggctgctccatcccctgcataatatattcctgcttcaaacacctctcagaaaaccagttccgcgagggtttttatatccccacaaagttgttgagagacaatgatgaccctggaagtggggaggaggacttctgagaaacagcaacctctctcctgattggggtagccatgagatttctctagctatatccaacttggcatctgtacatcatctttggaggaacatcttatttgtggaaggaccttgacaagccgtttgagatggaatgtaggccctgatgttatgcttcagtaaaaaaagatggaagcttccctgctataccaaaacatggagcaaaatttgcatttttctcaagaaggagagaaaaggagtaggactccagcaaagtttgtcagaaggaaagctagaaaagatttaaaagaaaaaaagaaagaacaaatcagcagtggtggtatggatgaaagggacttgagagaacaaaaatggctaagggaaaattttaagtcatctgctgagcagtgtgctgtgtcaacctcctcctaggtctcctctatgaaatatttagtaaagtctacatttctcttta

SEQ ID NO: 68100 - DNA, 371 bp, Homo sapiens
gtcatgagtctgagaccagcctggccatcatggcaaaaccctatctctactaaaaatacaaaagttagctgggtgtggtggcgtgcacctgcattctcagcgacttgggatgctgaggcagaagaatcgcttaaacctgggaggcagaggttgcagtgagccgagatcgctccactgcactccagtctgggtgacagagtgagaccctgtctccaaaataaaagaaatttactgcaaagggatgttgcatttcaggtgaatgtatgtagccttcagaggccgggctatttattagatgtattttataactgaggattctaggtaaacacaagccaaacagatccaccagaagcctagagctgtgaactctt

SEQ ID NO: 68101 - DNA, 817 bp, Homo sapiens
ttttttgagacggattctcgctctgtcacccaggctggagtgcagtggcacaatctcggctcactgcaacctccgctcccaagttcaagcgattctcctgccccagcctcccaagtagctgggattacaggcacctgacaccatgcctggctaatttttgtatttttagtagagacagggtttcaccatgttggccaggctggtctcgagctcctgacttcaggtgatccgcccgccttggcctcccaaagtgctgggattacaggcatgagccaccatgcctggccctcatcattctatttctccttctactattttatgtgacatatcacacaacccagtgcatggtttacacaggtattattattattctcgagattcagagatgcagaaagatccaaaaacagcccaaggtcactgagccattgctgacaggccaggggctgaggtggcctttcctgacagcccaggatttcccttaagccactgacctccaaaagcacctcctctcacagccgtaaggccccacctggtctaacctgctctccccgccacctgtggcatagtttcctctcagatccctctcctcatcttccttcctccctcagcacgggccagccccttattctaatgttagggtttatctcacttgacctcttgtcccttgcgtgcccttctttatgcaaacccaagaggagtaaatcccctgcatgctggggagtaattactcctatcacagaagtctttcccatgagcacccctcttgggtcacctgtctcattccactctgcattagggtatttgcgtgtccgtcgaa

SEQ ID NO: 68102 - DNA, 488 bp, Homo sapiens
tatccatgagcatggaatgctcttccatttgcttgtgtcctctcatatttccttgagcagtggtatgtagttgtccttgaagaggtccttcacatcccttgttaagttggattcctaggtattttattctctttgaagcaattgtgaacgggagttcactcatgatttggctctctgtttgtctgttattggtgtataagactgctaaaacaattaggagatatacctaatgctaaatgacgagttaatgggtgcagcacaccagcattgcacaggtatacatatgtaactaaccggtacattgtgcacatgtgccctaaaacttaaagtataataataaaaaaaagcattcctgctggttaacaaaccatggagggaaggacaaagcagagagggcttggcaatacaccctgctaggaaagaactcttctctatgagatggtaaagtacttttaggcccactcttcagaatgcacagtgctgagtgt

SEQ ID NO: 68103 - DNA, 551 bp, Homo sapiens
  misc_feature (551)..(551): n is a, c, g, or t
agcatttttagcgtacaacaacatccaagtggattactatgaatgcctagacctctatggcaaacagtctcttcgtggcctgtgctgaggactacatcagtctcctgcaattatcatctacactgaaaaacaaagaggacagaggcaaagctagtggccctcaccatcccctgcaagctgattgcttcttactgcaagcacttgagcatcttcctgagagctttcttgggcaatgggaaccaggcttggcccaatcacaggcaggtgaaaagtatgaggaaatggagaaggcattgtccaaggagcagtcttcaaccttcaccccgcaagtgagacaactctgaataagatgtgttctacactctcttccaaaggtccccagttggatggagctctagctgctcatgtgataagctgcctattaatacacaaaagattgcctttcctccttgctctgtcttcctgctgctctcctactaatgtttcctgggattgcctccaaataaaccactggcctcgttggcctcagcggtggagctctgcgcgcggan

SEQ ID NO: 68104 - DNA, 535 bp, Homo sapiens
agcatttttagcgtacaacaacatccaagtggattactatgaatgcctagacctctatggcaaacagtctcttcgtggcctgtgctgaggactacatcagtctcctgcaattatcatctacactgaaaaacaaagaggacagaggcaaagctagtggccctcaccatcccctgcaagctgattgcttcttactgcaagcacttgagcatcttcctgagagctttcttgggcaatgggaaccaggcttggcccaatcacaggcaggtgaaaagtatgaggaaatggagaaggcattgtccaaggagcagtcttcaaccttcaccccgcaagtgagacaactctgaataagatgtgttctacactctcttccaaaggtccccagttggatggagctctagctgctcatgtgataagctgcctattaatacacaaaagattgcctttcctccttgctctgtcttcctgctgctctcctactaatgtttcctgggattgcctccaaataaaccacttgaactcacaaaatagtgttatt

SEQ ID NO: 68105 - DNA, 603 bp, Homo sapiens
  misc_feature (603)..(603): n is a, c, g, or t
atcaactttcatagaaggaaggaaagaagaaagggaggaagaaaggaaaacagggagcctagagaaaggagggagaaaataagaaaaaaaaaagagagagagaaaggtagaacctggattctcttcgtggcctgtgctgaggactacatcagtctcctgcaattatcatctacactgaaaaacaaagaggacagaggcaaagctagtggccctcaccatcccctgcaagctgattgcttcttactgcaagcacttgagcatcttcctgagagctttcttgggcaatgggaaccaggcttggcccaatcacaggcaggtgaaaagtatgaggaaatggagaaggcattgtccaaggagcagtcttcaaccttcaccccgcaagtgagacaactctgaataagatgtgttctacactctcttccaaaggtccccagttggatggagctctagctgctcatgtgataagctgcctattaatacacaaaagattgcctttcctccttgctctgtcttcctgctgctctcctactaatgtttcctgggattgcctccaaataaaccactggcctcgttggcctcagcggtggagctctgcgcgcggan

SEQ ID NO: 68106 - DNA, 851 bp, Homo sapiens
atcaactttcatagaaggaaggaaagaagaaagggaggaagaaaggaaaacagggagcctagagaaaggagggagaaaataagaaaaaaaaaagagagagagaaaggtagaacctggattctcttcgtggcctgtgctgaggactacatcagtctcctgcaattatcatctacactgaaaaacaaagaggacagaggcaaagctagtggccctcaccatcccctgcaagctgattgcttcttactgcaagcacttgagcatcttcctgagagctttcttgggcaatgggaaccaggcttggcccaatcacaggcaggtgaaaagtatgaggaaatggagaaggcattgtccaaggagcagtcttcaaccttcaccccgcaaacggaatctcactctgtctcccaggctggagtgcagtggtgcgatctcggctcaccgcaatctccgcctctcgggttcacgccattctcctgcctcaacctccagagcagctgggactacaggttcctgccaccacgcccggctaattctttgtatttttagtagagacggggtttcaccgtgttagccaggatggtctagatctcctgacctcgttatttgcctgcctgggcctcccaaaatgctgggattacaggcgtaagccatcacacccagccggcacagtgcttttaagcatatggttgatccatatggtggcagtgtcattacttaatttttttaatagttgaataatattccattgtgtggatatataacatttaaaaaatcaatttataaattgatggacatttggattatttccactttttggctattgtaaataatggtgcaataaacatttatgtaca

SEQ ID NO: 68107 - DNA, 326 bp, Homo sapiens
ctattttagtattcataaataagttatgtcagaacatagcctgctcactcatttgcatattgtctctggctgctttcttgctaccgtggcgaagtttgctgtctgtcctgcaaaatctaaaatatgtgctttctgttcctttacaggaaaagtttggcaccccctggtttaacaggacacatttgagggtgaatgagggtactattaataataagttaggacaacaggcataagctgagaatatattgggcaagccagtaggtttgatcaccctccatatattatgcacaagaagaaataaacatattagaatggaaagtggtaaa

SEQ ID NO: 68108 - DNA, 732 bp, Homo sapiens
  misc_feature (26)..(26): n is a, c, g, or t
aataggctaggtacgaggctgggtgngtacagctccccgctgccctgagctcggcgggctggcattcggcccggggaaaagcggagcaggtctgcgaggctaagtgtctccgcggcgcacctcgcggcgagaatccggaggagaaggagactgcaaggataggcccaggaaaacgaagagatggagcagcctatgcagaatggagaggaagaccgccctttgggaggaggtgaaggccaccagcctgcaggaaatcgacggggacaggctcgccgacttgcccctaattttcgatgggccatacccaataggcagatcaatgatgggatgggtggagatggagatgatatggaaatattcatggaggagatgagagaaatcagaagaaaacttagggagctgcagttgaggaattgtctgcgtatccttatgggggagctctctaatcaccatgaccatcatgatgaattttgccttatgccttgactcctgccatttatcatgagattaatactgtgattcccgctgttttctttttccttgcattttcctaatatgcctttactgatccgtttgctgtgaaccctatgttatttccatgtgtcaagtgggtcttgtgttgccagcttctatttgaagattgcctttgcactcagtgtaagtttctgtcagcagtagtttcacccatttgcatggaaaaatttaaagctaataaagcaatttaaaaagcaa

SEQ ID NO: 68109 - DNA, 894 bp, Homo sapiens
accccatcccccactcctataccggtcctccattttggtgcctgcaaagctctgggaaagaatcccgggaaacgaaaaatggtgggtttgggggaagggaggtaaggggagaaagctggagggaggggctttaattggaggccccgtagaggacgcgcggaacttctaaggtgggaaaaaacgaaattaaaaaaatcctttgatatcagggctctgaatcctgctggtcagagcaccaagcattcagtctctctccttgcctttgtcttacttgtgttcaaagaaaaacaaccagaaaaaaaaaatctcatcatggcaaatattcaccaggaaaacgaagagatggagcagcctatgcagaatggagaggaagaccgccctttgggaggaggtgaaggccaccagcctgcaggaaatcgacggggacaggctcgccgacttgcccctaattttcgatgggccatacccaataggcagatcaatgatgggatgggtggagatggagatgatatggaaatattcatggaggagatgagagaaatcagaagaaaacttagggagctgcagttgaggaattgtctgcgtatccttatgggggagctctctaatcaccatgaccatcatgatgaattttgccttatgccttgactcctgccatttatcatgagattaatactgtgattcccgctgttttctttttccttgcattttcctaatatgcctttactgatccgtttgctgtgaaccctatgttatttccatgtgtcaagtgggtcttgtgttgccagcttctatttgaagattgcctttgcactcagtgtaagtttctgtcagcagtagtttcacccatttgcatggaaaaatttaaagctaataaagcaatttaaaaagcaa

SEQ ID NO: 68110 - DNA, 886 bp, Homo sapiens
  misc_feature (26)..(26): n is a, c, g, or t
aataggctaggtacgaggctgggtgngtacagctccccgctgccctgagctcggcgggctggcattcggcccggggaaaagcggagcaggtctgcgaggctaagtgtctccgcggcgcacctcgcggcgagaatccggaggagaaggagactgcaaggataggcccaggaaaacgaagagatggagcagcctatgcagaatggagaggaagaccgccctttgggaggaggtgaaggccaccagcctgcaggaaatcgacggggacaggctcgccgacttgcccctaattttcgatgggccatacccaataggcagatcaatgatgggatgggtggagatggagatgatatggaaatattcatggaggagatgagagaaatcagaagaaaacttagggagctgcagttgaggaattgtctgcgtatccttatgggggagctctctaatcaccatgaccatcatgatgaattttgccttatgccttgactcctgccatttatcatgagattaatactgtgattcccgctgttttctttttccttgcattttcctaatatgcctttactgatccgtttgctgtgaaccctatgttatttccatgtgtcaagtgggtcttgtgttgccagcttctatttgaagattgcctttgcactcagtgtaagtttctgtcagcagtagtttcacccatttgcatggaaaaatttaaagctaataaagcaatttaaaaagcaaaaaaaaaaaaaaaaaaaaaaaaaacaaaagggggggttatatgggcggggggggaaaaaggggttgaaaggggcatgggaatgggtccgggacccgttttttggccaagggggaaaggggggcccaaaggggggaaaatggaaaccggtacgac

SEQ ID NO: 68111 - DNA, 921 bp, Homo sapiens
tgacaggctgtgcgctctggggcacctcatgcagacgggagtagggaggctgttttttgcgcgtgcatatgcggtggcgggtggggggaagggggagatcctgctgcactggccgcccaagttggggggcgagctcggtggtgacgcgcggccctcacgtgacccagagctgcagagcgacgcagccttcggtgcagtcgtcactcgcgtctggctaccagctccccgctgccctgagctcggcgggctggcattcggcccggggaaaagcggagcaggtctgcgaggctaagtgtctccgcggcgcacctcgcggcgagaatccggaggagaaggagactgcaaggataggcccaggaaaacgaagagatggagcagcctatgcagaatggagaggaagaccgccctttgggaggaggtgaaggccaccagcctgcaggaaatcgacggggacaggctcgccgacttgcccctaattttcgatgggccatacccaataggcagatcaatgatgggatgggtggagatggagatgatatggaaatattcatggaggagatgagagaaatcagaagaaaacttagggagctgcagttgaggaattgtctgcgtatccttatgggggagctctctaatcaccatgaccatcatgatgaattttgccttatgccttgactcctgccatttatcatgagattaatactgtgattcccgctgttttctttttccttgcattttcctaatatgcctttactgatccgtttgctgtgaaccctatgttatttccatgtgtcaagtgggtcttgtgttgccagcttctatttgaagattgcctttgcactcagtgtaagtttctgtcagcagtagtttcacccatttgcatggaaaaatttaaagctaataaagcaatttaaaaagcaa

SEQ ID NO: 68112 - DNA, 765 bp, Homo sapiens
ctagcctcccgcctctcatccacctgcagccttcggtgcagtcgtcactcgcgtctggctaccagctccccgctgccctgagctcggcgggctggcattcggcccggggaaaagcggagcaggtctgcgaggctaagtgtctccgcggcgcacctcgcggcgagaatccggaggagaaggagactgcaaggataggcccaggaaaacgaagagatggagcagcctatgcagaatggagaggaagaccgccctttgggaggaggtgaaggccaccagcctgcaggaaatcgacggggacaggctcgccgacttgcccctaattttcgatgggccatacccaataggcagatcaatgatgggatgggtggagatggagatgatatggaaatattcatggaggagatgagagaaatcagaagaaaacttagggagctgcagttgaggaattgtctgcgtatccttatgggggagctctctaatcaccatgaccatcatgatgaattttgccttatgccttgactcctgccatttatcatgagattaatactgtgattcccgctgttttctttttccttgcattttcctaatatgcctttactgatccgtttgctgtgaaccctatgttatttccatgtgtcaagtgggtcttgtgttgccagcttctatttgaagattgcctttgcactcagtgtaagtttctgtcagcagtagtttcacccatttgcatggaaaaatttaaagctaataaagcaatttaaaaagcaa

SEQ ID NO: 68113 - DNA, 942 bp, Homo sapiens
tcatcgctgtctggaacagcagatgactcgagagcgggcgtgcatatgcggtggcgggtggggggaagggggagatcctgctgcactggccgcccaagttggggggcgagctcggtggtgacgcgcggccctcacgtgacccagagctgcagagcgacgcagccttcggtgcagtcgtcactcgcgtctggctaccagctccccgctgccctgagctcggcgggctggcattcggcccggggaaaagcggagcaggtctgcgaggctaagtgtctccgcggcgcacctcgcggcgagaatccggaggagaaggagactgcaaggataggccaaaaacaaccagaaaaaaaaaatctcatcatggcaaatattcaccaggaaaacgaagagatggagcagcctatgcagaatggagaggaagaccgccctttgggaggaggtgaaggccaccagcctgcaggaaatcgacggggacaggctcgccgacttgcccctaattttcgatgggccatacccaataggcagatcaatgatgggatgggtggagatggagatgatatggaaatattcatggaggagatgagagaaatcagaagaaaacttagggagctgcagttgaggaattgtctgcgtatccttatgggggagctctctaatcaccatgaccatcatgatgaattttgccttatgccttgactcctgccatttatcatgagattaatactgtgattcccgctgttttctttttccttgcattttcctaatatgcctttactgatccgtttgctgtgaaccctatgttatttccatgtgtcaagtgggtcttgtgttgccagcttctatttgaagattgcctttgcactcagtgtaagtttctgtcagcagtagtttcacccatttgcatggaaaaatttaaagctaataaagcaatttaaaaagcaa

SEQ ID NO: 68114 - DNA, 760 bp, Homo sapiens
atcgagctcgtaccctgatggactgaagactgcagagtgggaaaaaacgaaattaaaaaaatcctttgatatcagggctctgaatcctgctggtcagagcaccaagcattcagtctctctccttgcctttgtcttacttgtgttcaaagaaaaacaaccagaaaaaaaaaatctcatcatggcaaatattcaccaggaaaacgaagagatggagcagcctatgcagaatggagaggaagaccgccctttgggaggaggtgaaggccaccagcctgcaggaaatcgacggggacaggctcgccgacttgcccctaattttcgatgggccatacccaataggcagatcaatgatgggatgggtggagatggagatgatatggaaatattcatggaggagatgagagaaatcagaagaaaacttagggagctgcagttgaggaattgtctgcgtatccttatgggggagctctctaatcaccatgaccatcatgatgaattttgccttatgccttgactcctgccatttatcatgagattaatactgtgattcccgctgttttctttttccttgcattttcctaatatgcctttactgatccgtttgctgtgaaccctatgttatttccatgtgtcaagtgggtcttgtgttgccagcttctatttgaagattgcctttgcactcagtgtaagtttctgtcagcagtagtttcacccatttgcatggaaaaatttaaagctaataaagcaatttaaaaagcaa

SEQ ID NO: 68115 - DNA, 786 bp, Homo sapiens
gaaacgcgcacaccgccgccacggcaaagtcacgggcgtcactacggctagtagagccccgtggttatcggcgaggcggcagccttcggtgcagtcgtcactcgcgtctggctaccagctccccgctgccctgagctcggcgggctggcattcggcccggggaaaagcggagcagaaaaacaaccagaaaaaaaaaatctcatcatggcaaatattcaccaggaaaacgaagagatggagcagcctatgcagaatggagaggaagaccgccctttgggaggaggtgaaggccaccagcctgcaggaaatcgacggggacaggctcgccgacttgcccctaattttcgatgggccatacccaataggcagatcaatgatgggatgggtggagatggagatgatatggaaatattcatggaggagatgagagaaatcagaagaaaacttagggagctgcagttgaggaattgtctgcgtatccttatgggggagctctctaatcaccatgaccatcatgatgaattttgccttatgccttgactcctgccatttatcatgagattaatactgtgattcccgctgttttctttttccttgcattttcctaatatgcctttactgatccgtttgctgtgaaccctatgttatttccatgtgtcaagtgggtcttgtgttgccagcttctatttgaagattgcctttgcactcagtgtaagtttctgtcagcagtagtttcacccatttgcatggaaaaatttaaagctaataaagcaatttaaaaagcaa

SEQ ID NO: 68116 - DNA, 970 bp, Homo sapiens
tgacaggctgtgcgctctggggcacctcatgcagacgggagtagggaggctgttttttgcgcgtgcatatgcggtggcgggtggggggaagggggagatcctgctgcactggccgcccaagttggggggcgagctcggtggtgacgcgcggccctcacgtgacccagagctgcagagcgacgcagccttcggtgcagtcgtcactcgcgtctggctaccagctccccgctgccctgagctcggcgggctggcattcggcccggggaaaagcggagcaggtctgcgaggctaagtgtctccgcggcgcacctcgcggcgagaatccggaggagaaggagactgcaaggataggcccaggaaaacgaagagatggagcagcctatgcagaatggagaggaagaccgccctttgggaggaggtgaaggccaccagcctgcaggaaatcgacggggacaggctcgccgacttgcccctaattttcgatgggccatacccaataggcagatcaatgatgggatgggtggagatggagatgatatggaaatattcatggaggagatgagagaaatcagaagaaaacttagggagctgcagttgaggaattgtctgcgtatccttatgggggagctctctaatcaccatgaccatcatgatgaattttgccttatgccttgactcctgccatttatcatgagattaatactgtgattcccgctgttttctttttccttgcattttcctaatatgcctttactgatccgtttgctgtgaaccctatgttatttccatgtgtcaagtgggtcttgtgttgccagcttctatttgaagattgcctttgcactcagtgtaagtttctgtcagcagtagtttcacccatttgcatggaaaaatttaaagctaataaagcaatttaaaaagcaaaaaaaaaaaacacagcacccagaacaaacaacaaacaaacacagggaca

SEQ ID NO: 68117 - DNA, 973 bp, Homo sapiens
tgacaggctgtgcgctctggggcacctcatgcagacgggagtagggaggctgttttttgcgcgtgcatatgcggtggcgggtggggggaagggggagatcctgctgcactggccgcccaagttggggggcgagctcggtggtgacgcgcggccctcacgtgacccagagctgcagagcgacgcagccttcggtgcagtcgtcactcgcgtctggctaccagctccccgctgccctgagctcggcgggctggcattcggcccggggaaaagcggagcaggtctgcgaggctaagtgtctccgcggcgcacctcgcggcgagaatccggaggagaaggagactgcaaggataggcccaggaaaacgaagagatggagcagcctatgcagaatggagaggaagaccgccctttgggaggaggtgaaggccaccagcctgcaggaaatcgacggggacaggctcgccgacttgcccctaattttcgatgggccatacccaataggcagatcaatgatgggatgggtggagatggagatgatatggaaatattcatggaggagatgagagaaatcagaagaaaacttagggagctgcagttgaggaattgtctgcgtatccttatgggggagctctctaatcaccatgaccatcatgatgaattttgccttatgccttgactcctgccatttatcatgagattaatactgtgattcccgctgttttctttttccttgcattttcctaatatgcctttactgatccgtttgctgtgaaccctatgttatttccatgtgtcaagtgggtcttgtgttgccagcttctatttgaagattgcctttgcactcagtgtaagtttctgtcagcagtagtttcacccatttgcatggaaaaatttaaagctaataaagcaatttaaaaagcaactaaaaaaaaaagaaaaacccgggctttttttgggggcggaaaggggttgaa

SEQ ID NO: 68118 - DNA, 1115 bp, Homo sapiens
tgacaggctgtgcgctctggggcacctcatgcagacgggagtagggaggctgttttttgcgcgtgcatatgcggtggcgggtggggggaagggggagatcctgctgcactggccgcccaagttggggggcgagctcggtggtgacgcgcggccctcacgtgacccagagctgcagagcgacgcagccttcggtgcagtcgtcactcgcgtctggctaccagctccccgctgccctgagctcggcgggctggcattcggcccggggaaaagcggagcaggtctgcgaggctaagtgtctccgcggcgcacctcgcggcgagaatccggaggagaaggagactgcaaggataggcccaggaaaacgaagagatggagcagcctatgcagaatggagaggaagaccgccctttgggaggaggtgaaggccaccagcctgcaggaaatcgacggggacaggctcgccgacttgcccctaattttcgatgggccatacccaataggcagatcaatgatgggatgggtggagatggagatgatatggaaatattcatggaggagatgagagaaatcagaagaaaacttagggagctgcagttgaggaattgtctgcgtatccttatgggggagctctctaatcaccatgaccatcatgatgaattttgccttatgccttgactcctgccatttatcatgagattaatactgtgattcccgctgttttctttttccttgcattttcctaatatgcctttactgatccgtttgctgtgaaccctatgttatttccatgtgtcaagtgggtcttgtgttgccagcttctatttgaagattgcctttgcactcagtgtaagtttctgtcagcagtagtttcacccatttgcatggaaaaatttaaagctaataaagcaatttaaaaagcaaaaaaaaaaaaaaaaaagaaaaaaagaaaaacaaaaaacaaaaaaaaaaaaaaaaaaaaaaaaaacaaaagggggggttatatgggcggggggggaaaaaggggttgaaaggggcatgggaatgggtccgggacccgttttttggccaagggggaaaggggggcccaaaggggggaaaatggaaaccggtacgac

SEQ ID NO: 68119 - DNA, 1158 bp, Homo sapiens
tgacaggctgtgcgctctggggcacctcatgcagacgggagtagggaggctgttttttgcgcgtgcatatgcggtggcgggtggggggaagggggagatcctgctgcactggccgcccaagttggggggcgagctcggtggtgacgcgcggccctcacgtgacccagagctgcagagcgacgcagccttcggtgcagtcgtcactcgcgtctggctaccagctccccgctgccctgagctcggcgggctggcattcggcccggggaaaagcggagcaggtctgcgaggctaagtgtctccgcggcgcacctcgcggcgagaatccggaggagaaggagactgcaaggataggcccaggaaaacgaagagatggagcagcctatgcagaatggagaggaagaccgccctttgggaggaggtgaaggccaccagcctgcaggaaatcgacggggacaggctcgccgacttgcccctaattttcgatgggccatacccaataggcagatcaatgatgggatgggtggagatggagatgatatggaaatattcatggaggagatgagagaaatcagaagaaaacttagggagctgcagttgaggaattgtctgcgtatccttatgggggagctctctaatcaccatgaccatcatgatgaattttgccttatgccttgactcctgccatttatcatgagattaatactgtgattcccgctgttttctttttccttgcattttcctaatatgcctttactgatccgtttgctgtgaaccctatgttatttccatgtgtcaagtgggtcttgtgttgccagcttctatttgaagattgcctttgcactcagtggctgctgagtggaactgatgaaatgtggaactgtgttgggctggcttctgtccccaactccccaacatttaacaggaccgggacccccatcaggtacttaggactggaggaattatcactcatgtttacaagtccagacagtgaaaataggtgggttcccccatatcattcttgttatttgcaatcctcctgctcccctgattactgccttcttgattggccacactttcccttctgctggatcctatttctgttgctgttgatgaggtgctagggtcttcaaggtaacaagccccactgatttctctgga

SEQ ID NO: 68120 - DNA, 1088 bp, Homo sapiens
accccatcccccactcctataccggtcctccattttggtgcctgcaaagctctgggaaagaatcccgggaaacgaaaaatggtgggtttgggggaagggaggtaaggggagaaagctggagggaggggctttaattggaggccccgtagaggacgcgcggaacttctaaggtgggaaaaaacgaaattaaaaaaatcctttgatatcagggctctgaatcctgctggtcagagcaccaagcattcagtctctctccttgcctttgtcttacttgtgttcaaagaaaaacaaccagaaaaaaaaaatctcatcatggcaaatattcaccaggaaaacgaagagatggagcagcctatgcagaatggagaggaagaccgccctttgggaggaggtgaaggccaccagcctgcaggaaatcgacggggacaggctcgccgacttgcccctaattttcgatgggccatacccaataggcagatcaatgatgggatgggtggagatggagatgatatggaaatattcatggaggagatgagagaaatcagaagaaaacttagggagctgcagttgaggaattgtctgcgtatccttatgggggagctctctaatcaccatgaccatcatgatgaattttgccttatgccttgactcctgccatttatcatgagattaatactgtgattcccgctgttttctttttccttgcattttcctaatatgcctttactgatccgtttgctgtgaaccctatgttatttccatgtgtcaagtgggtcttgtgttgccagcttctatttgaagattgcctttgcactcagtgtaagtttctgtcagcagtagtttcacccatttgcatggaaaaatttaaagctaataaagcaatttaaaaagcaaaaaaaaaaaaaaaaaagaaaaaaagaaaaacaaaaaacaaaaaaaaaaaaaaaaaaaaaaaaaacaaaagggggggttatatgggcggggggggaaaaaggggttgaaaggggcatgggaatgggtccgggacccgttttttggccaagggggaaaggggggcccaaaggggggaaaatggaaaccggtacgac

SEQ ID NO: 68121 - DNA, 459 bp, Homo sapiens
atcctcggagaagcaggatgagggagagagacagagaaagagagggagagagagccgagttttgatggagatgatatggaaatattcatggaggagatgagagaaatcagaagaaaacttagggagctgcagttgaggaattgtctgcgtatccttatgggggagctctctaatcaccatgaccatcatgatgaattttgccttatgccttgactcctgccatttatcatgagattaatactgtgattcccgctgttttctttttccttgcattttcctaatatgcctttactgatccgtttgctgtgaaccctatgttatttccatgtgtcaagtgggtcttgtgttgccagcttctatttgaagattgcctttgcactcagtgtaagtttctgtcagcagtagtttcacccatttgcatggaaaaatttaaagctaataaagcaatttaaaaagcaa

SEQ ID NO: 68122 - DNA, 685 bp, Homo sapiens
cccccccccccccccccccgactcgcgtctggctaccagctccccgctgccctgagctcggcgggctggcattcggcccggggaaaagcggagcaggtctgcgaggctaagtgtctccgcggcgcacctcgcggcgagaatccggaggagaaggagactgcaaggataggcccaggaaaacgaagagatggagcagcctatgcagaatggagaggaagaccgccctttgggaggaggtgaaggccaccagcctgcaggaaatcgacggggacaggctcgccgacttgcccctaattttcgatgggccatacccaataggcagatcaatgatgggatgggtggagatggagatgatatggaaatattcatggaggagatgagagaaatcagaagctctaatcaccatgaccatcatgatgaattttgccttatgccttgactcctgccatttatcatgagattaatactgtgattcccgctgttttctttttccttgcattttcctaatatgcctttactgatccgtttgctgtgaaccctatgttatttccatgtgtcaagtgggtcttgtgttgccagcttctatttgaagattgcctttgcactcagtgtaagtttctgtcagcagtagtttcacccatttgcatggaaaaatttaaagctaataaagcaatttaaaaagcaa

SEQ ID NO: 68123 - DNA, 539 bp, Homo sapiens
ggacgcgtgggggagatctctggatccatgaccatccttttccttgactcctgccatttatcatgagattaatactgtgattcccgctgttttctttttccttgcattttcctaatatgcctttactgatccgtttgctgtgaaccctatgttatttccatgtgtcaagtgggtcttgtgttgccagcttctatttgaagattgcctttgcactcagtgtaagtttctgtcagcagtagtttcacccatttgcatggaaaaatttaaagctaataaagcaatttaaaaagcaaaaaaaaaaaaaaaaacaacaaaaaacaaaaaaaaaacccaacaaaaaaaaaaaaaaaaaaaaaaaaaagaaaaaaagaaaaacaaaaaacaaaaaaaaaaaaaaaaaaaaaaaaaacaaaagggggggttatatgggcggggggggaaaaaggggttgaaaggggcatgggaatgggtccgggacccgttttttggccaagggggaaaggggggcccaaaggggggaaaatggaaaccggtacgac

SEQ ID NO: 68124 - DNA, 739 bp, Homo sapiens
cccccccccccccccccccgactcgcgtctggctaccagctccccgctgccctgagctcggcgggctggcattcggcccggggaaaagcggagcaggtctgcgaggctaagtgtctccgcggcgcacctcgcggcgagaatccggaggagaaggagactgcaaggataggcccaggaaaacgaagagatggagcagcctatgcagaatggagaggaagaccgccctttgggaggaggtgaaggccaccagcctgcaggaaatcgacggggacaggctcgccgacttgcccctaattttcgatgggccatacccaataggcagatcaatgatgggatgggtggagatggagatgatatggaaatattcatggaggagatgagagaaatcagaagaaaacttagggagctgcagttgaggaattgtctgcgtatccttatgggggagctctctaatcaccatgaccatcatgatgaattttgccttatgccttgactcctgccatttatcatgagattaatactgtgattcccgctgttttctttttccttgcattttcctaatatgcctttactgatccgtttgctgtgaaccctatgttatttccatgtgtcaagtgggtcttgtgttgccagcttctatttgaagattgcctttgcactcagtgtaagtttctgtcagcagtagtttcacccatttgcatggaaaaatttaaagctaataaagcaatttaaaaagcaa

SEQ ID NO: 68125 - DNA, 818 bp, Homo sapiens
gaaacgcgcacaccgccgccacggcaaagtcacgggcgtcactacggctagtagagccccgtggttatcggcgaggcggcagccttcggtgcagtcgtcactcgcgtctggctaccagctccccgctgccctgagctcggcgggctggcattcggcccggggaaaagcggagcaggtctgcgaggctaagtgtctccgcggcgcacctcgcggcgagaatccggaggagaaggagactgcaaggataggcccaggaaaacgaagagatggagcagcctatgcagaatggagaggaagaccgccctttgggaggaggtgaaggccaccagcctgcaggaaatcgacggggacaggctcgccgacttgcccctaattttcgatgggccatacccaataggcagatcaatgatgggatgggtggagatggagatgatatggaaatattcatggaggagatgagagaaatcagaagaaaacttagggagctgcagttgaggaattgtctgcgtatccttatgggggagctctctaatcaccatgaccatcatgatgaattttgccttatgccttgactcctgccatttatcatgagattaatactgtgattcccgctgttttctttttccttgcattttcctaatatgcctttactgatccgtttgctgtgaaccctatgttatttccatgtgtcaagtgggtcttgtgttgccagcttctatttgaagattgcctttgcactcagtgtaagtttctgtcagcagtagtttcacccatttgcatggaaaaatttaaagctaataaagcaatttaaaaagcaa

SEQ ID NO: 68126 - DNA, 898 bp, Homo sapiens
tgacaggctgtgcgctctggggcacctcatgcagacgggagtagggaggctgttttttgcgcgtgcatatgcggtggcgggtggggggaagggggagatcctgctgcactggccgcccaagttggggggcgagctcggtggtgacgcgcggccctcacgtgacccagagctgcagagcgacgcagccttcggtgcagtcgtcactcgcgtctggctaccagctccccgctgccctgagctcggcgggctggcattcggcccggggaaaagcggagcaggtctgcgaggctaagtgtctccgcggcgcacctcgcggcgagaatccggaggagaaggagactgcaaggataggcccaggaaaacgaagagatggagcagcctatgcagaatggagaggaagaccgccctttgggaggaggtgaaggccaccagcctgcaggaaatcgacggggacaggctcgccgacttgcccctaattttcgatgggccatacccaataggcagatcaatgatgggatgggtggagatggagatgatatggaaatattcatggaggagatgagagaaatcagaagaaaacttagggagctgcagttgaggaattgtctgcgtatccttatgggggagctctctaatcaccatgaccatcatgatgaattttgccttatgccttgactcctgccatttatcatgagattaatactgtgattcccgctgttttctttttccttgcattttcctaatatgcctttactgatccgtttgctgtgaaccctatgttatttccatgtgtcaagtgggtcttgtgttgccagcttctatttgaagattgcctttgcactcagtgtaagtttctgtcagcagtagtttcaccaatgtggtggttaagctatgcatt

SEQ ID NO: 68127 - DNA, 995 bp, Homo sapiens
tcatcgctgtctggaacagcagatgactcgagagcgggcgtgcatatgcggtggcgggtggggggaagggggagatcctgctgcactggccgcccaagttggggggcgagctcggtggtgacgcgcggccctcacgtgacccagagctgcagagcgacgcagccttcggtgcagtcgtcactcgcgtctggctaccagctccccgctgccctgagctcggcgggctggcattcggcccggggaaaagcggagcaggtctgcgaggctaagtgtctccgcggcgcacctcgcggcgagaatccggaggagaaggagactgcaaggataggccaaaaacaaccagaaaaaaaaaatctcatcatggcaaatattcaccaggaaaacgaagagatggagcagcctatgcagaatggagaggaagaccgccctttgggaggaggtgaaggccaccagcctgcaggaaatcgacggggacaggctcgccgacttgcccctaattttcgatgggccatacccaataggcagatcaatgatgggatgggtggagatggagatgatatggaaatattcatggaggagatgagagaaatcagaagaaaacttagggagctgcagttgaggaattgtctgcgtatccttatgggggagctctctaatcaccatgaccatcatgatgaattttgccttatgccttgactcctgccatttatcatgagattaatactgtgattcccgctgttttctttttccttgcattttcctaatatgcctttactgatccgtttgctgtgaaccctatgttatttccatgtgtcaagtgggtcttgtgttgccagcttctatttgaagattgcctttgcactcagtgtaagtttctgtcagcagtagtttcacccatttgcatggaaaaatttaaagctaataaagcaatttaaaaagcaatctatacatttattgtctcattaaaaatgtatacttacatataacagatgaac

SEQ ID NO: 68128 - DNA, 624 bp, Homo sapiens
ccagggctaaacttagagggaagctgtcatcaccctagggcctgaggaggaaggggagaaaatactgtttggggggcctggtgggagctgtagctgggaggaggaccatgagggagaaaccatagtcatggaaggatgttgtcactgccaggaccaagacaccaagactgtgtgctaggcactgagttagagttgaagaccctcaagaattccactgacaactgaatcatcaaagggaaccgagccctgcccaaggacatacagttgttttcctcttccttgtcctttggagaagcacagctgaagcttcctgcccacaccccagcccctcctccttgagcatgaatgtgcagaccacccaccgccccatgcttgtatctacaacagctatgaggaagaacatacagattaatcaccctgctgcgggatgccagctacccagtggctctggcagccccagtcaatggatcctgcagtgtagccttcatcagtagagctgccactgccagcacccaaaaggtagcactaatatgcatgtgtgacctgaaaattacaatgtaaatggtggggcaacacatgtataggaaggtaaattttaattaaaagtctgttctccaactcagc

SEQ ID NO: 68129 - DNA, 9589 bp, Homo sapiens
ccgaccaacaccaacacccagctccgacgcagctcctctgcgcccttgccgccctccgagccacagctttcctcccgctcctgcccccggcccgtcgccgtctccgcgctcgcagcggcctcgggagggcccaggtagcgagcagcgacctcgcgagccttccgcactcccgcccggttccccggccgtccgcctatccttggccccctccgctttctccgcgccggcccgcctcgcttatgcctcggcgctgagccgctctcccgattgcccgccgacatgagctgcaacggaggctcccacccgcggatcaacactctgggccgcatgatccgcgccgagtctggcccggacctgcgctacgaggtgaccagcggcggcgggggcaccagcaggatgtactattctcggcgcggcgtgatcaccgaccagaactcggacggctactgtcaaaccggcacgatgtccaggcaccagaaccagaacaccatccaggagctgctgcagaactgctccgactgcttgatgcgagcagagctcatcgtgcagcctgaattgaagtatggagatggaatacaactgactcggagtcgagaattggatgagtgttttgcccaggccaatgaccaaatggaaatcctcgacagcttgatcagagagatgcggcagatgggccagccctgtgatgcttaccagaaaaggcttcttcagctccaagagcaaatgcgagccctttataaagccatcagtgtccctcgagtccgcagggccagctccaagggtggtggaggctacacttgtcagagtggctctggctgggatgagttcaccaaacatgtcaccagtgaatgtttggggtggatgaggcagcaaagggcggagatggacatggtggcctggggtgtggacctggcctcagtggagcagcacattaacagccaccggggcatccacaactccatcggcgactatcgctggcagctggacaaaatcaaagccgacctgcgcgagaaatctgcgatctaccagttggaggaggagtatgaaaacctgctgaaagcgtcctttgagaggatggatcacctgcgacagctgcagaacatcattcaggccacgtccagggagatcatgtggatcaatgactgcgaggaggaggagctgctgtacgactggagcgacaagaacaccaacatcgctcagaaacaggaggccttctccatacgcatgagtcaactggaagttaaagaaaaagagctcaataagctgaaacaagaaagtgaccaacttgtcctcaatcagcatccagcttcagacaaaattgaggcctatatggacactctgcagacgcagtggagttggattcttcagatcaccaagtgcattgatgttcatctgaaagaaaatgctgcctactttcagttttttgaagaggcgcagtctactgaagcatacctgaaggggctccaggactccatcaggaagaagtacccctgcgacaagaacatgcccctgcagcacctgctggaacagatcaaggagctggagaaagaacgagagaaaatccttgaatacaagcgtcaggtgcagaacttggtaaacaagtctaagaagattgtacagctgaagcctcgtaacccagactacagaagcaataaacccattattctcagagctctctgtgactacaaacaagatcagaaaatcgtgcataagggggatgagtgtatcctgaaggacaacaacgagcgcagcaagtggtacgtgacgggcccgggaggcgttgacatgcttgttccctctgtggggctgatcatccctcctccgaacccactggccgtggacctctcttgcaagattgagcagtactacgaagccatcttggctctgtggaaccagctctacatcaacatgaagagcctggtgtcctggcactactgcatgattgacatagagaagatcagggccatgacaatcgccaagctgaaaacaatgcggcaggaagattacatgaagacgatagccgaccttgagttacattaccaagagttcatcagaaatagccaaggctcagagatgtttggagatgatgacaagcggaaaatacagtctcagttcaccgatgcccagaagcattaccagaccctggtcattcagctccctggctatccccagcaccagacagtgaccacaactgaaatcactcatcatggaacctgccaagatgtcaaccataataaagtaattgaaaccaacagagaaaatgacaagcaagaaacatggatgctgatggagctgcagaagattcgcaggcagatagagcactgcgagggcaggatgactctcaaaaacctccctctagcagaccaggggtcttctcaccacatcacagtgaaaattaacgagcttaagagtgtgcagaatgattcacaagcaattgctgaggttctcaaccagcttaaagatatgcttgccaacttcagaggttctgaaaagtactgctatttacagaatgaagtatttggactatttcagaaactggaaaatatcaatggtgttacagatggctacttaaatagcttatgcacagtaagggcactgctccaggctattctccaaacagaagacatgttaaaggtttatgaagccaggctcactgaggaggaaactgtctgcctggacctggataaagtggaagcttaccgctgtggactgaagaaaataaaaaatgacttgaacttgaagaagtcgttgttggccactatgaagacagaactacagaaagcccagcagatccactctcagacttcacagcagtatccactttatgatctggacttgggcaagttcggtgaaaaagtcacacagctgacagaccgctggcaaaggatagataaacagatcgactttagattatgggacctggagaaacaaatcaagcaattgaggaattatcgtgataactatcaggctttctgcaagtggctctatgatcgtaaacgccgccaggattccttagaatccatgaaatttggagattccaacacagtcatgcggtttttgaatgagcagaagaacttgcacagtgaaatatctggcaaacgagacaaatcagaggaagtacaaaaaattgctgaactttgcgccaattcaattaaggattatgagctccagctggcctcatacacctcaggactggaaactctgctgaacatacctatcaagaggaccatgattcagtccccttctggggtgattctgcaagaggctgcagatgttcatgctcggtacattgaactacttacaagatctggagactattacaggttcttaagtgagatgctgaagagtttggaagatctgaagctgaaaaataccaagatcgaagttttggaagaggagctcagactggcccgagatgccaactcggaaaactgtaataagaacaaattcctggatcagaacctgcagaaataccaggcagagtgttcccagttcaaagcgaagcttgcgagcctggaggagctgaagagacaggctgagctggatgggaagtcggctaagcaaaatctagacaagtgctacggccaaataaaagaactcaatgagaagatcacccgactgacttatgagattgaagatgaaaagagaagaagaaaatctgtggaagacagatttgaccaacagaagaatgactatgaccaactgcagaaagcaaggcaatgtgaaaaggagaaccttggttggcagaaattagagtctgagaaagccatcaaggagaaggagtacgagattgaaaggttgagggttctactgcaggaagaaggcacccggaagagagaatatgaaaatgagctggcaaaggtaagaaaccactataatgaggagatgagtaatttaaggaacaagtatgaaacagagattaacattacgaagaccaccatcaaggagatatccatgcaaaaagaggatgattccaaaaatcttagaaaccagcttgatagactttcaagggaaaatcgagatctgaaggatgaaattgtcaggctcaatgacagcatcttgcaggccactgagcagcgaaggcgagctgaagaaaacgcccttcagcaaaaggcctgtggctctgagataatgcagaagaagcagcatctggagatagaactgaagcaggtcatgcagcagcgctctgaggacaatgcccggcacaagcagtccctggaggaggctgccaagaccattcaggacaaaaataaggagatcgagagactcaaagctgagtttcaggaggaggccaagcgccgctgggaatatgaaaatgaactgagtaaggtaagaaacaattatgatgaggagatcattagcttaaaaaatcagtttgagaccgagatcaacatcaccaagaccaccatccaccagctcaccatgcagaaggaagaggataccagtggctaccgggctcagatagacaatctcacccgagaaaacaggagcttatctgaagaaataaagaggctgaagaacactctaacccagaccacagagaatctcaggagggtggaagaagacatccaacagcaaaaggccactggctctgaggtgtctcagaggaaacagcagctggaggttgagctgagacaagtcactcagatgcgaacagaggagagcgtaagatataagcaatctcttgatgatgctgccaaaaccatccaggataaaaacaaggagatagaaaggttaaaacaactgatcgacaaagaaacaaatgaccggaaatgcctggaagatgaaaacgcgagattacaaagggtccagtatgacctgcagaaagcaaacagtagtgcgacggagacaataaacaaactgaaggttcaggagcaagaactgacacgcctgaggatcgactatgaaagggtttcccaggagaggactgtgaaggaccaggatatcacgcggttccagaactctctgaaagagctgcagctgcagaagcagaaggtggaagaggagctgaatcggctgaagaggaccgcgtcagaagactcctgcaagaggaagaagctggaggaagagctggaaggcatgaggaggtcgctgaaggagcaagccatcaaaatcaccaacctgacccagcagctggagcaggcatccattgttaagaagaggagtgaggatgacctccggcagcagagggacgtgctggatggccacctgagggaaaagcagaggacccaggaagagctgaggaggctctcttctgaggtcgaggccctgaggcggcagttactccaggaacaggaaagtgtcaaacaagctcacttgaggaatgagcatttccagaaggcgatagaagataaaagcagaagcttaaatgaaagcaaaatagaaattgagaggctgcagtctctcacagagaacctgaccaaggagcacttgatgttagaagaagaactgcggaacctgaggctggagtacgatgacctgaggagaggacgaagcgaagcggacagtgataaaaatgcaaccatcttggaactaaggagccagctgcagatcagcaacaaccggaccctggaactgcaggggctgattaatgatttacagagagagagggaaaatttgagacaggaaattgagaaattccaaaagcaggctttagaggcatctaataggattcaggaatcaaagaatcagtgtactcaggtggtacaggaaagagagagccttctggtgaaaatcaaagtcctggagcaagacaaggcaaggctgcagaggctggaggatgagctgaatcgtgcaaaatcaactctagaggcagaaaccagggtgaaacagcgcctggagtgtgagaaacagcaaattcagaatgacctgaatcagtggaagactcaatattcccgcaaggaggaggctattaggaagatagaatcggaaagagaaaagagtgagagagagaagaacagtcttaggagtgagatcgaaagactccaagcagagatcaagagaattgaagagaggtgcaggcgtaagctggaggattctaccagggagacacagtcacagttagaaacagaacgctcccgatatcagagggagattgataaactcagacagcgcccatatgggtcccatcgagagacccagactgagtgtgagtggaccgttgacacctccaagctggtgtttgatgggctgaggaagaaggtgacagcaatgcagctctatgagtgtcagctgatcgacaaaacaaccttggacaaactattgaaggggaagaagtcagtggaagaagttgcttctgaaatccagccattccttcggggtgcaggatctatcgctggagcatctgcttctcctaaggaaaaatactctttggtagaggccaagagaaagaaattaatcagcccagaatccacagtcatgcttctggaggcccaggcagctacaggtggtataattgatccccatcggaatgagaagctgactgtcgacagtgccatagctcgggacctcattgacttcgatgaccgtcagcagatatatgcagcagaaaaagctatcactggttttgatgatccattttcaggcaagacagtatctgtttcagaagccatcaagaaaaatttgattgatagagaaaccggaatgcgcctgctggaagcccagattgcttcagggggtgtagtagaccctgtgaacagtgtctttttgccaaaagatgtcgccttggcccgggggctgattgatagagatttgtatcgatccctgaatgatccccgagatagtcagaaaaactttgtggatccagtcaccaaaaagaaggtcagttacgtgcagctgaaggaacggtgcagaatcgaaccacatactggtctgctcttgctttcagtacagaagagaagcatgtccttccaaggaatcagacaacctgtgaccgtcactgagctagtagattctggtatattgagaccgtccactgtcaatgaactggaatctggtcagatttcttatgacgaggttggtgagagaattaaggacttcctccagggttcaagctgcatagcaggcatatacaatgagaccacaaaacagaagcttggcatttatgaggccatgaaaattggcttagtccgacctggtactgctctggagttgctggaagcccaagcagctactggctttatagtggatcctgttagcaacttgaggttaccagtggaggaagcctacaagagaggtctggtgggcattgagttcaaagagaagctcctgtctgcagaacgagctgtcactgggtataatgatcctgaaacaggaaacatcatctctttgttccaagccatgaataaggaactcatcgaaaagggccacggtattcgcttattagaagcacagatcgcaaccggggggatcattgacccaaaggagagccatcgtttaccagttgacatagcatataagaggggctatttcaatgaggaactcagtgagattctctcagatccaagtgatgataccaaaggattttttgaccccaacactgaagaaaatcttacctatctgcaactaaaagaaagatgcattaaggatgaggaaacagggctctgtcttctgcctctgaaagaaaagaagaaacaggtgcagacatcacaaaagaataccctcaggaagcgtagagtggtcatagttgacccagaaaccaataaagaaatgtctgttcaggaggcctacaagaagggcctaattgattatgaaaccttcaaagaactgtgtgagcaggaatgtgaatgggaagaaataaccatcacgggatcagatggctccaccagggtggtcctggtagatagaaagacaggcagtcagtatgatattcaagatgctattgacaagggccttgttgacaggaagttctttgatcagtaccgatccggcagcctcagcctcactcaatttgctgacatgatctccttgaaaaatggtgtcggcaccagcagcagcatgggcagtggtgtcagcgatgatgtttttagcagctcccgacatgaatcagtaagtaagatttccaccatatccagcgtcaggaatttaaccataaggagcagctctttttcagacaccctggaagaatcgagccccattgcagccatctttgacacagaaaacctggagaaaatctccattacagaaggtatagagcggggcatcgttgacagcatcacgggtcagaggcttctggaggctcaggcctgcacaggtggcatcatccacccaaccacgggccagaagctgtcacttcaggacgcagtctcccagggtgtgattgaccaagacatggccaccaggctgaagcctgctcagaaagccttcataggcttcgagggtgtgaagggaaagaagaagatgtcagcagcagaggcagtgaaagaaaaatggctcccgtatgaggctggccagcgcttcctggagttccagtacctcacgggaggtcttgttgacccggaagtgcatgggaggataagcaccgaagaagccatccggaaggggttcatagatggccgcgccgcacagaggctgcaagacaccagcagctatgccaaaatcctgacctgccccaaaaccaaattaaaaatatcctataaggatgccataaatcgctccatggtagaagatatcactgggctgcgccttctggaagccgcctccgtgtcgtccaagggcttacccagcccttacaacatgtcttcggctccggggtcccgctccggctcccgctcgggatctcgctccggatctcgctccgggtcccgcagtgggtcccggagaggaagctttgacgccacagggaattcttcctactcttattcctactcatttagcagtagttctattgggcactagtagtcagttgggagtggttgctataccttgacttcatttatatgaatttccactttattaaataatagaaaagaaaatcccggtgcttgcagtagagtgataggacattctatgcttacagaaaatatagccatgattgaaatcaaatagtaaaggctgttctggctttttatcttcttagctcatcttaaataagcagtacacttggatgcagtgcgtctgaagtgctaatcagttgtaacaatagcacaaatcgaacttaggatttgtttcttctcttctgtgtttcgatttttgatcaattctttaattttggaagcctataatacagttttctattcttggagataaaaattaaatggatcactgatattttagtcattctgcttctcatctaaatatttccatattctgtattaggagaaaattaccctcccagcaccagcccccctctcaaacccccaacccaaaaccaagcattttggaatgagtctcctttagtttcagagtgtggattgtataacccatatactcttcgatgtacttgtttggtttggtattaatttgactgtgcatgacagcggcaatcttttctttggtcaaagttttctgtttattttgcttgtcatattcgatgtactttaaggtgtctttatgaagtttgctattctggcaataaacttttagacttttg

SEQ ID NO: 68130 - DNA, 9017 bp, Homo sapiens
  misc_feature (7)..(7): n is a, c, g, or t
  misc_feature (30)..(30): n is a, c, g, or t
  misc_feature (50)..(50): n is a, c, g, or t
  misc_feature (92)..(92): n is a, c, g, or t
atgacantcgcattgtcttaaagagatatnattgacatataagtgttganatggtcatgagtgtttgaatgaaactttctggaggggagatntgagctctttgatcttctctgatgcttaccagaaaaggcttcttcagctccaagagcaaatgcgagccctttataaagccatcagtgtccctcgagtccgcagggccagctccaagggtggtggaggctacacttgtcagagtggctctggctgggatgagttcaccaaacatgtcaccagtgaatgtttggggtggatgaggcagcaaagggcggagatggacatggtggcctggggtgtggacctggcctcagtggagcagcacattaacagccaccggggcatccacaactccatcggcgactatcgctggcagctggacaaaatcaaagccgacctgcgcgagaaatctgcgatctaccagttggaggaggagtatgaaaacctgctgaaagcgtcctttgagaggatggatcacctgcgacagctgcagaacatcattcaggccacgtccagggagatcatgtggatcaatgactgcgaggaggaggagctgctgtacgactggagcgacaagaacaccaacatcgctcagaaacaggaggccttctccatacgcatgagtcaactggaagttaaagaaaaagagctcaataagctgaaacaagaaagtgaccaacttgtcctcaatcagcatccagcttcagacaaaattgaggcctatatggacactctgcagacgcagtggagttggattcttcagatcaccaagtgcattgatgttcatctgaaagaaaatgctgcctactttcagttttttgaagaggcgcagtctactgaagcatacctgaaggggctccaggactccatcaggaagaagtacccctgcgacaagaacatgcccctgcagcacctgctggaacagatcaaggagctggagaaagaacgagagaaaatccttgaatacaagcgtcaggtgcagaacttggtaaacaagtctaagaagattgtacagctgaagcctcgtaacccagactacagaagcaataaacccattattctcagagctctctgtgactacaaacaagatcagaaaatcgtgcataagggggatgagtgtatcctgaaggacaacaacgagcgcagcaagtggtacgtgacgggcccgggaggcgttgacatgcttgttccctctgtggggctgatcatccctcctccgaacccactggccgtggacctctcttgcaagattgagcagtactacgaagccatcttggctctgtggaaccagctctacatcaacatgaagagcctggtgtcctggcactactgcatgattgacatagagaagatcagggccatgacaatcgccaagctgaaaacaatgcggcaggaagattacatgaagacgatagccgaccttgagttacattaccaagagttcatcagaaatagccaaggctcagagatgtttggagatgatgacaagcggaaaatacagtctcagttcaccgatgcccagaagcattaccagaccctggtcattcagctccctggctatccccagcaccagacagtgaccacaactgaaatcactcatcatggaacctgccaagatgtcaaccataataaagtaattgaaaccaacagagaaaatgacaagcaagaaacatggatgctgatggagctgcagaagattcgcaggcagatagagcactgcgagggcaggatgactctcaaaaacctccctctagcagaccaggggtcttctcaccacatcacagtgaaaattaacgagcttaagagtgtgcagaatgattcacaagcaattgctgaggttctcaaccagcttaaagatatgcttgccaacttcagaggttctgaaaagtactgctatttacagaatgaagtatttggactatttcagaaactggaaaatatcaatggtgttacagatggctacttaaatagcttatgcacagtaagggcactgctccaggctattctccaaacagaagacatgttaaaggtttatgaagccaggctcactgaggaggaaactgtctgcctggacctggataaagtggaagcttaccgctgtggactgaagaaaataaaaaatgacttgaacttgaagaagtcgttgttggccactatgaagacagaactacagaaagcccagcagatccactctcagacttcacagcagtatccactttatgatctggacttgggcaagttcggtgaaaaagtcacacagctgacagaccgctggcaaaggatagataaacagatcgactttagattatgggacctggagaaacaaatcaagcaattgaggaattatcgtgataactatcaggctttctgcaagtggctctatgatcgtaaacgccgccaggattccttagaatccatgaaatttggagattccaacacagtcatgcggtttttgaatgagcagaagaacttgcacagtgaaatatctggcaaacgagacaaatcagaggaagtacaaaaaattgctgaactttgcgccaattcaattaaggattatgagctccagctggcctcatacacctcaggactggaaactctgctgaacatacctatcaagaggaccatgattcagtccccttctggggtgattctgcaagaggctgcagatgttcatgctcggtacattgaactacttacaagatctggagactattacaggttcttaagtgagatgctgaagagtttggaagatctgaagctgaaaaataccaagatcgaagttttggaagaggagctcagactggcccgagatgccaactcggaaaactgtaataagaacaaattcctggatcagaacctgcagaaataccaggcagagtgttcccagttcaaagcgaagcttgcgagcctggaggagctgaagagacaggctgagctggatgggaagtcggctaagcaaaatctagacaagtgctacggccaaataaaagaactcaatgagaagatcacccgactgacttatgagattgaagatgaaaagagaagaagaaaatctgtggaagacagatttgaccaacagaagaatgactatgaccaactgcagaaagcaaggcaatgtgaaaaggagaaccttggttggcagaaattagagtctgagaaagccatcaaggagaaggagtacgagattgaaaggttgagggttctactgcaggaagaaggcacccggaagagagaatatgaaaatgagctggcaaaggtaagaaaccactataatgaggagatgagtaatttaaggaacaagtatgaaacagagattaacattacgaagaccaccatcaaggagatatccatgcaaaaagaggatgattccaaaaatcttagaaaccagcttgatagactttcaagggaaaatcgagatctgaaggatgaaattgtcaggctcaatgacagcatcttgcaggccactgagcagcgaaggcgagctgaagaaaacgcccttcagcaaaaggcctgtggctctgagataatgcagaagaagcagcatctggagatagaactgaagcaggtcatgcagcagcgctctgaggacaatgcccggcacaagcagtccctggaggaggctgccaagaccattcaggacaaaaataaggagatcgagagactcaaagctgagtttcaggaggaggccaagcgccgctgggaatatgaaaatgaactgagtaaggtaagaaacaattatgatgaggagatcattagcttaaaaaatcagtttgagaccgagatcaacatcaccaagaccaccatccaccagctcaccatgcagaaggaagaggataccagtggctaccgggctcagatagacaatctcacccgagaaaacaggagcttatctgaagaaataaagaggctgaagaacactctaacccagaccacagagaatctcaggagggtggaagaagacatccaacagcaaaaggccactggctctgaggtgtctcagaggaaacagcagctggaggttgagctgagacaagtcactcagatgcgaacagaggagagcgtaagatataagcaatctcttgatgatgctgccaaaaccatccaggataaaaacaaggagatagaaaggttaaaacaactgatcgacaaagaaacaaatgaccggaaatgcctggaagatgaaaacgcgagattacaaagggtccagtatgacctgcagaaagcaaacagtagtgcgacggagacaataaacaaactgaaggttcaggagcaagaactgacacgcctgaggatcgactatgaaagggtttcccaggagaggactgtgaaggaccaggatatcacgcggttccagaactctctgaaagagctgcagctgcagaagcagaaggtggaagaggagctgaatcggctgaagaggaccgcgtcagaagactcctgcaagaggaagaagctggaggaagagctggaaggcatgaggaggtcgctgaaggagcaagccatcaaaatcaccaacctgacccagcagctggagcaggcatccattgttaagaagaggagtgaggatgacctccggcagcagagggacgtgctggatggccacctgagggaaaagcagaggacccaggaagagctgaggaggctctcttctgaggtcgaggccctgaggcggcagttactccaggaacaggaaagtgtcaaacaagctcacttgaggaatgagcatttccagaaggcgatagaagataaaagcagaagcttaaatgaaagcaaaatagaaattgagaggctgcagtctctcacagagaacctgaccaaggagcacttgatgttagaagaagaactgcggaacctgaggctggagtacgatgacctgaggagaggacgaagcgaagcggacagtgataaaaatgcaaccatcttggaactaaggagccagctgcagatcagcaacaaccggaccctggaactgcaggggctgattaatgatttacagagagagagggaaaatttgagacaggaaattgagaaattccaaaagcaggctttagaggcatctaataggattcaggaatcaaagaatcagtgtactcaggtggtacaggaaagagagagccttctggtgaaaatcaaagtcctggagcaagacaaggcaaggctgcagaggctggaggatgagctgaatcgtgcaaaatcaactctagaggcagaaaccagggtgaaacagcgcctggagtgtgagaaacagcaaattcagaatgacctgaatcagtggaagactcaatattcccgcaaggaggaggctattaggaagatagaatcggaaagagaaaagagtgagagagagaagaacagtcttaggagtgagatcgaaagactccaagcagagatcaagagaattgaagagaggtgcaggcgtaagctggaggattctaccagggagacacagtcacagttagaaacagaacgctcccgatatcagagggagattgataaactcagacagcgcccatatgggtcccatcgagagacccagactgagtgtgagtggaccgttgacacctccaagctggtgtttgatgggctgaggaagaaggtgacagcaatgcagctctatgagtgtcagctgatcgacaaaacaaccttggacaaactattgaaggggaagaagtcagtggaagaagttgcttctgaaatccagccattccttcggggtgcaggatctatcgctggagcatctgcttctcctaaggaaaaatactctttggtagaggccaagagaaagaaattaatcagcccagaatccacagtcatgcttctggaggcccaggcagctacaggtggtataattgatccccatcggaatgagaagctgactgtcgacagtgccatagctcgggacctcattgacttcgatgaccgtcagcagatatatgcagcagaaaaagctatcactggttttgatgatccattttcaggcaagacagtatctgtttcagaagccatcaagaaaaatttgattgatagagaaaccggaatgcgcctgctggaagcccagattgcttcagggggtgtagtagaccctgtgaacagtgtctttttgccaaaagatgtcgccttggcccgggggctgattgatagagatttgtatcgatccctgaatgatccccgagatagtcagaaaaactttgtggatccagtcaccaaaaagaaggtcagttacgtgcagctgaaggaacggtgcagaatcgaaccacatactggtctgctcttgctttcagtacagaagagaagcatgtccttccaaggaatcagacaacctgtgaccgtcactgagctagtagattctggtatattgagaccgtccactgtcaatgaactggaatctggtcagatttcttatgacgaggttggtgagagaattaaggacttcctccagggttcaagctgcatagcaggcatatacaatgagaccacaaaacagaagcttggcatttatgaggccatgaaaattggcttagtccgacctggtactgctctggagttgctggaagcccaagcagctactggctttatagtggatcctgttagcaacttgaggttaccagtggaggaagcctacaagagaggtctggtgggcattgagttcaaagagaagctcctgtctgcagaacgagctgtcactgggtataatgatcctgaaacaggaaacatcatctctttgttccaagccatgaataaggaactcatcgaaaagggccacggtattcgcttattagaagcacagatcgcaaccggggggatcattgacccaaaggagagccatcgtttaccagttgacatagcatataagaggggctatttcaatgaggaactcagtgagattctctcagatccaagtgatgataccaaaggattttttgaccccaacactgaagaaaatcttacctatctgcaactaaaagaaagatgcattaaggatgaggaaacagggctctgtcttctgcctctgaaagaaaagaagaaacaggtgcagacatcacaaaagaataccctcaggaagcgtagagtggtcatagttgacccagaaaccaataaagaaatgtctgttcaggaggcctacaagaagggcctaattgattatgaaaccttcaaagaactgtgtgagcaggaatgtgaatgggaagaaataaccatcacgggatcagatggctccaccagggtggtcctggtagatagaaagacaggcagtcagtatgatattcaagatgctattgacaagggccttgttgacaggaagttctttgatcagtaccgatccggcagcctcagcctcactcaatttgctgacatgatctccttgaaaaatggtgtcggcaccagcagcagcatgggcagtggtgtcagcgatgatgtttttagcagctcccgacatgaatcagtaagtaagatttccaccatatccagcgtcaggaatttaaccataaggagcagctctttttcagacaccctggaagaatcgagccccattgcagccatctttgacacagaaaacctggagaaaatctccattacagaaggtatagagcggggcatcgttgacagcatcacgggtcagaggcttctggaggctcaggcctgcacaggtggcatcatccacccaaccacgggccagaagctgtcacttcaggacgcagtctcccagggtgtgattgaccaagacatggccaccaggctgaagcctgctcagaaagccttcataggcttcgagggtgtgaagggaaagaagaagatgtcagcagcagaggcagtgaaagaaaaatggctcccgtatgaggctggccagcgcttcctggagttccagtacctcacgggaggtcttgttgacccggaagtgcatgggaggataagcaccgaagaagccatccggaaggggttcatagatggccgcgccgcacagaggctgcaagacaccagcagctatgccaaaatcctgacctgccccaaaaccaaattaaaaatatcctataaggatgccataaatcgctccatggtagaagatatcactgggctgcgccttctggaagccgcctccgtgtcgtccaagggcttacccagcccttacaacatgtcttcggctccggggtcccgctccggctcccgctcgggatctcgctccggatctcgctccgggtcccgcagtgggtcccggagaggaagctttgacgccacagggaattcttcctactcttattcctactcatttagcagtagttctattgggcactagtagtcagttgggagtggttgctataccttgacttcatttatatgaatttccactttattaaataatagaaaagaaaatcccggtgcttgcagtagagtgataggacattctatgcttacagaaaatatagccatgattgaaatcaaatagtaaaggctgttctggctttttatcttcttagctcatcttaaataagcagtacacttggatgcagtgcgtctgaagtgctaatcagttgtaacaatagcacaaatcgaacttaggatttgtttcttctcttctgtgtttcgatttttgatcaattctttaattttggaagcctataatacagttttctattcttggagataaaaattaaatggatcactgatattttagtcattctgcttctcatctaaatatttccatattctgtattaggagaaaattaccctcccagcaccagcccccctctcaaacccccaacccaaaaccaagcattttggaatgagtctcctttagtttcagagtgtggattgtataacccatatactcttcgatgtacttgtttggtttggtattaatttgactgtgcatgacagcggcaatcttttctttggtcaaagttttctgtttattttgcttgtcatattcgatgtactttaaggtgtctttatgaagtttgctattctggcaataaacttttagacttttg

SEQ ID NO: 68131 - DNA, 8780 bp, Homo sapiens
gcgttctagaggatcccgcggagtagtggtgatcagtgaagggttggggtggatgaggcagcaaagggcggagatggacatggtggcctggggtgtggacctggcctcagtggagcagcacattaacagccaccggggcatccacaactccatcggcgactatcgctggcagctggacaaaatcaaagccgacctgcgcgagaaatctgcgatctaccagttggaggaggagtatgaaaacctgctgaaagcgtcctttgagaggatggatcacctgcgacagctgcagaacatcattcaggccacgtccagggagatcatgtggatcaatgactgcgaggaggaggagctgctgtacgactggagcgacaagaacaccaacatcgctcagaaacaggaggccttctccatacgcatgagtcaactggaagttaaagaaaaagagctcaataagctgaaacaagaaagtgaccaacttgtcctcaatcagcatccagcttcagacaaaattgaggcctatatggacactctgcagacgcagtggagttggattcttcagatcaccaagtgcattgatgttcatctgaaagaaaatgctgcctactttcagttttttgaagaggcgcagtctactgaagcatacctgaaggggctccaggactccatcaggaagaagtacccctgcgacaagaacatgcccctgcagcacctgctggaacagatcaaggagctggagaaagaacgagagaaaatccttgaatacaagcgtcaggtgcagaacttggtaaacaagtctaagaagattgtacagctgaagcctcgtaacccagactacagaagcaataaacccattattctcagagctctctgtgactacaaacaagatcagaaaatcgtgcataagggggatgagtgtatcctgaaggacaacaacgagcgcagcaagtggtacgtgacgggcccgggaggcgttgacatgcttgttccctctgtggggctgatcatccctcctccgaacccactggccgtggacctctcttgcaagattgagcagtactacgaagccatcttggctctgtggaaccagctctacatcaacatgaagagcctggtgtcctggcactactgcatgattgacatagagaagatcagggccatgacaatcgccaagctgaaaacaatgcggcaggaagattacatgaagacgatagccgaccttgagttacattaccaagagttcatcagaaatagccaaggctcagagatgtttggagatgatgacaagcggaaaatacagtctcagttcaccgatgcccagaagcattaccagaccctggtcattcagctccctggctatccccagcaccagacagtgaccacaactgaaatcactcatcatggaacctgccaagatgtcaaccataataaagtaattgaaaccaacagagaaaatgacaagcaagaaacatggatgctgatggagctgcagaagattcgcaggcagatagagcactgcgagggcaggatgactctcaaaaacctccctctagcagaccaggggtcttctcaccacatcacagtgaaaattaacgagcttaagagtgtgcagaatgattcacaagcaattgctgaggttctcaaccagcttaaagatatgcttgccaacttcagaggttctgaaaagtactgctatttacagaatgaagtatttggactatttcagaaactggaaaatatcaatggtgttacagatggctacttaaatagcttatgcacagtaagggcactgctccaggctattctccaaacagaagacatgttaaaggtttatgaagccaggctcactgaggaggaaactgtctgcctggacctggataaagtggaagcttaccgctgtggactgaagaaaataaaaaatgacttgaacttgaagaagtcgttgttggccactatgaagacagaactacagaaagcccagcagatccactctcagacttcacagcagtatccactttatgatctggacttgggcaagttcggtgaaaaagtcacacagctgacagaccgctggcaaaggatagataaacagatcgactttagattatgggacctggagaaacaaatcaagcaattgaggaattatcgtgataactatcaggctttctgcaagtggctctatgatcgtaaacgccgccaggattccttagaatccatgaaatttggagattccaacacagtcatgcggtttttgaatgagcagaagaacttgcacagtgaaatatctggcaaacgagacaaatcagaggaagtacaaaaaattgctgaactttgcgccaattcaattaaggattatgagctccagctggcctcatacacctcaggactggaaactctgctgaacatacctatcaagaggaccatgattcagtccccttctggggtgattctgcaagaggctgcagatgttcatgctcggtacattgaactacttacaagatctggagactattacaggttcttaagtgagatgctgaagagtttggaagatctgaagctgaaaaataccaagatcgaagttttggaagaggagctcagactggcccgagatgccaactcggaaaactgtaataagaacaaattcctggatcagaacctgcagaaataccaggcagagtgttcccagttcaaagcgaagcttgcgagcctggaggagctgaagagacaggctgagctggatgggaagtcggctaagcaaaatctagacaagtgctacggccaaataaaagaactcaatgagaagatcacccgactgacttatgagattgaagatgaaaagagaagaagaaaatctgtggaagacagatttgaccaacagaagaatgactatgaccaactgcagaaagcaaggcaatgtgaaaaggagaaccttggttggcagaaattagagtctgagaaagccatcaaggagaaggagtacgagattgaaaggttgagggttctactgcaggaagaaggcacccggaagagagaatatgaaaatgagctggcaaaggtaagaaaccactataatgaggagatgagtaatttaaggaacaagtatgaaacagagattaacattacgaagaccaccatcaaggagatatccatgcaaaaagaggatgattccaaaaatcttagaaaccagcttgatagactttcaagggaaaatcgagatctgaaggatgaaattgtcaggctcaatgacagcatcttgcaggccactgagcagcgaaggcgagctgaagaaaacgcccttcagcaaaaggcctgtggctctgagataatgcagaagaagcagcatctggagatagaactgaagcaggtcatgcagcagcgctctgaggacaatgcccggcacaagcagtccctggaggaggctgccaagaccattcaggacaaaaataaggagatcgagagactcaaagctgagtttcaggaggaggccaagcgccgctgggaatatgaaaatgaactgagtaaggtaagaaacaattatgatgaggagatcattagcttaaaaaatcagtttgagaccgagatcaacatcaccaagaccaccatccaccagctcaccatgcagaaggaagaggataccagtggctaccgggctcagatagacaatctcacccgagaaaacaggagcttatctgaagaaataaagaggctgaagaacactctaacccagaccacagagaatctcaggagggtggaagaagacatccaacagcaaaaggccactggctctgaggtgtctcagaggaaacagcagctggaggttgagctgagacaagtcactcagatgcgaacagaggagagcgtaagatataagcaatctcttgatgatgctgccaaaaccatccaggataaaaacaaggagatagaaaggttaaaacaactgatcgacaaagaaacaaatgaccggaaatgcctggaagatgaaaacgcgagattacaaagggtccagtatgacctgcagaaagcaaacagtagtgcgacggagacaataaacaaactgaaggttcaggagcaagaactgacacgcctgaggatcgactatgaaagggtttcccaggagaggactgtgaaggaccaggatatcacgcggttccagaactctctgaaagagctgcagctgcagaagcagaaggtggaagaggagctgaatcggctgaagaggaccgcgtcagaagactcctgcaagaggaagaagctggaggaagagctggaaggcatgaggaggtcgctgaaggagcaagccatcaaaatcaccaacctgacccagcagctggagcaggcatccattgttaagaagaggagtgaggatgacctccggcagcagagggacgtgctggatggccacctgagggaaaagcagaggacccaggaagagctgaggaggctctcttctgaggtcgaggccctgaggcggcagttactccaggaacaggaaagtgtcaaacaagctcacttgaggaatgagcatttccagaaggcgatagaagataaaagcagaagcttaaatgaaagcaaaatagaaattgagaggctgcagtctctcacagagaacctgaccaaggagcacttgatgttagaagaagaactgcggaacctgaggctggagtacgatgacctgaggagaggacgaagcgaagcggacagtgataaaaatgcaaccatcttggaactaaggagccagctgcagatcagcaacaaccggaccctggaactgcaggggctgattaatgatttacagagagagagggaaaatttgagacaggaaattgagaaattccaaaagcaggctttagaggcatctaataggattcaggaatcaaagaatcagtgtactcaggtggtacaggaaagagagagccttctggtgaaaatcaaagtcctggagcaagacaaggcaaggctgcagaggctggaggatgagctgaatcgtgcaaaatcaactctagaggcagaaaccagggtgaaacagcgcctggagtgtgagaaacagcaaattcagaatgacctgaatcagtggaagactcaatattcccgcaaggaggaggctattaggaagatagaatcggaaagagaaaagagtgagagagagaagaacagtcttaggagtgagatcgaaagactccaagcagagatcaagagaattgaagagaggtgcaggcgtaagctggaggattctaccagggagacacagtcacagttagaaacagaacgctcccgatatcagagggagattgataaactcagacagcgcccatatgggtcccatcgagagacccagactgagtgtgagtggaccgttgacacctccaagctggtgtttgatgggctgaggaagaaggtgacagcaatgcagctctatgagtgtcagctgatcgacaaaacaaccttggacaaactattgaaggggaagaagtcagtggaagaagttgcttctgaaatccagccattccttcggggtgcaggatctatcgctggagcatctgcttctcctaaggaaaaatactctttggtagaggccaagagaaagaaattaatcagcccagaatccacagtcatgcttctggaggcccaggcagctacaggtggtataattgatccccatcggaatgagaagctgactgtcgacagtgccatagctcgggacctcattgacttcgatgaccgtcagcagatatatgcagcagaaaaagctatcactggttttgatgatccattttcaggcaagacagtatctgtttcagaagccatcaagaaaaatttgattgatagagaaaccggaatgcgcctgctggaagcccagattgcttcagggggtgtagtagaccctgtgaacagtgtctttttgccaaaagatgtcgccttggcccgggggctgattgatagagatttgtatcgatccctgaatgatccccgagatagtcagaaaaactttgtggatccagtcaccaaaaagaaggtcagttacgtgcagctgaaggaacggtgcagaatcgaaccacatactggtctgctcttgctttcagtacagaagagaagcatgtccttccaaggaatcagacaacctgtgaccgtcactgagctagtagattctggtatattgagaccgtccactgtcaatgaactggaatctggtcagatttcttatgacgaggttggtgagagaattaaggacttcctccagggttcaagctgcatagcaggcatatacaatgagaccacaaaacagaagcttggcatttatgaggccatgaaaattggcttagtccgacctggtactgctctggagttgctggaagcccaagcagctactggctttatagtggatcctgttagcaacttgaggttaccagtggaggaagcctacaagagaggtctggtgggcattgagttcaaagagaagctcctgtctgcagaacgagctgtcactgggtataatgatcctgaaacaggaaacatcatctctttgttccaagccatgaataaggaactcatcgaaaagggccacggtattcgcttattagaagcacagatcgcaaccggggggatcattgacccaaaggagagccatcgtttaccagttgacatagcatataagaggggctatttcaatgaggaactcagtgagattctctcagatccaagtgatgataccaaaggattttttgaccccaacactgaagaaaatcttacctatctgcaactaaaagaaagatgcattaaggatgaggaaacagggctctgtcttctgcctctgaaagaaaagaagaaacaggtgcagacatcacaaaagaataccctcaggaagcgtagagtggtcatagttgacccagaaaccaataaagaaatgtctgttcaggaggcctacaagaagggcctaattgattatgaaaccttcaaagaactgtgtgagcaggaatgtgaatgggaagaaataaccatcacgggatcagatggctccaccagggtggtcctggtagatagaaagacaggcagtcagtatgatattcaagatgctattgacaagggccttgttgacaggaagttctttgatcagtaccgatccggcagcctcagcctcactcaatttgctgacatgatctccttgaaaaatggtgtcggcaccagcagcagcatgggcagtggtgtcagcgatgatgtttttagcagctcccgacatgaatcagtaagtaagatttccaccatatccagcgtcaggaatttaaccataaggagcagctctttttcagacaccctggaagaatcgagccccattgcagccatctttgacacagaaaacctggagaaaatctccattacagaaggtatagagcggggcatcgttgacagcatcacgggtcagaggcttctggaggctcaggcctgcacaggtggcatcatccacccaaccacgggccagaagctgtcacttcaggacgcagtctcccagggtgtgattgaccaagacatggccaccaggctgaagcctgctcagaaagccttcataggcttcgagggtgtgaagggaaagaagaagatgtcagcagcagaggcagtgaaagaaaaatggctcccgtatgaggctggccagcgcttcctggagttccagtacctcacgggaggtcttgttgacccggaagtgcatgggaggataagcaccgaagaagccatccggaaggggttcatagatggccgcgccgcacagaggctgcaagacaccagcagctatgccaaaatcctgacctgccccaaaaccaaattaaaaatatcctataaggatgccataaatcgctccatggtagaagatatcactgggctgcgccttctggaagccgcctccgtgtcgtccaagggcttacccagcccttacaacatgtcttcggctccggggtcccgctccggctcccgctcgggatctcgctccggatctcgctccgggtcccgcagtgggtcccggagaggaagctttgacgccacagggaattcttcctactcttattcctactcatttagcagtagttctattgggcactagtagtcagttgggagtggttgctataccttgacttcatttatatgaatttccactttattaaataatagaaaagaaaatcccggtgcttgcagtagagtgataggacattctatgcttacagaaaatatagccatgattgaaatcaaatagtaaaggctgttctggctttttatcttcttagctcatcttaaataagcagtacacttggatgcagtgcgtctgaagtgctaatcagttgtaacaatagcacaaatcgaacttaggatttgtttcttctcttctgtgtttcgatttttgatcaattctttaattttggaagcctataatacagttttctattcttggagataaaaattaaatggatcactgatattttagtcattctgcttctcatctaaatatttccatattctgtattaggagaaaattaccctcccagcaccagcccccctctcaaacccccaacccaaaaccaagcattttggaatgagtctcctttagtttcagagtgtggattgtataacccatatactcttcgatgtacttgtttggtttggtattaatttgactgtgcatgacagcggcaatcttttctttggtcaaagttttctgtttattttgcttgtcatattcgatgtactttaaggtgtctttatgaagtttgctattctggcaataaacttttagacttttg

SEQ ID NO: 68132 - DNA, 459 bp, Homo sapiens
tttacctgagaccatagcttctcatcctcatttcttcttctggctttttggggcttacttttgtccacctgagcccctgaccaactttctccttcatttctctaagacctagggaatcctaaatgatgtctttaaactttaagacaattttctaacacgtgagtctttaagtgaccctgatctgggctttcctttgtggagacggtgctgccaggccagcaagggtttgctttccaaccgcctaggaaaaagtccccatgggtgaaatatctcatagagctagtaattctttctttctatggagggatctgaggccagtatctgaagaaaaggaggcttagaagggccactcttttctatacaatccacaaggggatttatatctacctgctttttgttgtcttctagcgcgagaaatctgcgatctaccagttggaggaggagtatgaaaacctgctg

SEQ ID NO: 68133 - DNA, 4124 bp, Homo sapiens
cccacctgtcctccccgtacgagcccgaagcgaagcggacagtgataaaaatgcaaccatcttggaactaaggagccagctgcagatcagcaacaaccggaccctggaactgcaggggctgattaatgatttacagagagagagggaaaatttgagacaggaaattgagaaattccaaaagcaggctttagaggcatctaataggattcaggaatcaaagaatcagtgtactcaggtggtacaggaaagagagagccttctggtgaaaatcaaagtcctggagcaagacaaggcaaggctgcagaggctggaggatgagctgaatcgtgcaaaatcaactctagaggcagaaaccagggtgaaacagcgcctggagtgtgagaaacagcaaattcagaatgacctgaatcagtggaagactcaatattcccgcaaggaggaggctattaggaagatagaatcggaaagagaaaagagtgagagagagaagaacagtcttaggagtgagatcgaaagactccaagcagagatcaagagaattgaagagaggtgcaggcgtaagctggaggattctaccagggagacacagtcacagttagaaacagaacgctcccgatatcagagggagattgataaactcagacagcgcccatatgggtcccatcgagagacccagactgagtgtgagtggaccgttgacacctccaagctggtgtttgatgggctgaggaagaaggtgacagcaatgcagctctatgagtgtcagctgatcgacaaaacaaccttggacaaactattgaaggggaagaagtcagtggaagaagttgcttctgaaatccagccattccttcggggtgcaggatctatcgctggagcatctgcttctcctaaggaaaaatactctttggtagaggccaagagaaagaaattaatcagcccagaatccacagtcatgcttctggaggcccaggcagctacaggtggtataattgatccccatcggaatgagaagctgactgtcgacagtgccatagctcgggacctcattgacttcgatgaccgtcagcagatatatgcagcagaaaaagctatcactggttttgatgatccattttcaggcaagacagtatctgtttcagaagccatcaagaaaaatttgattgatagagaaaccggaatgcgcctgctggaagcccagattgcttcagggggtgtagtagaccctgtgaacagtgtctttttgccaaaagatgtcgccttggcccgggggctgattgatagagatttgtatcgatccctgaatgatccccgagatagtcagaaaaactttgtggatccagtcaccaaaaagaaggtcagttacgtgcagctgaaggaacggtgcagaatcgaaccacatactggtctgctcttgctttcagtacagaagagaagcatgtccttccaaggaatcagacaacctgtgaccgtcactgagctagtagattctggtatattgagaccgtccactgtcaatgaactggaatctggtcagatttcttatgacgaggttggtgagagaattaaggacttcctccagggttcaagctgcatagcaggcatatacaatgagaccacaaaacagaagcttggcatttatgaggccatgaaaattggcttagtccgacctggtactgctctggagttgctggaagcccaagcagctactggctttatagtggatcctgttagcaacttgaggttaccagtggaggaagcctacaagagaggtctggtgggcattgagttcaaagagaagctcctgtctgcagaacgagctgtcactgggtataatgatcctgaaacaggaaacatcatctctttgttccaagccatgaataaggaactcatcgaaaagggccacggtattcgcttattagaagcacagatcgcaaccggggggatcattgacccaaaggagagccatcgtttaccagttgacatagcatataagaggggctatttcaatgaggaactcagtgagattctctcagatccaagtgatgataccaaaggattttttgaccccaacactgaagaaaatcttacctatctgcaactaaaagaaagatgcattaaggatgaggaaacagggctctgtcttctgcctctgaaagaaaagaagaaacaggtgcagacatcacaaaagaataccctcaggaagcgtagagtggtcatagttgacccagaaaccaataaagaaatgtctgttcaggaggcctacaagaagggcctaattgattatgaaaccttcaaagaactgtgtgagcaggaatgtgaatgggaagaaataaccatcacgggatcagatggctccaccagggtggtcctggtagatagaaagacaggcagtcagtatgatattcaagatgctattgacaagggccttgttgacaggaagttctttgatcagtaccgatccggcagcctcagcctcactcaatttgctgacatgatctccttgaaaaatggtgtcggcaccagcagcagcatgggcagtggtgtcagcgatgatgtttttagcagctcccgacatgaatcagtaagtaagatttccaccatatccagcgtcaggaatttaaccataaggagcagctctttttcagacaccctggaagaatcgagccccattgcagccatctttgacacagaaaacctggagaaaatctccattacagaaggtatagagcggggcatcgttgacagcatcacgggtcagaggcttctggaggctcaggcctgcacaggtggcatcatccacccaaccacgggccagaagctgtcacttcaggacgcagtctcccagggtgtgattgaccaagacatggccaccaggctgaagcctgctcagaaagccttcataggcttcgagggtgtgaagggaaagaagaagatgtcagcagcagaggcagtgaaagaaaaatggctcccgtatgaggctggccagcgcttcctggagttccagtacctcacgggaggtcttgttgacccggaagtgcatgggaggataagcaccgaagaagccatccggaaggggttcatagatggccgcgccgcacagaggctgcaagacaccagcagctatgccaaaatcctgacctgccccaaaaccaaattaaaaatatcctataaggatgccataaatcgctccatggtagaagatatcactgggctgcgccttctggaagccgcctccgtgtcgtccaagggcttacccagcccttacaacatgtcttcggctccggggtcccgctccggctcccgctcgggatctcgctccggatctcgctccgggtcccgcagtgggtcccggagaggaagctttgacgccacagggaattcttcctactcttattcctactcatttagcagtagttctattgggcactagtagtcagttgggagtggttgctataccttgacttcatttatatgaatttccactttattaaataatagaaaagaaaatcccggtgcttgcagtagagtgataggacattctatgcttacagaaaatatagccatgattgaaatcaaatagtaaaggctgttctggctttttatcttcttagctcatcttaaataagcagtacacttggatgcagtgcgtctgaagtgctaatcagttgtaacaatagcacaaatcgaacttaggatttgtttcttctcttctgtgtttcgatttttgatcaattctttaattttggaagcctataatacagttttctattcttggagataaaaattaaatggatcactgatattttagtcattctgcttctcatctaaatatttccatattctgtattaggagaaaattaccctcccagcaccagcccccctctcaaacccccaacccaaaaccaagcattttggaatgagtctcctttagtttcagagtgtggattgtataacccatatactcttcgatgtacttgtttggtttggtattaatttgactgtgcatgacagcggcaatcttttctttggtcaaagttttctgtttattttgcttgtcatattcgatgtactttaaggtgtctttatgaagtttgctattctggcaataaacttttagacttttg

SEQ ID NO: 68134 - DNA, 7498 bp, Homo sapiens
acaatatttaaaggtctacatggtcactataaaacattaaattgcatcattctctaatggtagcaaaaaagatccaatggaaagtaaatgaatatcagcaatttagtggtagaaagacagaaatgcacgaaaagaacatgtcaaaagtaaagataactttattcaaactactggattatgggtctatcaattatttaaatttatacagggctataattaataaaaatcattaatcctatttggtacaaaaatgttaactatcatgctgttaaattacattcacctagaaaaatatataccattttattatgtaaaaataagttcattacattttattatgtaaaaaagcatttatattacctgttatatttaacatctcaaaaaactatttgctttggactatgaatgaacattcatttacataattcatcaagcaattattaagtggggctatagcaaggtgttacagatggctacttaaatagcttatgcacagtaagggcactgctccaggctattctccaaacagaagacatgttaaaggtttatgaagccaggctcactgaggaggaaactgtctgcctggacctggataaagtggaagcttaccgctgtggactgaagaaaataaaaaatgacttgaacttgaagaagtcgttgttggccactatgaagacagaactacagaaagcccagcagatccactctcagacttcacagcagtatccactttatgatctggacttgggcaagttcggtgaaaaagtcacacagctgacagaccgctggcaaaggatagataaacagatcgactttagattatgggacctggagaaacaaatcaagcaattgaggaattatcgtgataactatcaggctttctgcaagtggctctatgatcgtaaacgccgccaggattccttagaatccatgaaatttggagattccaacacagtcatgcggtttttgaatgagcagaagaacttgcacagtgaaatatctggcaaacgagacaaatcagaggaagtacaaaaaattgctgaactttgcgccaattcaattaaggattatgagctccagctggcctcatacacctcaggactggaaactctgctgaacatacctatcaagaggaccatgattcagtccccttctggggtgattctgcaagaggctgcagatgttcatgctcggtacattgaactacttacaagatctggagactattacaggttcttaagtgagatgctgaagagtttggaagatctgaagctgaaaaataccaagatcgaagttttggaagaggagctcagactggcccgagatgccaactcggaaaactgtaataagaacaaattcctggatcagaacctgcagaaataccaggcagagtgttcccagttcaaagcgaagcttgcgagcctggaggagctgaagagacaggctgagctggatgggaagtcggctaagcaaaatctagacaagtgctacggccaaataaaagaactcaatgagaagatcacccgactgacttatgagattgaagatgaaaagagaagaagaaaatctgtggaagacagatttgaccaacagaagaatgactatgaccaactgcagaaagcaaggcaatgtgaaaaggagaaccttggttggcagaaattagagtctgagaaagccatcaaggagaaggagtacgagattgaaaggttgagggttctactgcaggaagaaggcacccggaagagagaatatgaaaatgagctggcaaaggtaagaaaccactataatgaggagatgagtaatttaaggaacaagtatgaaacagagattaacattacgaagaccaccatcaaggagatatccatgcaaaaagaggatgattccaaaaatcttagaaaccagcttgatagactttcaagggaaaatcgagatctgaaggatgaaattgtcaggctcaatgacagcatcttgcaggccactgagcagcgaaggcgagctgaagaaaacgcccttcagcaaaaggcctgtggctctgagataatgcagaagaagcagcatctggagatagaactgaagcaggtcatgcagcagcgctctgaggacaatgcccggcacaagcagtccctggaggaggctgccaagaccattcaggacaaaaataaggagatcgagagactcaaagctgagtttcaggaggaggccaagcgccgctgggaatatgaaaatgaactgagtaaggtaagaaacaattatgatgaggagatcattagcttaaaaaatcagtttgagaccgagatcaacatcaccaagaccaccatccaccagctcaccatgcagaaggaagaggataccagtggctaccgggctcagatagacaatctcacccgagaaaacaggagcttatctgaagaaataaagaggctgaagaacactctaacccagaccacagagaatctcaggagggtggaagaagacatccaacagcaaaaggccactggctctgaggtgtctcagaggaaacagcagctggaggttgagctgagacaagtcactcagatgcgaacagaggagagcgtaagatataagcaatctcttgatgatgctgccaaaaccatccaggataaaaacaaggagatagaaaggttaaaacaactgatcgacaaagaaacaaatgaccggaaatgcctggaagatgaaaacgcgagattacaaagggtccagtatgacctgcagaaagcaaacagtagtgcgacggagacaataaacaaactgaaggttcaggagcaagaactgacacgcctgaggatcgactatgaaagggtttcccaggagaggactgtgaaggaccaggatatcacgcggttccagaactctctgaaagagctgcagctgcagaagcagaaggtggaagaggagctgaatcggctgaagaggaccgcgtcagaagactcctgcaagaggaagaagctggaggaagagctggaaggcatgaggaggtcgctgaaggagcaagccatcaaaatcaccaacctgacccagcagctggagcaggcatccattgttaagaagaggagtgaggatgacctccggcagcagagggacgtgctggatggccacctgagggaaaagcagaggacccaggaagagctgaggaggctctcttctgaggtcgaggccctgaggcggcagttactccaggaacaggaaagtgtcaaacaagctcacttgaggaatgagcatttccagaaggcgatagaagataaaagcagaagcttaaatgaaagcaaaatagaaattgagaggctgcagtctctcacagagaacctgaccaaggagcacttgatgttagaagaagaactgcggaacctgaggctggagtacgatgacctgaggagaggacgaagcgaagcggacagtgataaaaatgcaaccatcttggaactaaggagccagctgcagatcagcaacaaccggaccctggaactgcaggggctgattaatgatttacagagagagagggaaaatttgagacaggaaattgagaaattccaaaagcaggctttagaggcatctaataggattcaggaatcaaagaatcagtgtactcaggtggtacaggaaagagagagccttctggtgaaaatcaaagtcctggagcaagacaaggcaaggctgcagaggctggaggatgagctgaatcgtgcaaaatcaactctagaggcagaaaccagggtgaaacagcgcctggagtgtgagaaacagcaaattcagaatgacctgaatcagtggaagactcaatattcccgcaaggaggaggctattaggaagatagaatcggaaagagaaaagagtgagagagagaagaacagtcttaggagtgagatcgaaagactccaagcagagatcaagagaattgaagagaggtgcaggcgtaagctggaggattctaccagggagacacagtcacagttagaaacagaacgctcccgatatcagagggagattgataaactcagacagcgcccatatgggtcccatcgagagacccagactgagtgtgagtggaccgttgacacctccaagctggtgtttgatgggctgaggaagaaggtgacagcaatgcagctctatgagtgtcagctgatcgacaaaacaaccttggacaaactattgaaggggaagaagtcagtggaagaagttgcttctgaaatccagccattccttcggggtgcaggatctatcgctggagcatctgcttctcctaaggaaaaatactctttggtagaggccaagagaaagaaattaatcagcccagaatccacagtcatgcttctggaggcccaggcagctacaggtggtataattgatccccatcggaatgagaagctgactgtcgacagtgccatagctcgggacctcattgacttcgatgaccgtcagcagatatatgcagcagaaaaagctatcactggttttgatgatccattttcaggcaagacagtatctgtttcagaagccatcaagaaaaatttgattgatagagaaaccggaatgcgcctgctggaagcccagattgcttcagggggtgtagtagaccctgtgaacagtgtctttttgccaaaagatgtcgccttggcccgggggctgattgatagagatttgtatcgatccctgaatgatccccgagatagtcagaaaaactttgtggatccagtcaccaaaaagaaggtcagttacgtgcagctgaaggaacggtgcagaatcgaaccacatactggtctgctcttgctttcagtacagaagagaagcatgtccttccaaggaatcagacaacctgtgaccgtcactgagctagtagattctggtatattgagaccgtccactgtcaatgaactggaatctggtcagatttcttatgacgaggttggtgagagaattaaggacttcctccagggttcaagctgcatagcaggcatatacaatgagaccacaaaacagaagcttggcatttatgaggccatgaaaattggcttagtccgacctggtactgctctggagttgctggaagcccaagcagctactggctttatagtggatcctgttagcaacttgaggttaccagtggaggaagcctacaagagaggtctggtgggcattgagttcaaagagaagctcctgtctgcagaacgagctgtcactgggtataatgatcctgaaacaggaaacatcatctctttgttccaagccatgaataaggaactcatcgaaaagggccacggtattcgcttattagaagcacagatcgcaaccggggggatcattgacccaaaggagagccatcgtttaccagttgacatagcatataagaggggctatttcaatgaggaactcagtgagattctctcagatccaagtgatgataccaaaggattttttgaccccaacactgaagaaaatcttacctatctgcaactaaaagaaagatgcattaaggatgaggaaacagggctctgtcttctgcctctgaaagaaaagaagaaacaggtgcagacatcacaaaagaataccctcaggaagcgtagagtggtcatagttgacccagaaaccaataaagaaatgtctgttcaggaggcctacaagaagggcctaattgattatgaaaccttcaaagaactgtgtgagcaggaatgtgaatgggaagaaataaccatcacgggatcagatggctccaccagggtggtcctggtagatagaaagacaggcagtcagtatgatattcaagatgctattgacaagggccttgttgacaggaagttctttgatcagtaccgatccggcagcctcagcctcactcaatttgctgacatgatctccttgaaaaatggtgtcggcaccagcagcagcatgggcagtggtgtcagcgatgatgtttttagcagctcccgacatgaatcagtaagtaagatttccaccatatccagcgtcaggaatttaaccataaggagcagctctttttcagacaccctggaagaatcgagccccattgcagccatctttgacacagaaaacctggagaaaatctccattacagaaggtatagagcggggcatcgttgacagcatcacgggtcagaggcttctggaggctcaggcctgcacaggtggcatcatccacccaaccacgggccagaagctgtcacttcaggacgcagtctcccagggtgtgattgaccaagacatggccaccaggctgaagcctgctcagaaagccttcataggcttcgagggtgtgaagggaaagaagaagatgtcagcagcagaggcagtgaaagaaaaatggctcccgtatgaggctggccagcgcttcctggagttccagtacctcacgggaggtcttgttgacccggaagtgcatgggaggataagcaccgaagaagccatccggaaggggttcatagatggccgcgccgcacagaggctgcaagacaccagcagctatgccaaaatcctgacctgccccaaaaccaaattaaaaatatcctataaggatgccataaatcgctccatggtagaagatatcactgggctgcgccttctggaagccgcctccgtgtcgtccaagggcttacccagcccttacaacatgtcttcggctccggggtcccgctccggctcccgctcgggatctcgctccggatctcgctccgggtcccgcagtgggtcccggagaggaagctttgacgccacagggaattcttcctactcttattcctactcatttagcagtagttctattgggcactagtagtcagttgggagtggttgctataccttgacttcatttatatgaatttccactttattaaataatagaaaagaaaatcccggtgcttgcagtagagtgataggacattctatgcttacagaaaatatagccatgattgaaatcaaatagtaaaggctgttctggctttttatcttcttagctcatcttaaataagcagtacacttggatgcagtgcgtctgaagtgctaatcagttgtaacaatagcacaaatcgaacttaggatttgtttcttctcttctgtgtttcgatttttgatcaattctttaattttggaagcctataatacagttttctattcttggagataaaaattaaatggatcactgatattttagtcattctgcttctcatctaaatatttccatattctgtattaggagaaaattaccctcccagcaccagcccccctctcaaacccccaacccaaaaccaagcattttggaatgagtctcctttagtttcagagtgtggattgtataacccatatactcttcgatgtacttgtttggtttggtattaatttgactgtgcatgacagcggcaatcttttctttggtcaaagttttctgtttattttgcttgtcatattcgatgtactttaaggtgtctttatgaagtttgctattctggcaataaacttttagacttttg

SEQ ID NO: 68135 - DNA, 1150 bp, Homo sapiens
acttaaatataaaacctaaaagtattaaattcctagaagaaaacccaggaaatgccattctggacataagtgctggaaaagacttaatgatgaacaccccaaagcaattgcaacaaaaacaaaaattgacaagtgggacctaattaaactaaataacttctgcacagcaaaagaagctatttgcagactacagaatgggagaaaatgtttacaaactgcatctgacaaagatctaatccagaatctataaagaactcaaacaaatcaacaatgagaaaaacaaccccattaaaaactgggcaaaggccatgaatagacctttctcaaaagaatacatacatgtggcaataagcatatgaaaaaaatggttaatatcgctaatcattaaggaaatgcaatcaaagccacaatgagataccatctcagacctgtctgaatgggtattatcagaatgggtattattaaaaaatcaaaacatagatgctagtgaggctgcagagaaaagcaaatacttatacactgctggtgggaatgtaaattaattcagccattgtggaaagcactgcagcgatttctcaaagacataaaagcacatagcattcaacccagcatcccattactgggtgtatacctaaaggaatataatcattccaccataaagacaaacacttgtatgttcattgcagcactattctcaatagcaaagatgtggaatcaacgtaaatgcccatcagcagtagaccagataaagaaaatttggtacatatacaccatggaatactatgcagccataaaaaagaacaagactgtgtcctttacagcaacatagatggagctgaggctcttatcctaagtgaattaatgcaggaacagaaaatgaaatatcccatgttctcacttataagtgggagctaaacattgattacacatggactcaaagaagggaacagtagacacgggcttatgggtggaggttgggaagaggatgaagattgaataactgcctgttgggtactatgctgattacctggggacaaaattaactgtacaccaaactcctgcaacatgcagttgacccatgtacacatactccttgaacctaaaataaaacatgaaaaaaagcaaatttcacaccttgtaaaacatcaag

SEQ ID NO: 68136 - DNA, 494 bp, Homo sapiens
ctcccaaactgctgggattataggcgtgagccactccactccgggccatacgtcttttctaaatgctcccaaaccactgtttaacaacatcctaaagactttctaggccatgagaggtatcatgttctggaattcgcctttttgaaaatcagtgtcttcactgttctcacacgtctactataaataaggggagtaatttaattcctattatatgtatgtgtatgtatatgtacatatatgtgtatttttatatgtgtgtatatgtatctataggtatatatatttatgtatagcagtaattacctgtttaatgaatgaatggtgatgatttaaatgtaaagggaatgatgccagaggttatgaaaaaaagctgccttcaaaatatgaaatagagaaagaatagagaaatgcatgccaagctctaaataatttattgtaatttacttggttcttggttttctaaaatggaaataaagagataatattgagcttaa

SEQ ID NO: 68137 - DNA, 334 bp, Homo sapiens
agcaactgaaatgctgtaaggctggaattgcattcttgcaattgccagtgacctgattcaggatacattcccttgatctagatcatatgacttatttcttgaccaacctgttagaaatttccactctggtgattttcctccagtatgtaccactgggtatctgttactatactctgtacatttgtcttttgcttatcaggaggctattatcatacctaaaatctgtgtttgtcccctatttcacttgagtgcctgacactttcagatgaaaaagtcttggttcctcttagtattcctttgtttccactggagttaagggtcagtaatgagaatg

SEQ ID NO: 68138 - DNA, 415 bp, Homo sapiens
gataattgttgatctgcttcaatctgtgtctccctgctccaatccgtgtctctctgtgggcccttgctcagagatgccatgtggtgtctgaacttgaccagactccctgagggcagccaccagtttcttcagaggcagcagctgtgggattgagccccagaagtgagtttacactcccttttccagggcttaggatctctgcttctcttccctctgtgataaagccaatttcaacttcagggtcaggtaatcacttgacacgtctatcaaggaaaagcaataaaaccctaaacaattttgcattagatcagactagctctgtcttctctcccagggaaaggctgccacctgctgtaaaacatcagcactgggcttttccaaggtcactgaacaaccacttcctcccatacaaaat

SEQ ID NO: 68139 - DNA, 538 bp, Homo sapiens
aaacacatcatcactccatttaccagattagcttgaagaaagcagggtttgaaaggcagaggacctggggcaagaagtaggattgaaataaaaggatgctcggggctgcagtgaggttagagtgagcgttatcatagtttggaaatctggcattgaatacctgaattttacttgctattctgtttctcagcaactatatgacttggcttagtcagtgctcctctcacagctcagttttcttttctgtaagatacaggggtcctgggcagggagggaatagttgtccttcagggtagtggttcttgaacctggcctcagaatcactttggagaactgatttaaaatggctgccccatttcttctctgaatattctgattcaaatggactgcagtaggcccagaaatctttatttgttgttcgtcttatttttaatgtaaattagttattttaaaattgctaactgcatgcattaggttaagaattctaaaataaataagtaaataaaagtacatatatatgggaagatttccttccaat

SEQ ID NO: 68140 - DNA, 287 bp, Homo sapiens
tcacatgtaatacaactgaattgtaataattaggaacagaagcataatagctatgacaatgctgaacaaagctatattaataaatgagttactaaaaagaagccaaaatcctatttaagaaatcatatttatcacaatcaagtaggaattacagaattggcatcatactagttgagtgaagcagaaaagttcataaaacttttgcatgattcccagggccaccatggaaggttgtgcaggttgtacactacactaatctagggcatgccatttgcatcaagtgtttt

SEQ ID NO: 68141 - DNA, 382 bp, Homo sapiens
  misc_feature (48)..(48): n is a, c, g, or t
  misc_feature (70)..(70): n is a, c, g, or t
  misc_feature (72)..(72): n is a, c, g, or t
cgacgcccctccggcagagaccaccgcgtcgctggggccagaggggcnggtggtctctcgccccagcagncngacgcggcccgcggggacgtcgctgtccgtcctgctcgccctgtgccctctcactgacttctcccgggtcgtgtcttttaaaaactcctgttttcacaccttacaaagccagctctgagcagacagggcgtcctctcgtagaacctgcgcaccccgttcccagcgcatggcgccccgggccgcgagcttagcttagaccgtggtgtcctctgtccgtctgtcctgcgcctgcgcctcctcctgcatgtcggggcccctgcgtgtgttctctccggatggaatcacagccaataaacaccagtgatttcac

SEQ ID NO: 68142 - DNA, 747 bp, Homo sapiens
ggcacgagggtgacgcgccctcctcgcggtgcccttcagccgccgccgcagctcaccgggcgccacatggacccagccggcccgagcgcgccccgccgctgaccgcccgcgccccgggaaggaagaacactcgctcccggccatacttgcgtgtgagttctgacccctggaggagccactgtggaagcagagcaatcgccatggagtttgtgatgaagcaggctctaggaggggccaccaaggacatggggaagatgctggggggtgacgaggagaaggaccgccgcctccctcacccggcaaggggcgcgcgcccccaggacccccccagtccgccccgtgctcctctgcccgcgggtggctggagccccatcgcctgggacgcccctttctcttgctgtttaccgcccacccagcagcgcccgaggccagggctcgaccgtagacgtggcagacccccggcgaaggcacctcctgttgcgacgcggttcagcgagctgtggttggggccgacactggtcggggaccacgtctgcctacagggtaggtcgaccagcttgcatatgacaacgaccgcggtgggcgtccttgccgtgtggccgcggggcagatggcggccgggcggggggcgcctggggggtccgctcccttcccttcgcaaccgcggtggacttcctggcggagttgcaggggttctcggctcgcggaccgattgagcgctatttgagacgttcccggcaccggccg

SEQ ID NO: 68143 - DNA, 307 bp, Homo sapiens
cccgggcaggagggtcagggccagatggaggggccaccaaggacatggggaagatgctggggggtgacgaggagaaggagttttgcttcttacgaacgccacggccgtgttcacttctaaactaaaggaaacaaagcaataggtttgggggacgcccagccccttcttctgttattgcttatttctaatattatggtgattatacttaatttttatcataaaaaacttggtggttgggtaaaaatcccaaggaatatctttgttctaaagatttgtttatttctacctattttagaatcttttgtga

SEQ ID NO: 68144 - DNA, 1845 bp, Homo sapiens
tctcaaggaagatgggagcctccccctccctgctcccccccatgtcagctcctggcccccattctccgtgggggcttcccattcctccagggaccccccgggtacggcatcaagaagaaggaggagcgcgaggccgaggcccaggccgccatggaggccaactccgaggggagcttgacgcggcccaagaaggccatcccgccgggctgcggggacgaggtggaggaggaggacgagagcatcctggacaccgtcatcaagtacctgcccgggccgctgcaggacatgctcaagaagtagccccgcgcgggacagcggccccgcggagcccccgcccctccccctacagatcctccgcggaggcccctgagggacgagcagagcgcagcccccacgccgatataagccatagccccaggcccgccctgcccgcgcccgccgcctccctcacccggcaaggggcgcgcgcccccaggacccccccagtccgccccgtgctcctctgcccgcgggtggctggagccccatcgcctgggacgcccctttctcttgctgtttaccgcccacccagcagcgcccgaggccagggccgccgaagggcagccccgcgaccacccctgtgcgcgcgttcgcggcggtgggcgcctgtcgggcccgcactcaggagcacagccatagcagacgggggggtgcgggcggggcgagggcggcggggcctgggtccccctcctgcacgcggactccggggttcggatcgctccgccgtgagtatttgcgtccgcacgcggccgctctccgccccccggcctggccccctcgcgcccctgtccatccgtctctgtccgcgtcctttcctctcctctctggaaggttttgcttcttacgaacgccacggccgtgttcacttctaaactaaaggaaacaaagcaataggtttgggggacgcccagcccccacccccgtcaccccgctcttcccaagtcctcgccccccgcccggcctcctagcctctccgcccacgcggctgctgcttctccctggggaggacccctgccctcggccattgaacactgcaccctccacaggagccgcagaggcccgaggcaccggacgctggagaccctgcgcccctgcccagcacctcctccgtgggcagctcctcgggtggggcctgcggggttccctgcgcgcagctggcgcgtgtgtggcctaatccacctggtggccctgcggggcggcatccgagcccctgtttctcctccattcatgtttaatttgcatcacaatttgttgaatctcaggtaaatgaggtctttgcatttaatgagttttatcttgacaggcgccgcctcgcccccgggccctttcgtccacatcaaaaatgcatcaagtctccacgtgtttcgggccagggcgtggcttggcattgaccttcatgaccttacatagctttagagaagccataacgttagactgcaatactaacgaccgacgcccctccgggcagagaccaccgcgcccctctgcgccccagcgacgcggcccgcggggacgtcgctgtccgtcctgctcgccctgtgccctctcactgacttctcccgggtcgtgtcttttaaaaactcctgttttcacaccttacaaagccagctctgagcagacagggcgtcctctcgtagaacctgcgcaccccgttcccagcgcatggcgccccgggccgcgagcttagcttagaccgtggtgtcctctgtccgtctgtcctgcgcctgcgcctcctcctgcatgtcggggcccctgcgtgtgttctctccggatggaatcacagccaataaacaccagtgatttcac

SEQ ID NO: 68145 - DNA, 1422 bp, Homo sapiens
ggcacgagggtgacgcgccctcctcgcggtgcccttcagccgccgccgcagctcaccgggcgccacatggacccagccggcccgagcgcgccccgccgctgaccgcccgcgccccgggaaggaagaacactcgctcccggccatacttgcgtgtgagttctgacccctggaggagccactgtggaagcagagcaatcgccatggagtttgtgatgaagcaggctctaggaggggccaccaaggacatggggaagatgctggggggtgacgaggagaaggacccagacgccgccaagaaggaggaggagcggcaggaggcgctgcgccaggcggaggaggagcgcaaggccaagtacgccaagatggaggcggagcgcgaggccgtgcgccagggcatccgagacaagtacggcatcaagaagaaggaggagcgcgaggccgaggcccaggccgccatggaggccaactccgaggggagcttgacgcggcccaagaaggccatcccgccgggctgcggggacgaggtggaggaggaggacgagagcatcctggacaccgtcatcaagtacctgcccggctcctagcctctccgcccacgcggctgctgcttctccctggggaggacccctgccctcggccattgaacactgcaccctccacaggagccgcagaggcccgaggcaccggacgctggagaccctgcgcccctgcccagcacctcctccgtgggcagctcctcgggtggggcctgcggggttccctgcgcgcagctggcgcgtgtgtggcctaatccacctggtggccctgcggggcggcatccgagcccctgtttctcctccattcatgtttaatttgcatcacaatttgttgaatctcaggtaaatgaggtctttgcatttaatgagttttatcttgacaggcgccgcctcgcccccgggccctttcgtccacatcaaaaatgcatcaagtctccacgtgtttcgggccagggcgtggcttggcattgaccttcatgaccttacatagctttagagaagccataacgttagactgcaatactaacgaccgacgcccctccgggcagagaccaccgcgcccctctgcgccccagcgacgcggcccgcggggacgtcgctgtccgtcctgctcgccctgtgccctctcactgacttctcccgggtcgtgtcttttaaaaactcctgttttcacaccttacaaagccagctctgagcagacagggcgtcctctcgtagaacctgcgcaccccgttcccagcgcatggcgccccgggccgcgagcttagcttagaccgtggtgtcctctgtccgtctgtcctgcgcctgcgcctcctcctgcatgtcggggcccctgcgtgtgttctctccggatggaatcacagccaataaacaccagtgatttcac

SEQ ID NO: 68146 - DNA, 1924 bp, Homo sapiens
ggcacgagggtgacgcgccctcctcgcggtgcccttcagccgccgccgcagctcaccgggcgccacatggacccagccggcccgagcgcgccccgccgctgaccgcccgcgccccgggaaggaagaacactcgctcccggccatacttgcgtgtgagttctgacccctggaggagccactgtggaagcagagcaatcgccatggagtttgtgatgaagcaggctctaggaggggccaccaaggacatggggaagatgctggggggtgacgaggagaaggacccagacgccgccaagaaggaggaggagcggcaggaggcgctgcgccaggcggaggaggagcgcaaggccaagtacgccaagatggaggcggagcgcgaggccgtgcgccagggcatccgagacaagtacggcatcaagaagaaggaggagcgcgaggccgaggcccaggccgccatggaggccaactccgaggggagcttgacgcggcccaagaaggccatcccgccgggctgcggggacgaggtggaggaggaggacgagagcatcctggacaccgtcatcaagtacctgcccgggccgctgcaggacatgctcaagaagtagccccgcgcgggacagcggccccgcggagcccccgcccctccccctacagatcctccgcggaggcccctgagggacgagcagagcgcagcccccacgccgatataagccatagccccaggcccgccctgcccgcgcccgccgcctccctcacccggcaaggggcgcgcgcccccaggacccccccagtccgccccgtgctcctctgcccgcgggtggctggagccccatcgcctgggacgcccctttctcttgctgtttaccgcccacccagcagcgcccgaggccagggccgccgaagggcagccccgcgaccacccctgtgcgcgcgttcgcggcggtgggcgcctgtcgggcccgcactcaggagcacagccatagcagacgggggggtgcgggcggggcgagggcggcggggcctgggtccccctcctgcacgcggactccggggttcggatcgctccgccgtgagtatttgcgtccgcacgcggccgctctccgccccccggcctggccccctcgcgcccctgtccatccgtctctgtccgcgtcctttcctctcctctctggaaggttttgcttcttacgaacgccacggccgtgttcacttctaaactaaaggaaacaaagcaataggtttgggggacgcccagcccccacccccgtcaccccgctcttcccaagtcctcgccccccgcccggcctcctagcctctccgcccacgcggctgctgcttctccctggggaggacccctgccctcggccattgaacactgcaccctccacaggagccgcagaggcccgaggcaccggacgctggagaccctgcgcccctgcccagcacctcctccgtgggcagctcctcgggtggggcctgcggggttccctgcgcgcagctggcgcgtgtgtggcctaatccacctggtggccctgcggggcggcatccgagcccctgtttctcctccattcatgtttaatttgcatcacaatttgttgaatctcaggtaaatgaggtctttgcatttaatgagttttatcttgacaggcgccgcctcgcccccgggccctttcgtccacatcaaaaatgcatcaagtctccacgtgtttcgggccagggcgtggcttggcattgaccttcatgaccttacatagctttagagaagccataacgttagactgcaatactaacgaccgacgcccctccgggcagagaccaccgcgcccctctgcgccccagcgcctgcgcctcctcctgcatgtcggggcccctgcgtgtgttctctccggatggaatcacagccaataaacaccagtgatttcac

SEQ ID NO: 68147 - DNA, 2150 bp, Homo sapiens
ggcacgagggtgacgcgccctcctcgcggtgcccttcagccgccgccgcagctcaccgggcgccacatggacccagccggcccgagcgcgccccgccgctgaccgcccgcgccccgggaaggaagaacactcgctcccggccatacttgcgtgtgagttctgacccctggaggagccactgtggaagcagagcaatcgccatggagtttgtgatgaagcaggctctaggaggggccaccaaggacatggggaagatgctggggggtgacgaggagaaggacccagacgccgccaagaaggaggaggagcggcaggaggcgctgcgccaggcggaggaggagcgcaaggccaagtacgccaagatggaggcggagcgcgaggccgtgcgccagggcatccgagacaagtacggcatcaagaagaaggaggagcgcgaggccgaggcccaggccgccatggaggccaactccgaggggagcttgacgcggcccaagaaggccatcccgccgggctgcggggacgaggtggaggaggaggacgagagcatcctggacaccgtcatcaagtacctgcccgggccgctgcaggacatgctcaagaagtagccccgcgcgggacagcggccccgcggagcccccgcccctccccctacagatcctccgcggaggcccctgagggacgagcagagcgcagcccccacgccgatataagccatagccccaggcccgccctgcccgcgcccgccgcctccctcacccggcaaggggcgcgcgcccccaggacccccccagtccgccccgtgctcctctgcccgcgggtggctggagccccatcgcctgggacgcccctttctcttgctgtttaccgcccacccagcagcgcccgaggccagggccgccgaagggcagccccgcgaccacccctgtgcgcgcgttcgcggcggtgggcgcctgtcgggcccgcactcaggagcacagccatagcagacgggggggtgcgggcggggcgagggcggcggggcctgggtccccctcctgcacgcggactccggggttcggatcgctccgccgtgagtatttgcgtccgcacgcggccgctctccgccccccggcctggccccctcgcgcccctgtccatccgtctctgtccgcgtcctttcctctcctctctggaaggttttgcttcttacgaacgccacggccgtgttcacttctaaactaaaggaaacaaagcaataggtttgggggacgcccagcccccacccccgtcaccccgctcttcccaagtcctcgccccccgcccggcctcctagcctctccgcccacgcggctgctgcttctccctggggaggacccctgccctcggccattgaacactgcaccctccacaggagccgcagaggcccgaggcaccggacgctggagaccctgcgcccctgcccagcacctcctccgtgggcagctcctcgggtggggcctgcggggttccctgcgcgcagctggcgcgtgtgtggcctaatccacctggtggccctgcggggcggcatccgagcccctgtttctcctccattcatgtttaatttgcatcacaatttgttgaatctcaggtaaatgaggtctttgcatttaatgagttttatcttgacaggcgccgcctcgcccccgggccctttcgtccacatcaaaaatgcatcaagtctccacgtgtttcgggccagggcgtggcttggcattgaccttcatgaccttacatagctttagagaagccataacgttagactgcaatactaacgaccgacgcccctccgggcagagaccaccgcgcccctctgcgccccagcgacgcggcccgcggggacgtcgctgtccgtcctgctcgccctgtgccctctcactgacttctcccgggtcgtgtcttttaaaaactcctgttttcacaccttacaaagccagctctgagcagacagggcgtcctctcgtagaacctgcgcaccccgttcccagcgcatggcgccccgggccgcgagcttagcttagaccgtggtgtcctctgtccgtctgtcctgcgcctgcgcctcctcctgcatgtcggggcccctgcgtgtgttctctccggatggaatcacagccaataaacaccagtgatttcac

SEQ ID NO: 68148 - DNA, 1984 bp, Homo sapiens
ctccaggctgacgaccgccagagccgtctctgggactctgcaggcacttcccgagcccccgcaaggggccaccaaggacatggggaagatgctggggggtgacgaggagaaggacccagacgccgccaagaaggaggaggagcggcaggaggcgctgcgccaggcggaggaggagcgcaaggccaagtacgccaagatggaggcggagcgcgaggccgtgcgccagggcatccgagacaagtacggcatcaagaagaaggaggagcgcgaggccgaggcccaggccgccatggaggccaactccgaggggagcttgacgcggcccaagaaggccatcccgccgggctgcggggacgaggtggaggaggaggacgagagcatcctggacaccgtcatcaagtacctgcccgggccgctgcaggacatgctcaagaagtagccccgcgcgggacagcggccccgcggagcccccgcccctccccctacagatcctccgcggaggcccctgagggacgagcagagcgcagcccccacgccgatataagccatagccccaggcccgccctgcccgcgcccgccgcctccctcacccggcaaggggcgcgcgcccccaggacccccccagtccgccccgtgctcctctgcccgcgggtggctggagccccatcgcctgggacgcccctttctcttgctgtttaccgcccacccagcagcgcccgaggccagggccgccgaagggcagccccgcgaccacccctgtgcgcgcgttcgcggcggtgggcgcctgtcgggcccgcactcaggagcacagccatagcagacgggggggtgcgggcggggcgagggcggcggggcctgggtccccctcctgcacgcggactccggggttcggatcgctccgccgtgagtatttgcgtccgcacgcggccgctctccgccccccggcctggccccctcgcgcccctgtccatccgtctctgtccgcgtcctttcctctcctctctggaaggttttgcttcttacgaacgccacggccgtgttcacttctaaactaaaggaaacaaagcaataggtttgggggacgcccagcccccacccccgtcaccccgctcttcccaagtcctcgccccccgcccggcctcctagcctctccgcccacgcggctgctgcttctccctggggaggacccctgccctcggccattgaacactgcaccctccacaggagccgcagaggcccgaggcaccggacgctggagaccctgcgcccctgcccagcacctcctccgtgggcagctcctcgggtggggcctgcggggttccctgcgcgcagctggcgcgtgtgtggcctaatccacctggtggccctgcggggcggcatccgagcccctgtttctcctccattcatgtttaatttgcatcacaatttgttgaatctcaggtaaatgaggtctttgcatttaatgagttttatcttgacaggcgccgcctcgcccccgggccctttcgtccacatcaaaaatgcatcaagtctccacgtgtttcgggccagggcgtggcttggcattgaccttcatgaccttacatagctttagagaagccataacgttagactgcaatactaacgaccgacgcccctccgggcagagaccaccgcgcccctctgcgccccagcgacgcggcccgcggggacgtcgctgtccgtcctgctcgccctgtgccctctcactgacttctcccgggtcgtgtcttttaaaaactcctgttttcacaccttacaaagccagctctgagcagacagggcgtcctctcgtagaacctgcgcaccccgttcccagcgcatggcgccccgggccgcgagcttagcttagaccgtggtgtcctctgtccgtctgtcctgcgcctgcgcctcctcctgcatgtcggggcccctgcgtgtgttctctccggatggaatcacagccaataaacaccagtgatttcac

SEQ ID NO: 68149 - DNA, 2174 bp, Homo sapiens
  misc_feature (2152)..(2152): n is a, c, g, or t
ggcacgagggtgacgcgccctcctcgcggtgcccttcagccgccgccgcagctcaccgggcgccacatggacccagccggcccgagcgcgccccgccgctgaccgcccgcgccccgggaaggaagaacactcgctcccggccatacttgcgtgtgagttctgacccctggaggagccactgtggaagcagagcaatcgccatggagtttgtgatgaagcaggctctaggaggggccaccaaggacatggggaagatgctggggggtgacgaggagaaggacccagacgccgccaagaaggaggaggagcggcaggaggcgctgcgccaggcggaggaggagcgcaaggccaagtacgccaagatggaggcggagcgcgaggccgtgcgccagggcatccgagacaagtacggcatcaagaagaaggaggagcgcgaggccgaggcccaggccgccatggaggccaactccgaggggagcttgacgcggcccaagaaggccatcccgccgggctgcggggacgaggtggaggaggaggacgagagcatcctggacaccgtcatcaagtacctgcccgggccgctgcaggacatgctcaagaagtagccccgcgcgggacagcggccccgcggagcccccgcccctccccctacagatcctccgcggaggcccctgagggacgagcagagcgcagcccccacgccgatataagccatagccccaggcccgccctgcccgcgcccgccgcctccctcacccggcaaggggcgcgcgcccccaggacccccccagtccgccccgtgctcctctgcccgcgggtggctggagccccatcgcctgggacgcccctttctcttgctgtttaccgcccacccagcagcgcccgaggccagggccgccgaagggcagccccgcgaccacccctgtgcgcgcgttcgcggcggtgggcgcctgtcgggcccgcactcaggagcacagccatagcagacgggggggtgcgggcggggcgagggcggcggggcctgggtccccctcctgcacgcggactccggggttcggatcgctccgccgtgagtatttgcgtccgcacgcggccgctctccgccccccggcctggccccctcgcgcccctgtccatccgtctctgtccgcgtcctttcctctcctctctggaaggttttgcttcttacgaacgccacggccgtgttcacttctaaactaaaggaaacaaagcaataggtttgggggacgcccagcccccacccccgtcaccccgctcttcccaagtcctcgccccccgcccggcctcctagcctctccgcccacgcggctgctgcttctccctggggaggacccctgccctcggccattgaacactgcaccctccacaggagccgcagaggcccgaggcaccggacgctggagaccctgcgcccctgcccagcacctcctccgtgggcagctcctcgggtggggcctgcggggttccctgcgcgcagctggcgcgtgtgtggcctaatccacctggtggccctgcggggcggcatccgagcccctgtttctcctccattcatgtttaatttgcatcacaatttgttgaatctcaggtaaatgaggtctttgcatttaatgagttttatcttgacaggcgccgcctcgcccccgggccctttcgtccacatcaaaaatgcatcaagtctccacgtgtttcgggccagggcgtggcttggcattgaccttcatgaccttacatagctttagagaagccataacgttagactgcaatactaacgaccgacgcccctccgggcagagaccaccgcgcccctctgcgccccagcgacgcggcccgcggggacgtcgctgtccgtcctgctcgccctgtgccctctcactgacttctcccgggtcgtgtcttttaaaaactcctgttttcacaccttacaaagccagctctgagcagacagggcgtcctctcgtagaacctgcgcaccccgttcccagcgcatggcgccccgggccgcgagcttagcttagaccgtggtgtcctctgtccgtctgtcctgcgcctgcgcctcctcctgcatgtcggggcccctgcgtgtgttctctccggatggaatcacagccaataaacaccagtgatttcacgnagcacataataaaaaataaaaa

SEQ ID NO: 68150 - DNA, 1054 bp, Homo sapiens
cccgggcaggagggtcagggccagatggaggggccaccaaggacatggggaagatgctggggggtgacgaggagaaggagttttgcttcttacgaacgccacggccgtgttcacttctaaactaaaggaaacaaagcaataggtttgggggacgcccagcccccacccccgtcaccccgctcttcccaagtcctcgccccccgcccggcctcctagcctctccgcccacgcggctgctgcttctccctggggaggacccctgccctcggccattgaacactgcaccctccacaggagccgcagaggcccgaggcaccggacgctggagaccctgcgcccctgcccagcacctcctccgtgggcagctcctcgggtggggcctgcggggttccctgcgcgcagctggcgcgtgtgtggcctaatccacctggtggccctgcggggcggcatccgagcccctgtttctcctccattcatgtttaatttgcatcacaatttgttgaatctcaggtaaatgaggtctttgcatttaatgagttttatcttgacaggcgccgcctcgcccccgggccctttcgtccacatcaaaaatgcatcaagtctccacgtgtttcgggccagggcgtggcttggcattgaccttcatgaccttacatagctttagagaagccataacgttagactgcaatactaacgaccgacgcccctccgggcagagaccaccgcgcccctctgcgccccagcgacgcggcccgcggggacgtcgctgtccgtcctgctcgccctgtgccctctcactgacttctcccgggtcgtgtcttttaaaaactcctgttttcacaccttacaaagccagctctgagcagacagggcgtcctctcgtagaacctgcgcaccccgttcccagcgcatggcgccccgggccgcgagcttagcttagaccgtggtgtcctctgtccgtctgtcctgcgcctgcgcctcctcctgcatgtcggggcccctgcgtgtgttctctccggatggaatcacagccaataaacaccagtgatttcac

SEQ ID NO: 68151 - DNA, 1168 bp, Homo sapiens
ggcacgagggtgacgcgccctcctcgcggtgcccttcagccgccgccgcagctcaccgggcgccacatggacccagccggcccgagcgcgccccgccgctgaccgcccgcgccccgggaaggaagaacactcgctcccggccatacttgcgtgtgagttctgacccctggaggagccactgtggaagcagagcaatcgccatggagtttgtgatgaagcaggctctaggaggggccaccaaggacatggggaagatgctggggggtgacgaggagaaggacccagacgccgccaagaaggaggaggagcggcaggaggcgctgcgccaggcggaggaggagcgcaaggccaagtacgccaagatggaggcggagcgcgaggccgtgcgccagggcatccgagacaagtacggcatcaagaagaaggaggagcgcgaggccgaggcccaggccgccatggaggccaactccgaggggagcttgacgcggcccaagaaggccatcccgccgggctgcggggacgaggtggaggaggaggacgagagcatcctggacaccgtcatcaagtacctgcccgggccgctgcaggacatgctcaagaagtagccccgcgcgggacagcggccccgctgtgagcaacgcgaggggagttcctggttggccaatccaaggatgtgcgacatgtcatagagacagaccggagctgagagacaagacgtgtgctcaagccttcgtgtcatgaaggccatgcagtctctcaagtcccgaggctacgtgaaggaacagtttgcctggagacatttccatacctggtaccttacacaagtgagggatatacaagtagtctacagatgattaccttcatctgcccccggagattgtgcctgccacccgtacgaccgatagccgtccagagactggccagggacctcgagctaaaggtctggaggggtgagcagacctgcgagaatcacaagaggggaagctgcacagcagatacctacagacggagtgctgtgccacctggtgccgacagaaagccgaggctggggctgggtcagaaccgaattccagttaagaggcggattgggccgtggacagtggtcagcactcagtaaaatcggagaggatcttattggctgaataacttacagcaacaaaaacaacga

SEQ ID NO: 68152 - DNA, 480 bp, Homo sapiens
tttattacttaagctattctttcactcatctatcatcctttattcaccaaatcacatgctcttcccaatacctgaatacatcttttgcatctagttcacctagaaaacccatactcattcttcaagactgggttcaaatatcatctcttctgaaaggcctcttacaacactccacaccattgcagaggaggaataagagcttcctcctctgtgctcccatcactgcttacatgtgtgcacctctccattacagtccacatcacatagttgtaactgtgtttataggttaggcttctccagtagacagtgagatgaattcaagaaccaccagtcatatctttcattgtatcctcagcacttaatatagtgcctgccacagggtaggcatttaattaatagttcttaagtgtgtgactgaattgatgaatggatgtatgaagataaaaaaaacaggtaaccctcacatttacatgcccagca

SEQ ID NO: 68153 - DNA, 581 bp, Homo sapiens
aaaagaatattctgacaactgtgtggagaataaactgtagggggaggcaagggtacaagctgaggcaggaaaattgcttgaacctgggaggtgcaggttagagtgagccaagatcgtgcggctgtactctagcctgggcggcagagtgagactccatcccaccccccaaaaaaagcatgttgaatacttaagcattctattaaaatcagtataacatattttatcccaattgtgtagtataataaaatataatttttagagtagtttgctataaagaatctgactataaacgtaaatacttgaagcatgctaagaagtatggaaactacttactcgtgccaaattcaaattattctttatatacagctacttgactgatgtaaaatatgatgtgaaacattcaaacttgtttttaagtgttactatttctaaaacatgaaaattaaacccatttagaaatctggccattaactttcagtttccacaccagaggtgtttcccttaaagacatctatcagtataatattactattataatcccaacattaaattcaaaaatcaattaaaagtacttgaaatta

SEQ ID NO: 68154 - DNA, 930 bp, Homo sapiens
gcagaagagggagaggttcgtcttccaggctgcaccgcgctggcggcgagcgggttcacagggagccggcggcggtggtaccacagcctggtgatgtcagacaccagtggttctttcagaggggtctctccagccccaagcaggaagctgttttccttctgtgtgtgcagccaaggcccctggaggggctgagagtcggggctgagtcttcctggggccagggccccccaacaaggcctccgatgagccccagaggacctccctctcagtgtgaagatcattcaccgatgaagacagacccagttggatcccctttgtctgaattcaggagatgtccatttctggagcaagaacaggcaaagaaatactcctgtaatatgatggccttccttgctgacgaatactgcaactattgtcgagacattttacgaaatgtgaggaactgagaacttgagagggtagggttttatctataaaatacaagcatttatgactccttattaatcatttttatttgaagagaccccgtcaacagatgtccaatggtaacccactgcactgaagtgcttacatgctatgtacctatgttgtagtcattgagttctggaaggtgagatcgatattcagtgtaatcagttggaaattctccaaggtgctaatacagataactttaggctctaaatacaaattcagctattttttagatcctaattctgctcattttgaataaagtgttggtaataaaattcaccctggaattttcaatggtgccgaagagccatttgattgatacgcgctaactgaagatggagcaggacttcgcagctgagtgatctggcatgggtattgtcacgattggatttaatcctagaattggctgtggaaaacatgaataaatctttcagctattctgagtttcatcttctgcag

SEQ ID NO: 68155 - DNA, 825 bp, Homo sapiens
  misc_feature (113)..(113): n is a, c, g, or t
  misc_feature (277)..(277): n is a, c, g, or t
atgtggatgctgggagaagtatgtgagatggaaaagttgtttcatggcatccaagaagtgaatgatcctcaaggtgtagcagaggaatttgtaggagagagggatgattgacntcttcgtatagccctccatccatcccagttagcatggagggattttagggctaccattggctgggtagtggagtgttgaccaatcacagctcaggggcgtgattgtctcgtcctgggatcgcgagaggggtatatacagggaggccaggcagcctggagttagncgaccgttgcgagacgttgagctgcggaagatgagtccaaagccgagagcctcgggacctccggccaaggccacggaggcaggaaagaggaagtcctcctctcagccgagccccagtgacccgaagaagaagactaccaaggtggccaagaagggaaaagcagttcgtagagggagacgcgggaagaaaggggctgcgacaaagatggcggccgtgacggcacctgaggcggagagcgcgccagcggcacccggccccagcgaccagcccagccaggagctccctcagcacgagctgccgccggaggagccagtgagcgaggggacccagcacgaccccctgagtcaggagagccgagctggaggaaccactgagtcaggagagcgaggtggaagaaccactgactgtgtggatggccagcttttcccctgtctccgagagcagcgactaagttcaggcccagccgccagacctcagagatctcaccagcggggtgcttgccattctgaagataataaaatgaatgtgttgcaaattgaaaaaaaaaa

SEQ ID NO: 68156 - DNA, 739 bp, Homo sapiens
  misc_feature (113)..(113): n is a, c, g, or t
  misc_feature (277)..(277): n is a, c, g, or t
atgtggatgctgggagaagtatgtgagatggaaaagttgtttcatggcatccaagaagtgaatgatcctcaaggtgtagcagaggaatttgtaggagagagggatgattgacntcttcgtatagccctccatccatcccagttagcatggagggattttagggctaccattggctgggtagtggagtgttgaccaatcacagctcaggggcgtgattgtctcgtcctgggatcgcgagaggggtatatacagggaggccaggcagcctggagttagncgaccgttgcgagacgttgagctgcggaagatgagtccaaagccgagagcctcgggacctccggccaaggccacggaggcaggaaagaggaagcgggaagaaaggggctgcgacaaagatggcggccgtgacggcacctgaggcggagagcgcgccagcggcacccggccccagcgaccagcccagccaggagctccctcagcacgagctgccgccggaggagccagtgagcgaggggacccagcacgaccccctgagtcaggagagccgagctggaggaaccactgagtcaggagagcgaggtggaagaaccactgactgtgtggatggccagcttttcccctgtctccgagagcagcgactaagttcaggcccagccgccagacctcagagatctcaccagcggggtgcttgccattctgaagataataaaatgaatgtgttgcaaattgaaaaaaaaaa

SEQ ID NO: 68157 - DNA, 1537 bp, Homo sapiens
tgggtgtgaaaggcagcggtggccacagaggcggcggagagatggccttcagcggttcccaggctccctacctgagtccagctgtccccttttctgggactattcaaggaggtctccaggacggacttcagatcactgtcaatgggaccgttctcagctccagtggaaccaggtttgctgtgaactttcagactggcttcagtggaaatgacattgccttccacttcaaccctcggtttgaagatggagggtacgtggtgtgcaacacgaggcagaacggaagctgggggcccgaggagaggaagacacacatgcctttccagaaggggatgccctttgacctctgcttcctggtgcagagctcagatttcaaggtgatggtgaacgggatcctcttcgtgcagtacttccaccgcgtgcccttccaccgtgtggacaccatctccgtcaatggctctgtgcagctgtcctacatcagcttccagcctcccggcgtgtggcctgccaacccggctcccattacccagacagtcatccacacagtgcagagcgcccctggacagatgttctctactcccgccatcccacctatgatgtacccccaccccgcctatccgatgcctttcatcaccaccattctgggagggctgtacccatccaagtccatcctcctgtcaggcactgtcctgcccagtgctcagaggttccacatcaacctgtgctctgggaaccacatcgccttccacctgaacccccgttttgatgagaatgctgtggtccgcaacacccagatcgacaactcctgggggtctgaggagcgaagtctgccccgaaaaatgcccttcgtccgtggccagagcttctcagtgtggatcttgtgtgaagctcactgcctcaaggtggccgtggatggtcagcacctgtttgaatactaccatcgcctgaggaacctgcccaccatcaacagactggaagtggggggcgacatccagctgacccatgtgcagacataggcggcttcctggccctggggccgggggctggggtgtggggcagtctgggtcctctcatcatccccacttcccaggcccagcctttccaaccctgcctgggatctgggctttaatgcagaggccatgtccttgtctggtcctgcttctggctacagccaccctggaacggagaaggcagctgacggggattgccttcctcagccgcagcagcacctggggctccagctgctggaatcctaccatcccaggaggcaggcacagccagggagaggggaggagtgggcagtgaagatgaagccccatgctcagtcccctcccatcccccacgcagctccaccccagtcccaagccaccagctgtctgctcctggtgggaggtggcctcctcagcccctcctctctgacctttaacctcactctcaccttgcaccgtgcaccaacccttcacccctcctggaaagcaggcctgatggcttcccactggcctccaccacctgaccagagtgttctcttcagaggactggc

SEQ ID NO: 68158 - DNA, 3179 bp, Homo sapiens
tttgtttttttgcagttggtacgccttattacatgtctccagagagaatacatgaaaatggatacaacttcaaatctgacatctggtctcttggctgtctactatatgagatggctgcattacaaagtcctttctatggtgacaaaatgaatttatactcactgtgtaagaagatagaacagtgtgactacccacctcttccttcagatcactattcagaagaactccgacagttagttaatatgtgcatcaacccagatccagagaagcgaccagacgtcacctatgtttatgacgtagcaaagaggatgcatgcatgcactgcaagcagctaaacatgcaagatcatgaagagtgtaaccaaagtaattgaaagtattttgtgcaagtcatacctccccatttatgtctggtgttaagattaatatttcagagctagtgtgctttgaatccttaaccagttttcatataagcttcattttgtaccagtcacctaaatcacctccttgcaacccccaaatgactttggaataactgaattgcatgttaggagagaaaatgaaacatgatggttttgaatggctaaaggtttatagaatttcttacagttttctgctgataaattgtgtttagatagactgtcagtgccaaatattgaaggtgcagcttggcacacatcagaatagactcatacctgagaaaaagtatctgaacatgtgacttgtttcttttttagtaatttatggacattgagatgaacacaattgtgaacttttgtgaagattttatttttaaacgtttgaagtactagttttagttcttagcagagtagttttcaaatatgattcttatgataaatgtagacacaaactatttgagaaacatttagaactcttagcttatacattcaaaatgtaactattaaatgtgaagatttggggacaaaatgtgagtcagacactgaagagttttttgttttgttttaatatttttgatattctctttgcattgaaatggtataaatgaatccatttaaaaagtggttaaggatttgtttagctggtgtgataataatttttaaagttgcacattgcccaaggctttttttgtgtgtttttattgttgtttgtacatttgaaaatgcattttaactcataattgtacactataatataagcctaagtttttattcataagttttattgaagttctgatcggtccccttcagaaatttttttatattattcttcaagttactttcttatttatattgtatgtgcattttatccattaatgtttcatactttctgagagtataatacccttttaaaagatatttggtataccaatacttttcctggattgaaaactttttttaaactttttaaaatttgggccactctgtatgcatatgtttggtcttgttaaagaggaagaaaggatgtgtgttatactgtacctgtgaatgttgatacagttacaatttatttgacaaggttgtaattctagaatatgcttaataaaatgaaaactggccatgactacagccagaactgttatgagattaacatttctattgagaagcttttgagtaaagtactgtatttgttcatgaagatgactgagatggtaacacttcgtgtagcttaaggaaatgggcagaatttcgtaaatgctgttgtgcagatgtgttttccctgaatgctttcgtattagtggcgaccagtttctcacagaattgtgaagcctgaaggccaagaggaagtcactgttaaaggactctgtgccatcttacaaccttggatgaattatcctgccaacgtgaaaacctcatgttcaaagaacacttccctttagccgatgtaactgctggttttgtttttcatatgtgtttttcttacactcatttgaatgctttcaagcatttgtaaacttaaaaaatgtataaagggcaaaaagtctgaacccttgttttctgaaatctaatcagttatgtatggtttctgaagggtaattttattttggaataggtaaaggaaacctgtttgtttgtttttcctgagggctagatgcattttttttctcacactcttaatgacttttaacatttatactgagcatccatagatatattcctagaagtatgagaagaattattcttattgaccattaatgtcatgttcattttaatgtaatataattgagatgaaatgttctctggttggaacagatactctctttttttttcttgcaatctttaagaatacatagatctaaaattcattagcttgacccctcaaagtaacttttaagtaaagattaaagcttttcttctcagtgaatatatctgctagaaggaaatagctgggaagaatttaatgatcagggaaattcattatttctatatgtggaaactttttgcttcgaatattgtatctttttaaatctaaatgttcatatttttcctgaagaaaccactgtgtaaaaatcaaattttaattttgaatggaataatttcaaagaactatgaagatgatttgaagctctaatttatatagtcacctataaaatgttctttatatgtgttcataagtaaattttatattgattaagttaaacttttgaattgatttgaggagcagtaaaatgaaagctatatctattctaaaccttatttagacattggtaccagttacccaggtgaaaatatggagtaactttgttttgtatggtaaggtttaggaatggtggatgaagggtatctctatataaataaagtgctcaacaatgtgcaatgattgtaaatttagtaagatattacagccatttcatgaatgctttaccattcaacatagtatctattacaaaacacctttcttgtatccatatacttcaggtgttgctgttaacatttactatgatatttattttaaccaaaatgttactcacattaaatgtttattctttaaaatgaatgtattatgtttttaacccacaaatgcatacttaccctgtgcctcatatttcaatagtactgtaatatggacatcttttgtgaaatacttttattttgttatgctttaaatatacatacaaaaagatttctgttattagctttgaaaattgtataatatcctaatataaacaaaaatataaaaataaaaatgaatacagtaaaa

SEQ ID NO: 68159 - DNA, 2399 bp, Homo sapiens
agatgatgaaaacagaacttgtgaaggaatagtcggatttaatagaaacatttagaactcttagcttatacattcaaaatgtaactattaaatgtgaagatttggggacaaaatgtgagtcagacactgaagagttttttgttttgttttaatatttttgatattctctttgcattgaaatggtataaatgaatccatttaaaaagtggttaaggatttgtttagctggtgtgataataatttttaaagttgcacattgcccaaggctttttttgtgtgtttttattgttgtttgtacatttgaaaaatattctttgaataaccttgcagtactatatttcaatttctttataaatttaagtgcattttaactcataattgtacactataatataagcctaagtttttattcataagttttattgaagttctgatcggtccccttcagaaatttttttatattattcttcaagttactttcttatttatattgtatgtgcattttatccattaatgtttcatactttctgagagtataatacccttttaaaagatatttggtataccaatacttttcctggattgaaaactttttttaaactttttaaaatttgggccactctgtatgcatatgtttggtcttgttaaagaggaagaaaggatgtgtgttatactgtacctgtgaatgttgatacagttacaatttatttgacaaggttgtaattctagaatatgcttaataaaatgaaaactggccatgactacagccagaactgttatgagattaacatttctattgagaagcttttgagtaaagtactgtatttgttcatgaagatgactgagatggtaacacttcgtgtagcttaaggaaatgggcagaatttcgtaaatgctgttgtgcagatgtgttttccctgaatgctttcgtattagtggcgaccagtttctcacagaattgtgaagcctgaaggccaagaggaagtcactgttaaaggactctgtgccatcttacaaccttggatgaattatcctgccaacgtgaaaacctcatgttcaaagaacacttccctttagccgatgtaactgctggttttgtttttcatatgtgtttttcttacactcatttgaatgctttcaagcatttgtaaacttaaaaaatgtataaagggcaaaaagtctgaacccttgttttctgaaatctaatcagttatgtatggtttctgaagggtaattttattttggaataggtaaaggaaacctgtttgtttgtttttcctgagggctagatgcattttttttctcacactcttaatgacttttaacatttatactgagcatccatagatatattcctagaagtatgagaagaattattcttattgaccattaatgtcatgttcattttaatgtaatataattgagatgaaatgttctctggttggaacagatactctctttttttttcttgcaatctttaagaatacatagatctaaaattcattagcttgacccctcaaagtaacttttaagtaaagattaaagcttttcttctcagtgaatatatctgctagaaggaaatagctgggaagaatttaatgatcagggaaattcattatttctatatgtggaaactttttgcttcgaatattgtatctttttaaatctaaatgttcatatttttcctgaagaaaccactgtgtaaaaatcaaattttaattttgaatggaataatttcaaagaactatgaagatgatttgaagctctaatttatatagtcacctataaaatgttctttatatgtgttcataagtaaattttatattgattaagttaaacttttgaattgatttgaggagcagtaaaatgaaagctatatctattctaaaccttatttagacattggtaccagttacccaggtgaaaatatggagtaactttgttttgtatggtaaggtttaggaatggtggatgaagggtatctctatataaataaagtgctcaacaatgtgcaatgattgtaaatttagtaagatattacagccatttcatgaatgctttaccattcaacatagtatctattacaaaacacctttcttgtatccatatacttcaggtgttgctgttaacatttactatgatatttattttaaccaaaatgttactcacattaaatgtttattctttaaaatgaatgtattatgtttttaacccacaaatgcatacttaccctgtgcctcatatttcaatagtactgtaatatggacatcttttgtgaaatacttttattttgttatgctttaaatatacatacaaaaagatttctgttattagctttgaaaattgtataatatcctaatataaacaaaaatataaaaataaaaatgaatacagtaaaa

SEQ ID NO: 68160 - DNA, 3178 bp, Homo sapiens
tttgtttttttgcagttggtacgccttattacatgtctccagagagaatacatgaaaatggatacaacttcaaatctgacatctggtctcttggctgtctactatatgagatggctgcattacaaagtcctttctatggtgacaaaatgaatttatactcactgtgtaagaagatagaacagtgtgactacccacctcttccttcagatcactattcagaagaactccgacagttagttaatatgtgcatcaacccagatccagagaagcgaccagacgtcacctatgtttatgacgtagcaaagaggatgcatgcatgcactgcaagcagctaaacatgcaagatcatgaagagtgtaaccaaagtaattgaaagtattttgtgcaagtcatacctccccatttatgtctggtgttaagattaatatttcagagctagtgtgctttgaatccttaaccagttttcatataagcttcattttgtaccagtcacctaaatcacctccttgcaacccccaaatgactttggaataactgaattgcatgttaggagagaaaatgaaacatgatggttttgaatggctaaaggtttatagaatttcttacagttttctgctgataaattgtgtttagatagactgtcagtgccaaatattgaaggtgcagcttggcacacatcagaatagactcatacctgagaaaaagtatctgaacatgtgacttgtttcttttttagtaatttatggacattgagatgaacacaattgtgaacttttgtgaagattttatttttaaacgtttgaagtactagttttagttcttagcagagtagttttcaaatatgattcttatgataaatgtagacacaaactatttgagaaacatttagaactcttagcttatacattcaaaatgtaactattaaatgtgaagatttggggacaaaatgtgagtcagacactgaagagttttttgttttgttttaatatttttgatattctctttgcattgaaatggtataaatgaatccatttaaaaagtggttaaggatttgtttagctggtgtgataataatttttaaagttgcacattgcccaaggctttttttgtgtgtttttattgttgtttgtacatttgaaaaatattctttgaataaccttgcagtactatatttcaatttctttataaatttaagtgcattttaactcataattgtacactataatataagcctaagtttttattcataagttttattgaagttctgatcggtccccttcagaaatttttttatattattcttcaagttactttcttatttatattgtatgtgcattttatccattaatgtttcatactttctgagagtataatacccttttaaaagatatttggtataccaatacttttcctggattgaaaactttttttaaactttttaaaatttgggccactctgtatgcatatgtttggtcttgttaaagaggaagaaaggatgtgtgttatactgtacctgtgaatgttgatacagttacaatttatttgacaaggttgtaattctagaatatgcttaataaaatgaaaactggccatgactacagccagaactgttatgagattaacatttctattgagaagcttttgagtaaagtactgtatttgttcatgaagatgactgagatggtaacacttcgtgtagcttaaggaaatgggcagaatttcgtaaatgctgttgtgcagatgtgttttccctgaatgctttcgtattagtggcgaccagtttctcacagaattgtgaagcctgaaggccaagaggaagtcactgttaaaggactctgtgccatcttacaaccttggatgaattatcctgccaacgtgaaaacctcatgttcaaagaacacttccctttagccgatgtaactgctggttttgtttttcatatgtgtttttcttacactcatttgaatgctttcaagcatttgtaaacttaaaaaatgtataaagggcaaaaagtctgaacccttgttttctgaaatctaatcagttatgtatggtttctgaagggtaattttattttggaataggtaaaggaaacctgtttgtttgtttttcctgagggctagatgcattttttttctcacactcttaatgacttttaacatttatactgagcatccatagatatattcctagaagtatgagaagaattattcttattgaccattaatgtcatgttcattttaatgtaatataattgagatgaaatgttctctggttggaacagatactctctttttttttcttgcaatctttaagaatacatagatctaaaattcattagcttgacccctcaaagtaacttttaagtaaagattaaagcttttcttctcagtgaatatatctgctagaaggaaatagctgggaagaatttaatgatcagggaaattcattatttctatatgtggaaactttttgcttcgaatattgtatctttttaaatctaaatgttcatatttttcctgaagaaaccactgtgtaaaaatcaaattttaattttgaatggaataatttcaaagaactatgaagatgatttgaagctctaatttatatagtcacctataaaatgttctttatatgtgttcataagtaaattttatattgattaagttaaacttttgaattgatttgaggagcagtaaaatgaaagctatatctattctaaaccttatttagacattggtaccagttacccaggtggtatctctatataaataaagtgctcaacaatgtgcaatgattgtaaatttagtaagatattacagccatttcatgaatgctttaccattcaacatagtatctattacaaaacacctttcttgtatccatatacttcaggtgttgctgttaacatttactatgatatttattttaaccaaaatgttactcacattaaatgtttattctttaaaatgaatgtattatgtttttaacccacaaatgcatacttaccctgtgcctcatatttcaatagtactgtaatatggacatcttttgtgaaatacttttattttgttatgctttaaatatacatacaaaaagatttctgttattagctttgaaaattgtataatatcctaatataaacaaaaatataaaaataaaaatgaatacagtaaaa

SEQ ID NO: 68161 - DNA, 1163 bp, Homo sapiens
cttttggggtctttgctcttttggggtctttgctcttttggggtcttggctagatgcattttttttctcacactcttaatgacttttaacatttatactgagcatccatagatatattcctagaagtatgagaagaattattcttattgaccattaatgtcatgttcattttaatgtaatataattgagatgaaatgttctctggttggaacagatactctctttttttttcttgcaatctttaagaatacatagatctaaaattcattagcttgacccctcaaagtaacttttaagtaaagattaaagcttttcttctcagtgaatatatctgctagaaggaaatagctgggaagaatttaatgatcagggaaattcattatttctatatgtggaaactttttgcttcgaatattgtatctttttaaatctaaatgttcatatttttcctgaagaaaccactgtgtaaaaatcaaattttaattttgaatggaataatttcaaagaactatgaagatgatttgaagctctaatttatatagtcacctataaaatgttctttatatgtgttcataagtaaattttatattgattaagttaaacttttgaattgatttgaggagcagtaaaatgaaagctatatctattctaaaccttatttagacattggtaccagttacccaggtgaaaatatggagtaactttgttttgtatggtaaggtttaggaatggtggatgaagggtatctctatataaataaagtgctcaacaatgtgcaatgattgtaaatttagtaagatattacagccatttcatgaatgctttaccattcaacatagtatctattacaaaacacctttcttgtatccatatacttcaggtgttgctgttaacatttactatgatatttattttaaccaaaatgttactcacattaaatgtttattctttaaaatgaatgtattatgtttttaacccacaaatgcatacttaccctgtgcctcatatttcaatagtactgtaatatggacatcttttgtgaaatacttttattttgttatgctttaaatatacatacaaaaagatttctgttattagctttgaaaattgtataatatcctaatataaacaaaaatataaaaataaaaatgaatacagtaaaa

SEQ ID NO: 68162 - DNA, 2509 bp, Homo sapiens
tttgtttttttgcagttggtacgccttattacatgtctccagagagaatacatgaaaatggatacaacttcaaatctgacatctggtctcttggctgtctactatatgagatggctgcattacaaagtcctttctatggtgacaaaatgaatttatactcactgtgtaagaagatagaacagtgtgactacccacctcttccttcagatcactattcagaagaactccgacagttagttaatatgtgcatcaacccagatccagagaagcgaccagacgtcacctatgtttatgacgtagcaaagaggatgcatgcatgcactgcaagcagctaaacatgcaagatcatgaagagtgtaaccaaagtaattgaaagtattttgtgcaagtcatacctccccatttatgtctggtgttaagattaatatttcagagctagtgtgctttgaatccttaaccagttttcatataagcttcattttgtaccagtcacctaaatcacctccttgcaacccccaaatgactttggaataactgaattgcatgttaggagagaaaatgaaacatgatggttttgaatggctaaaggtttatagaatttcttacagttttctgctgataaattgtgtttagatagactgtcagtgccaaatattgaaggtgcagcttggcacacatcagaatagactcatacctgagaaaaagtatctgaacatgtgacttgtttcttttttagtaatttatggacattgagatgaacacaattgtgaacttttgtgaagattttatttttaaacgtttgaagtactagttttagttcttagcagagtagttttcaaatatgattcttatgataaatgtagacacaaactatttgagaaacatttagaactcttagcttatacattcaaaatgtaactattaaatgtgaagatttggggacaaaatgtgagtcagacactgaagagttttttgttttgttttaatatttttgatattctctttgcattgaaatggtataaatgaatccatttaaaaagtggttaaggatttgtttagctggtgtgataataatttttaaagttgcacattgcccaaggctttttttgtgtgtttttattgttgtttgtacatttgaaaaatattctttgaataaccttgcagtactatatttcaatttctttataaatttaagtgcattttaactcataattgtacactataatataagcctaagtttttattcataagttttattgaagttctgatcggtccccttcagaaatttttttatattattcttcaagttactttcttatttatattgtatgtgcattttatccattaatgtttcatactttctgagagtataatacccttttaaaagatatttggtataccaatacttttcctggattgaaaactttttttaaactttttaaaatttgggccactctgtatgcatatgtttggtcttgttaaagaggaagaaaggatgtgtgttatactgtacctgtgaatgttgatacagttacaatttatttgacaaggttgtaattctagaatatgcttaataaaatgaaaactggccatgactacagccagaactgttatgagattaacatttctattgagaagcttttgagtaaagtactgtatttgttcatgaagatgactgagatggtaacacttcgtgtagcttaaggaaatgggcagaatttcgtaaatgctgttgtgcagatgtgttttccctgaatgctttcgtattagtggcgaccagtttctcacagaattgtgaagcctgaaggccaagaggaagtcactgttaaaggactctgtgccatcttacaaccttggatgaattatcctgccaacgtgaaaacctcatgttcaaagaacacttccctttagccgatgtaactgctggttttgtttttcatatgtgtttttcttacactcatttgaatgctttcaagcatttgtaaacttaaaaaatgtataaagggcaaaaagtctgaacccttgttttctgaaatctaatcagttatgtatggtttctgaagggtaattttattttggaataggtaaaggaaacctgtttgtttgtttttcctgagggctagatgcattttttttctcacactcagcactacctggagggcctgtgcgtggagtggctccgcagatacctggagaacgggaaggagacgctgcagcgcgcggaccccccaaagacacatgtgacccaccaccccatgtttgaccatgaggccaccctgaggcgctgggccctgggcttctaccctgcggagatcacactgacctggcatggggatgtgcaagaccaaactcaggacaccgagcttgtggagaccagaccagcaggagatagaacctttcagaaatgggcaactggggtggtgccttttgggagaaaaacacaaatacccatgccatgtccaaaatgaggggcttgtctaaagccccctaaaccttgagatggggaaac

SEQ ID NO: 68163 - DNA, 396 bp, Homo sapiens
gcgtcgcctagaggacccggtgtcgagtaagatattacagccatttcatgaatgctttaccattcaacatagtatctattacaaaacacctttcttgtatccatatacttcaggtgttgctgttaacatttactatgatatttattttaaccaaaatgttactcacattaaatgtttattctttaaaatgaatgtattatgtttttaacccacaaatgcatacttaccctgtgcctcatatttcaatagtactgtaatatggacatcttttgtgaaatacttttattttgttatgctttaaatatacatacaaaaagatttctgttattagctttgaaaattgtataatatcctaatataaacaaaaatataaaaataaaaatgaatacagtaaaa

SEQ ID NO: 68164 - DNA, 3233 bp, Homo sapiens
tttgtttttttgcagttggtacgccttattacatgtctccagagagaatacatgaaaatggatacaacttcaaatctgacatctggtctcttggctgtctactatatgagatggctgcattacaaagtcctttctatggtgacaaaatgaatttatactcactgtgtaagaagatagaacagtgtgactacccacctcttccttcagatcactattcagaagaactccgacagttagttaatatgtgcatcaacccagatccagagaagcgaccagacgtcacctatgtttatgacgtagcaaagaggatgcatgcatgcactgcaagcagctaaacatgcaagatcatgaagagtgtaaccaaagtaattgaaagtattttgtgcaagtcatacctccccatttatgtctggtgttaagattaatatttcagagctagtgtgctttgaatccttaaccagttttcatataagcttcattttgtaccagtcacctaaatcacctccttgcaacccccaaatgactttggaataactgaattgcatgttaggagagaaaatgaaacatgatggttttgaatggctaaaggtttatagaatttcttacagttttctgctgataaattgtgtttagatagactgtcagtgccaaatattgaaggtgcagcttggcacacatcagaatagactcatacctgagaaaaagtatctgaacatgtgacttgtttcttttttagtaatttatggacattgagatgaacacaattgtgaacttttgtgaagattttatttttaaacgtttgaagtactagttttagttcttagcagagtagttttcaaatatgattcttatgataaatgtagacacaaactatttgagaaacatttagaactcttagcttatacattcaaaatgtaactattaaatgtgaagatttggggacaaaatgtgagtcagacactgaagagttttttgttttgttttaatatttttgatattctctttgcattgaaatggtataaatgaatccatttaaaaagtggttaaggatttgtttagctggtgtgataataatttttaaagttgcacattgcccaaggctttttttgtgtgtttttattgttgtttgtacatttgaaaaatattctttgaataaccttgcagtactatatttcaatttctttataaatttaagtgcattttaactcataattgtacactataatataagcctaagtttttattcataagttttattgaagttctgatcggtccccttcagaaatttttttatattattcttcaagttactttcttatttatattgtatgtgcattttatccattaatgtttcatactttctgagagtataatacccttttaaaagatatttggtataccaatacttttcctggattgaaaactttttttaaactttttaaaatttgggccactctgtatgcatatgtttggtcttgttaaagaggaagaaaggatgtgtgttatactgtacctgtgaatgttgatacagttacaatttatttgacaaggttgtaattctagaatatgcttaataaaatgaaaactggccatgactacagccagaactgttatgagattaacatttctattgagaagcttttgagtaaagtactgtatttgttcatgaagatgactgagatggtaacacttcgtgtagcttaaggaaatgggcagaatttcgtaaatgctgttgtgcagatgtgttttccctgaatgctttcgtattagtggcgaccagtttctcacagaattgtgaagcctgaaggccaagaggaagtcactgttaaaggactctgtgccatcttacaaccttggatgaattatcctgccaacgtgaaaacctcatgttcaaagaacacttccctttagccgatgtaactgctggttttgtttttcatatgtgtttttcttacactcatttgaatgctttcaagcatttgtaaacttaaaaaatgtataaagggcaaaaagtctgaacccttgttttctgaaatctaatcagttatgtatggtttctgaagggtaattttattttggaataggtaaaggaaacctgtttgtttgtttttcctgagggctagatgcattttttttctcacactcttaatgacttttaacatttatactgagcatccatagatatattcctagaagtatgagaagaattattcttattgaccattaatgtcatgttcattttaatgtaatataattgagatgaaatgttctctggttggaacagatactctctttttttttcttgcaatctttaagaatacatagatctaaaattcattagcttgacccctcaaagtaacttttaagtaaagattaaagcttttcttctcagtgaatatatctgctagaaggaaatagctgggaagaatttaatgatcagggaaattcattatttctatatgtggaaactttttgcttcgaatattgtatctttttaaatctaaatgttcatatttttcctgaagaaaccactgtgtaaaaatcaaattttaattttgaatggaataatttcaaagaactatgaagatgatttgaagctctaatttatatagtcacctataaaatgttctttatatgtgttcataagtaaattttatattgattaagttaaacttttgaattgatttgaggagcagtaaaatgaaagctatatctattctaaaccttatttagacattggtaccagttacccaggtgaaaatatggagtaactttgttttgtatggtaaggtttaggaatggtggatgaagggtatctctatataaataaagtgctcaacaatgtgcaatgattgtaaatttagtaagatattacagccatttcatgaatgctttaccattcaacatagtatctattacaaaacacctttcttgtatccatatacttcaggtgttgctgttaacatttactatgatatttattttaaccaaaatgttactcacattaaatgtttattctttaaaatgaatgtattatgtttttaacccacaaatgcatacttaccctgtgcctcatatttcaatagtactgtaatatggacatcttttgtgaaatacttttattttgttatgctttaaatatacatacaaaaagatttctgttattagctttgaaaattgtataatatcctaatataaacaaaaatataaaaataaaaatgaatacagtaaaa

SEQ ID NO: 68165 - DNA, 3341 bp, Homo sapiens
tttgtttttttgcagttggtacgccttattacatgtctccagagagaatacatgaaaatggatacaacttcaaatctgacatctggtctcttggctgtctactatatgagatggctgcattacaaagtcctttctatggtgacaaaatgaatttatactcactgtgtaagaagatagaacagtgtgactacccacctcttccttcagatcactattcagaagaactccgacagttagttaatatgtgcatcaacccagatccagagaagcgaccagacgtcacctatgtttatgacgtagcaaagaggatgcatgcatgcactgcaagcagctaaacatgcaagatcatgaagagtgtaaccaaagtaattgaaagtattttgtgcaagtcatacctccccatttatgtctggtgttaagattaatatttcagagctagtgtgctttgaatccttaaccagttttcatataagcttcattttgtaccagtcacctaaatcacctccttgcaacccccaaatgactttggaataactgaattgcatgttaggagagaaaatgaaacatgatggttttgaatggctaaaggtttatagaatttcttacagttttctgctgataaattgtgtttagatagactgtcagtgccaaatattgaaggtgcagcttggcacacatcagaatagactcatacctgagaaaaagtatctgaacatgtgacttgtttcttttttagtaatttatggacattgagatgaacacaattgtgaacttttgtgaagattttatttttaaacgtttgaagtactagttttagttcttagcagagtagttttcaaatatgattcttatgataaatgtagacacaaactatttgagaaacatttagaactcttagcttatacattcaaaatgtaactattaaatgtgaagatttggggacaaaatgtgagtcagacactgaagagttttttgttttgttttaatatttttgatattctctttgcattgaaatggtataaatgaatccatttaaaaagtggttaaggatttgtttagctggtgtgataataatttttaaagttgcacattgcccaaggctttttttgtgtgtttttattgttgtttgtacatttgaaaaatattctttgaataaccttgcagtactatatttcaatttctttataaatttaagtgcattttaactcataattgtacactataatataagcctaagtttttattcataagttttattgaagttctgatcggtccccttcagaaatttttttatattattcttcaagttactttcttatttatattgtatgtgcattttatccattaatgtttcatactttctgagagtataatacccttttaaaagatatttggtataccaatacttttcctggattgaaaactttttttaaactttttaaaatttgggccactctgtatgcatatgtttggtcttgttaaagaggaagaaaggatgtgtgttatactgtacctgtgaatgttgatacagttacaatttatttgacaaggttgtaattctagaatatgcttaataaaatgaaaactggccatgactacagccagaactgttatgagattaacatttctattgagaagcttttgagtaaagtactgtatttgttcatgaagatgactgagatggtaacacttcgtgtagcttaaggaaatgggcagaatttcgtaaatgctgttgtgcagatgtgttttccctgaatgctttcgtattagtggcgaccagtttctcacagaattgtgaagcctgaaggccaagaggaagtcactgttaaaggactctgtgccatcttacaaccttggatgaattatcctgccaacgtgaaaacctcatgttcaaagaacacttccctttagccgatgtaactgctggttttgtttttcatatgtgtttttcttacactcatttgaatgctttcaagcatttgtaaacttaaaaaatgtataaagggcaaaaagtctgaacccttgttttctgaaatctaatcagttatgtatggtttctgaagggtaattttattttggaataggtaaaggaaacctgtttgtttgtttttcctgagggctagatgcattttttttctcacactcttaatgacttttaacatttatactgagcatccatagatatattcctagaagtatgagaagaattattcttattgaccattaatgtcatgttcattttaatgtaatataattgagatgaaatgttctctggttggaacagatactctctttttttttcttgcaatctttaagaatacatagatctaaaattcattagcttgacccctcaaagtaacttttaagtaaagattaaagcttttcttctcagtgaatatatctgctagaaggaaatagctgggaagaatttaatgatcagggaaattcattatttctatatgtggaaactttttgcttcgaatattgtatctttttaaatctaaatgttcatatttttcctgaagaaaccactgtgtaaaaatcaaattttaattttgaatggaataatttcaaagaactatgaagatgatttgaagctctaatttatatagtcacctataaaatgttctttatatgtgttcataagtaaattttatattgattaagttaaacttttgaattgatttgaggagcagtaaaatgaaagctatatctattctaaaccttatttagacattggtaccagttacccaggtgaaaatatggagtaactttgttttgtatggtaaggtttaggaatggtggatgaagggtatctctatataaataaagtgctcaacaatgtgcaatgattgtaaatttagtaagatattacagccatttcatgaatgctttaccattcaacatagtatctattacaaaacacctttcttgtatccatatacttcaggtgttgctgttaacatttactatgatatttattttaaccaaaatgttactcacattaaatgtttattctttaaaatgaatgtattatgtttttaacccacaaatgcatacttaccctgtgcctcatatttcaatagtactgtaatatggacatcttttgtgaaatacttttattttgttatgctttaaatatacatacaaaaagatttctgttattagctttgaaaattgtataatatcctaatataaacaaaaatataaaaataaaaatgaatacagtaaaaaaaaaaaaagaaaacgaaaaaattgttgtggcggcctggcctggaaaggtttttaaaacacacgggtgggggggcgggcccaggtggttagggaagggggcaaaacgg

SEQ ID NO: 68166 - DNA, 3026 bp, Homo sapiens
tttgtttttttgcagttggtacgccttattacatgtctccagagagaatacatgaaaatggatacaacttcaaatctgacatctggtctcttggctgtctactatatgagatggctgcattacaaagtcctttctatggtgacaaaatgaatttatactcactgtgtaagaagatagaacagtgtgactacccacctcttccttcagatcactattcagaagaactccgacagttagttaatatgtgcatcaacccagatccagagaagcgaccagacgtcacctatgtttatgacgtagcaaagaggatgcatgcatgcactgcaagcagctaaacatgcaagatcatgaagagtgtaaccaaagtaattgaaagtattttgtgcaagtcatacctccccatttatgtctggtgttaagattaatatttcagagctagtgtgctttgaatccttaaccagttttcatataagcttcattttgtaccagtcacctaaatcacctccttgcaacccccaaatgactttggaataactgaattgcatgttaggagagaaaatgaaacatgatggttttgaatggctaaaggtttatagaatttcttacagttttctgctgataaattgtgtttagatagactgtcagtgccaaatattgaaggtgcagcttggcacacatcagaatagactcatacctgagaaaaagtatctgaacatgtgacttgtttcttttttagtaatttatggacattgagatgaacacaattgtgaacttttgtgaagattttatttttaaacgtttgaagtactagttttagttcttagcagagtagttttcaaatatgattcttatgataaatgtagacacaaactatttgagaaacatttagaactcttagcttatacattcaaaatgtaactattaaatgtgaagatttggggacaaaatgtgagtcagacactgaagagttttttgttttgttttaatatttttgatattctctttgcattgaaatggtataaatgaatccatttaaaaagtggttaaggatttgtttagctggtgtgataataatttttaaagttgcacattgcccaaggctttttttgtgtgtttttattgttgtttgtacatttgaaaaatattctttgaataaccttgcagtactatatttcaatttctttataaatttaagtgcattttaactcataattgtacactataatataagcctaagtttttattcataagttttattgaagttctgatcggtccccttcagaaatttttttatattattcttcaagttactttcttatttatattgtatgtgcattttatccattaatgtttcatactttctgagagtataatacccttttaaaagatatttggtataccaatacttttcctggattgaaaactttttttaaactttttaaaatttgggccactctgtatgcatatgtttggtcttgttaaagaggaagaaaggatgtgtgttatactgtacctgtgaatgttgatacagttacaatttatttgacaaggttgtaattctagaatatgcttaataaaatgaaaactggccatgactacagccagaactgttatgagattaacatttctattgagaagcttttgagtaaagtactgtatttgttcatgaagatgactgagatggtaacacttcgtgtagcttaaggaaatgggcagaatttcgtaaatgctgttgtgcagatgtgttttccctgaatgctttcgtattagtggcgaccagtttctcacagaattgtgaagcctgaaggccaagaggaagtcactgttaaaggactctgtgccatcttacaaccttggatgaattatcctgccaacgtgaaaacctcatgttcaaagaacacttccctttagccgatgtaactgctggttttgtttttcatatgtgtttttcttacactcatttgaatgctttcaagcatttgtaaacttaaaaaatgtataaagggcaaaaagtctgaacccttgttttctgaaatctaatcagttatgtatggtttctgaagggtaattttattttggaataggtaaaggaaacctgtttgtttgtttttcctgagggctagatgcattttttttctcacactcttaatgacttttaacatttatactgagcatccatagatatattcctagaagtatgagaagaattattcttattgaccattaatgtcatgttcattttaatgtaatataattgagatgaaatgttctctggttggaacagatactctctttttttttcttgcaatctttaagaatacatagatctaaaattcattagcttgacccctcaaagtaacttttaagtaaagattaaagcttttcttctcagtgaatatatctgctagaaggaaatagctgggaagaatttaatgatcagggaaattcattatttctatatgtggaaactttttgcttcgaatattgtatctttttaaatctaaatgttcatatttttcctgaagaaaccactgtgtaaaaatcaaattttaattttgaatggaataatttcaaagaactatgaagatgatttgaagctctaatttatatagtcacctataaaatgttctttatatgtgttcataagtaaattttatattgattaagttaaacttttgaattgatttgaggagcagtaaaatgaaagctatatctattctaaaccttatttagacattggtaccagttacccaggtgaaaatatggagtaactttgttttgtatggtaaggtttaggaatggtggatgaagggtatctctatataaataaagtgctcaacaatgtgcaatgattgtaaatttagtaagatattacagccatttcatgaatgctttaccattcaacatagtatctattacaaaacacctttcttgtatccatatacttcaggtgttgctgttaacatttactatgatatttattttaaccaaaatgttactttgacgcggggatcgtctataggaaa

SEQ ID NO: 68167 - DNA, 2125 bp, Homo sapiens
tttgtttttttgcagttggtacgccttattacatgtctccagagagaatacatgaaaatggatacaacttcaaatctgacatctggtctcttggctgtctactatatgagatggctgcattacaaagtcctttctatggtgacaaaatgaatttatactcactgtgtaagaagatagaacagtgtgactacccacctcttccttcagatcactattcagaagaactccgacagttagttaatatgtgcatcaacccagatccagagaagcgaccagacgtcacctatgtttatgacgtagcaaagaggatgcatgcatgcactgcaagcagctaaacatgcaagatcatgaagagtgtaaccaaagtaattgaaagtattttgtgcaagtcatacctccccatttatgtctggtgttaagattaatatttcagagctagtgtgctttgaatccttaaccagttttcatataagcttcattttgtaccagtcacctaaatcacctccttgcaacccccaaatgactttggaataactgaattgcatgttaggagagaaaatgaaacatgatggttttgaatggctaaaggtttatagaatttcttacagttttctgctgataaattgtgtttagatagactgtcagtgccaaatattgaaggtgcagcttggcacacatcagaatagactcatacctgagaaaaagtatctgaacatgtgacttgtttcttttttagtaatttatggacattgagatgaacacaattgtgaacttttgtgaagattttatttttaaacgtttgaagtactagttttagttcttagcagagtagttttcaaatatgattcttatgataaatgtagacacaaactatttgagaaacatttagaactcttagcttatacattcaaaatgtaactattaaatgtgaagatttggggacaaaatgtgagtcagacactgaagagttttttgttttgttttaatatttttgatattctctttgcattgaaatggtataaatgaatccatttaaaaagtggttaaggatttgtttagctggtgtgataataatttttaaagttgcacattgcccaaggctttttttgtgtgtttttattgttgtttgtacatttgaaaaatattctttgaataaccttgcagtactatatttcaatttctttataaatttaagtgcattttaactcataattgtacactataatataagcctaagtttttattcataagttttattgaagttctgatcggtccccttcagaaatttttttatattattcttcaagttactttcttatttatattgtatgtgcattttatccattaatgtttcatactttctgagagtataatacccttttaaaagatatttggtataccaatacttttcctggattgaaaactttttttaaactttttaaaatttgggccactctgtatgcatatgtttggtcttgttaaagaggaagaaaggatgtgtgttatactgtacctgtgaatgttgatacagttacaatttatttgacaaggttgtaattctagaatatgcttaataaaatgaaaactggccatgactacagccagaactgttatgagattaacatttctattgagaagcttttgagtaaagtactgtatttgttcatgaagatgactgagatggtaacacttcgtgtagcttaaggaaatgggcagaatttcgtaaatgctgttgtgcagatgtgttttccctgaatgctttcgtattagtggcgaccagtttctcacagaattgtgaagcctgaaggccaagaggaagtcactgttaaaggactctgtgccatcttacaaccttggatgaattatcctgccaacgtgaaaacctcatgttcaaagaacacttccctttagccgatgtaactgctggttttgtttttcatatgtgtttttcttacactcatttgaatgctttcaagcatttgtaaacttaaaaaatgtataaagggcaaaaagtctgaacccttgttttctgaaatctaatcagttatgtatggtttctgaagggtaattttattttagccgatgtaactgctggttttgtttttcatatgtgtttttcttacac

SEQ ID NO: 68168 - DNA, 2352 bp, Homo sapiens
aatataactatttattttcctagtgtagatgctttcagattagaattggcatttgcactgatttttttatgtagatttatataaatatatagatacatatatatttgcttgaagaatcaccaagcaaattggtgagagggtcttttccaatagaatttacacctccatttgttgtgttgtcttgcacttcccaatgttgatgtctctatggctccaatgaactggtgtattttgcagcaaatctgatgacttgtatggaaatggcatgaaagttacccagattacatctggtgcaaatgcactcggagcctggggccagactggtgctaacactgcaaactttgtccagagctctctccaacctgaaggcttgctgggggtgcaatgtcaccttcacacatgctgggccctttcagaaaagtgccagatcgtgtaactggtgctatttttcatgctctggtacaatgtgtagcaccacgggggtctcagctttaccaaaatcaaaattccatttgtcagctaagtgcagaggcatttgttttttgctctcctcccacagaattgtcggccatttatttgcaggccttttgcgggatttcttggctatttatttgcaggccttttttcccagccccaaattcttgggttggctctgtctgcttaaagagcctgtcttcacaaagctgcactcgggtgcctctgtgcgctgtcttagatcctactgccggcccttcaggactccgagccaggaaagaactctccaacctctggctcgagactctactttttttctcattcttttccttactctcctcctccttctacttccgactaattccatctcttttttttttttgttcctctccttttcctattcctccttcccaccatctctgagttgttgactttctcctataatccttctctattccctttctctttttgtccacctctcctttagtctctgtttctctgcccttcttattcctcttctgtcctttctcctctcctcaaatctctgatcatcttctcccgtacatccctgtattgatttttctgtcctctaaagggctcatggctgattcagacagcaagtccatgcactggactaatgacacaaatactttaggtcgccgtttcacctactcagcccagaaagtaaagctgagcgtgaggccctgacctggagcctgctccagcccgcctcccggagccagcctgcaccgttgccctggcagcgatgatgcatgtgctgtgggccctgccggcgcctgagtgcctctgcctgaacactgctcctaagcgagcccactcccagcactaccgcatggctctgaggacattttctttcaataaaggcagactctggccccaattattctgatagcaaacctcttcctcctcattgaagccatgccatcaccttggtttggagagagacatttttttcccattcataagctttctttttcccatttttatgtgaagccccctctgcttttcagctggtgattgctctggtgagactgaatgggacttgctggtgaaatgaaatctcttctttcctgtcttggtcctgcctaaattcctacaaatatatttaagccaaggactcaggctaattcctaagttgatcacattaatttgttactcctagagggaaaaagatcaattcccttgaagcatgtggagtacctcctgtgacagctgacttgccaggggactccctacagaattctgtgatatacattttacttctgtgtatgtatggtatatatggtatgtataccatgtacacacgttacattgagtatgaatgactgtggttggaaacacacacacacactcaagtctgtaaatatccttcctcactgaaacctgtgctttggaaatcatttcttgtacagctgtgcagtttcttgtaacagctgaggacaaagctaagacaggcggacaatttagacaaagatcatctaaagagtatagtatctccctagcaactcatgaggacagacaaccaagtggcaaggttgactcccaatgggatggcagacttttcttctctcctttttgagtttgtgtttcctaagtgtttcttaacttctgagtgcaccaggctgtacccgttagatcctttcaatatgacagttttgtgcttctctctgacaggatgtttctccaccgagctgtagcacaggatgggagggaggtgggaatactccttgcctaggctggagtttacagagacactgcacagcttacactcctgttaagtgtaaatattcaacacttccattccatttgtgtaaaaaataaagcacacacgattataaaatcaagatgtatatttca

SEQ ID NO: 68169 - DNA, 2498 bp, Homo sapiens
aatataactatttattttcctagtgtagatgctttcagattagaattggcatttgcactgatttttttatgtagatttatataaatatatagatacatatatatttgcttgaagaatcaccaagcaaattggtgagagggtcttttccaatagaatttacacctccatttgttgtgttgtcttgcacttcccaatgttgatgtctctatggctccaatgaactggtgtattttgcagcaaatctgatgacttgtatggaaatggcatgaaagttacccagattacatctggtgcaaatgcactcggagcctggggccagactggtgctaacactgcaaactttgtccagagctctctccaacctgaaggcttgctgggggtgcaatgtcaccttcacacatgctgggccctttcagaaaagtgccagatcgtgtaactggtgctatttttcatgctctggtacaatgtgtagcaccacgggggtctcagctttaccaaaatcaaaattccatttgtcagctaagtgcagaggcatttgttttttgctctcctcccacagaattgtcggccatttatttgcaggccttttgcgggatttcttggctatttatttgcaggccttttttcccagccccaaattcttgggttggctctgtctgcttaaagagcctgtcttcacaaagctgcactcgggtgcctctgtgcgctgtcttagatcctactgccggcccttcaggactccgagccaggaaagaactctccaacctctggctcgagactctactttttttctcattcttttccttactctcctcctccttctacttccgactaattccatctcttttttttttttgttcctctccttttcctattcctccttcccaccatctctgagttgttgactttctcctataatccttctctattccctttctctttttgtccacctctcctttagtctctgtttctctgcccttcttattcctcttctgtcctttctcctctcctcaaatctctgatcatcttctcccgtacatccctgtattgatttttctgtcctctaaagggctcatggctgattcagacagcaagtccatgcactggactaatgacacaaatactttaggtcgccgtttcacctactcagcccagaaagtaaagctgagcgtgaggccctgacctggagcctgctccagcccgcctcccggagccagcctgcaccgttgccctggcagcgatgatgcatgtgctgtgggccctgccggcgcctgagtgcctctgcctgaacactgctcctaagcgagcccactcccagcactaccgcatggctctgaggacattttctttcaataaaggcagactctggccccaattattctgatagcaaacctcttcctcctcattgaagccatgccatcaccttggtttggagagagacatttttttcccattcataagctttctttttcccatttttatgtgaagccccctctgcttttcagctggtgattgctctggtgagactgaatgggacttgctggtgaaatgaaatctcttctttcctgtcttggtcctgcctaaattcctacaaatatatttaagccaaggactcaggctaattcctaagttgatcacattaatttgttactcctagagggaaaaagatcaattcccttgaagcatgtggagtacctcctgtgacagctgacttgccaggggactccctacagaattctgtgatatacattttacttctgtgtatgtatggtatatatggtatgtataccatgtacacacgttacattgagtatgaatgactgtggttggaaacacacacacacactcaagtctgtaaatatccttcctcactgaaacctgtgctttggaaatcatttcttgtacagctgtgcagtttcttgtaacagctgaggacaaagctaagacaggcggacaatttagacaaagatcatctaaagagtatagtatctccctagcaactcatgaggacagacaaccaagtggcaaggttgactcccaatgggatggcagacttttcttctctcctttttgagtttgtgtttcctaagtgtttcttaacttctgagtgcaccaggctgtacccgttagatcctttcaatatgacagttttgtgcttctctctgacaggatgtttctccaccgagctgtagcacaggatgggagggaggtgggaatactccttgcctaggctggagtttacagagacactgcacagcttacactcctgttaagtgtaaatattcaacacttccattccatttgtgtaaaaaataaagcacacacgattataaaatcaagatgtatatttcatactcagtgtgtctgtgcatatttattgcgtttctagttgtcagcggtgggtggccccattgtaaaaatgcctgatagagtgtttataaacatgtcatggttttattataagatataaatattaaaacattttatactttatggca

SEQ ID NO: 68170 - DNA, 353 bp, Homo sapiens
ctcggtacccctcggctctaccttgtctctcggctctaccttgtctctcggctctaccttgtctcccgtacatccctgtattgatttttctgtcctctaaagggctcatggctgattcagacaaggtagagccgagctcggctctaccttgtctaccagcaatcgtactagacatgagaaggcctctggtgatggaaggaaggggatcaggaagccctcccatgccagtgtgtgcttggtttcagcatcactccccatatttccttaaacagctaaatcccaccatcccaccttcgcaaccaatctccatacttgaactttttctgttattaaatcgtgctgtatctgtgaat

SEQ ID NO: 68171 - DNA, 341 bp, Homo sapiens
tcactgttaattaactgttgatacacttaaaacagcttggttggcaatgtcctttttgaataaagaagagccaggtgtgtttttcaggatgaactagacaatgctgtcacaagtttacctctacatcttattgccttggaaaaatttcctgcatatcgtggcacaagatggttggctctccaggcagcagttggcgttgtgaatcagtcatctcagcatgtgtctccaagatcccacagcagggggaaaaagaggtggagggtcacatgcctggtgttacatactttgaggcagaggtggtaggtgccatttctgctcacagctcatggaccagaacaaag

SEQ ID NO: 68172 - DNA, 406 bp, Homo sapiens
cctcaaagcagaggtaaacagaggtgggaaattcccactgccaacctcactttccccactcctgggtggcagccaactgcctccatcataccaggcttcgcgcagttcccttccacgccctgtagttctgtgagtgcaggccccaacatgagcggctcccctctgcctggcacacccggtctgcctgacaaacacctactcctcctggcaggctctcccttcctgtgggtaactctcctaagcctccccaagaggcctgacaccattcctccccccaccgcattcaccacctctggtggttcatctctgcactctagcctcactgcctgtgtctcctgggagaacacaagctcctcgagggcagaggctgtacttcactcatcgccccagccatagcatagttccc

SEQ ID NO: 68173 - DNA, 295 bp, Homo sapiens
tgcactcctgatctttatatgtctcttctaaatgttaagcctctgggagagagaatttgccccagactgaggcaggcatctgccccctttatccaatctgcttgagggcagggctgttagtacctagtgtagacattttggcccatccgaggaatcactgtgagctaggtggacaccccaagaaatggcccttacatgaggtaaatactgatagctggccgactacaggcagcacagcctcactaactcatggaaacagctcagaaagcatggggcggtttccgtaattctggtt

SEQ ID NO: 68174 - DNA, 435 bp, Homo sapiens
tgttaaagtaacttggcttcccaggactggaattatcatggagcagttagaattttgagagtaattacaacaggatcacattctgaaagagtcacattttgtcaaaaatctgaaaagtatgcaatttgtacaactcttactttctatgtgataagaatgcaatatgtgcctctttcccctactagccccatgtgacacatatttttcacactatgtggcatcaaccagtgccattacctcctgtggcaccatagagcccaatctcagggcagacattgccaaggtaaagaatgcactccatgtttataccaaattgcacaaagtatagacattgaggttaatggagatttaagcacaatcctagcaagtaagttttaagaatactgaatattatacattattgtaacatgaacctaaaattaatttaacagggcc

SEQ ID NO: 68175 - DNA, 416 bp, Homo sapiens
cagggttcttgcaaaaaagagatggtactctcaaactaggtaatctagaagagttttaaagagataatttgcagaggacagggaagttcttaggacaaacaggagaggactacctggccatatagggagaactgtggtccttagagaaaggataaaaccaaaccaggataacctggtacggagtgagatgaaggaataaacacccagatcttattctcctgctattctcagggggaatctggggaggcaaatagaagatatccagaaaatcacttttctagaatttacaactaaagatatatgactctacttaaatgttttctttatgtaagaagaaattattcacattcaaaaaacagtgattttaaaaaatgaatttggctgaacttaagctaccaaggaagactgaaagtgtt

SEQ ID NO: 68176 - DNA, 839 bp, Homo sapiens
  misc_feature (105)..(105): n is a, c, g, or t
ctgggacccgtttcccttgtgcatgatgttatttaagatttcccctcacttgctcccagagttcttggtctaacgtgccttcttctgggaaccatgggttattgnaaacaacagtttgcattaggccccttaactgagcctccgagacccaggctctgctagctttaagcagctgtttcaatacttacatatagtgttgctgttgagctgataactgttgtcccatgatgaaaccctaggttgaaaattccctcaaacttggaaatcctgagtgggcaccaattacttacttcccgcacagtctcttcacctcatttttgggggttccatcgtgatctgttgcagcattcctcacacagggcaccagttgctgggtctgtcccacagaccctggctggacgatggatgaaacgagtactcagacgcagatatgcagtgtaagagcagctaggggactgcttggcactagcggccaaagagtgagcaggcaaacagctggagctgcttgcttttattcagtatagacataatgctgaaagcctggagcaaaaacaatctgtgggtaattaacattattgttcccctttcagggaacgggtcacgcatgtggatgatcaaaggtcagctcctggtcaatatgagaagactggtttcagaaaagttgagtgctgaagactacaaagctgtttgtaagttatcaagctaggatttgatcccaggtctgcctgataaatcctggactcttaaccatgacataggagtgccctcttgactcctatgatggcataaagaattgtatcagaacgggtaatctggcattaaaacccctgtgccacaac

SEQ ID NO: 68177 - DNA, 761 bp, Homo sapiens
gctttctgctgccccaggaatgggctgatttcctgagtacacattaatctgagctccctcagattggggattgggggcacaagatgggtggagccagatagggaagattcccccagtgttgtcctgctcccagtccaggtttgggacaatgccggcagcgtttccctgtgtctttcccccacaaagtctccaagtctttcctcaaatgatcgtcaaggtttgggagaaacaatctcttcctctgcccgggttgcgtggatctccagtggaaaggctttatctaccaagaaatgaattggataatccacataaacaaaaagcttggaaaatttatccaccagaatttgccgtggagatactttttggtatggtttctgtggattctctgctctttgtgctctcctccccacattggtggctccatctggcacagggaagcttctggatgtcagaaggtggattctcactctgtcacccaggctggagtgtagtggcacaatctttgctcacttcaacctctgccttctgcgttcgagcaattctcctgcctcagcctcccgagtaactgggattacagggacagtaagtggtgtttcctgggagatgctacggtgttatttttgcactacaagggctctgaagactgccaggcttgaagtgaagaaccacgtcacctgcctatcccagccaggtgacagtggacaaggggcttcacctctgagctgttttccagctgtactgggcacattcctcctctcacc

SEQ ID NO: 68178 - DNA, 718 bp, Homo sapiens
gctttctgctgccccaggaatgggctgatttcctgagtacacattaatctgagctccctcagattggggattgggggcacaagatgggtggagccagatagggaagattcccccagtgttgtcctgctcccagtccaggtttgggacaatgccggcagcgtttccctgtgtctttcccccacaaagtctccaagtctttcctcaaatgatcgtcaaggtttgggagaaacaatctcttcctctgcccgggttgcgtggatctccagtggaaaggaagaaccggaactatggtttgtgcctgccttattgcctccaaaatatttttaactgcagaggctttatctaccaagaaatgaattggataatccacataaacaaaaagcttggaaaatttatccaccagaatttgccgtggagatactttttggaacctggcttaccagtatatcaccccagcgttgacacactgggaacgggtcacgcatgtggatgatcaaaggtcagctcctggtcaatatgagaagactggtttcagaaaagttgagtgctgaagactacaaagctgtttgtaagttatcaagctaggatttgatcccaggtctgcctgataaatcctggactcttaaccatgacataggagtgccctcttgactcctatgatggcataaagaattgtatcagaacgggtaatctggcattaaaacccctgtgccacaac

SEQ ID NO: 68179 - DNA, 385 bp, Homo sapiens
gtgcagccagatttgaaaaacatttcatagaatattcttttcagaaacttgactgaaaatgaaaggtgaggatttagggtagtttctactcggaggtggaaattgtgagagaaaataagagacttgactgtaagaactatgacagagccactgtgtctaaacattagttgaaaatacttgagatcagaattcaggttatggtagaaatgaaagtatagaaatcaaagtcactggtagaaaaatcccctctaaaaagagaatggtgaaaagctcatcctgtgggcctatagaaaaagatgtgaaaatgagtaaaattctaattcgattgcttttctttttatttgttatataaagagatacagacaagacattgaaggaatcttac

SEQ ID NO: 68180 - DNA, 245 bp, Homo sapiens
tatatacattattctccccacctcgtccgaacgcccgtcaaaaagttagctaggcatggacattcacttttgcagatgaggaaacaagaattcagagttgatttgcacatacgaagcaaaacaagtgagatccaagcctccagactctacaacagatgcttccaatatctatgtctaatgaagtaaactactctgaaaatcaaaatgtgtattttttaaattaataaaaactttctttctacctc

SEQ ID NO: 68181 - DNA, 243 bp, Homo sapiens
atataagtaatttcaattaaagagcaagggccggagcgagggtgtcactaggcatggacattcacttttgcagatgaggaaacaagaattcagagttgatttgcacatacgaagcaaaacaagtgagatccaagcctccagactctacaacagatgcttccaatatctatgtctaatgaagtaaactactctgaaaatcaaaatgtgtattttttaaattaataaaaactttctttctacctc

SEQ ID NO: 68182 - DNA, 241 bp, Homo sapiens
accaccactaaccacagagacatgtaatgataaaaatttctgttgctaggcatggacattcacttttgcagatgaggaaacaagaattcagagttgatttgcacatacgaagcaaaacaagtgagatccaagcctccagactctacaacagatgcttccaatatctatgtctaatgaagtaaactactctgaaaatcaaaatgtgtattttttaaattaataaaaactttctttctacctc

SEQ ID NO: 68183 - DNA, 500 bp, Homo sapiens
tgagcagcgtgcccatgcctgagcccgtgccgccgcccagcgagtgcgtgagctggaagccctgcaggcagtcgcagtgctcgcactccttccgcaccacgtcacagcactgcgtccaccacgtccgcgccctccgtgtagtgccctttcgcccagttgttccctgcacccgtctggcctgcaacaaagagagtcccgtgccgtttaaacaggaaagcgtgcgccatcaccatgcttggtcaccgacaaggagggtgtgaagtgattccatgatgtgctgttagccaaagggaggggccggggaaacaggcacccaccaacggtgcagctgagcagatgcactgctaggcatggacattcacttttgcagatgaggaaacaagaattcagagttgatttgcacatacgaagcaaaacaagtgagatccaagcctccagactctacaacagatgcttccaatatctatgtctaatgaagtaaactactctgaaaatcaaaa

SEQ ID NO: 68184 - DNA, 949 bp, Homo sapiens
  misc_feature (619)..(619): n is a, c, g, or t
  misc_feature (769)..(769): n is a, c, g, or t
  misc_feature (867)..(867): n is a, c, g, or t
ggcaacataacaatcacaattcatcataatctaccacaatcccagttagcgaggacaaccacttttgtttatgagaacaccggaaacaagaattcagagttgatttgcacatacgaagcaaaacaagtgagatccaagcctccagactctacaacagatgcttccaatatctatgtctaatgaagtaaactactctgaaaatcaaaacgggcccttttcaaacccaaccccccccttccctctacctgtaaacaaaacaaaaaatggcctcattgcccccatttggtggacctcttgcggacgctacccccttaactgaggcagaatccacccacccccccatccactcactggcctttatcacgccccgcgccccccaccgcgccccacacgacacccccccctccactccccgctactccgggttaagccccacaaaacactccccatgcaccggcatgccagatccgcccccgccccgcccggcccccgttcctccccctcccttattgtcacccacagctcccctccccaccatcccaccccctactcaattccacccacgtgcgagagttatgtcaccccccggacgcttccctcgccctcaccgtcacagtcngcaccccagcaccgcaccccccccgccctcccgccaccattcccactccctctgccctcccccctccatcgacggacacgctacccaccaaaccccaaacaggcagggctatgatatcggccaaagcaagccatccgcaagtattgtggnccctgagacgtgcccagatacattaccccacaccctcccgccacgcgccaagtatgcgcttcatcagttcctctcattcgtccgcacacccccgccantcccctctccacaagctttcataccacgaacaattgcgatcccgtctacaaagagtccagccgccccatcgcccatcgatgg

SEQ ID NO: 68185 - DNA, 224 bp, Homo sapiens
  misc_feature (58)..(58): n is a, c, g, or t
gcacacctaacgtccccatgccaggggaaggaggcctgtggtgactaccccttgctgnggaaacaagaattcagagttgatttgcacatacgaagcaaaacaagtgagatccaagcctccagactctacaacagatgcttccaatatctatgtctaatgaagtaaactactctgaaaatcaaaatgtgtattttttaaattaataaaaactttctttctacctc

SEQ ID NO: 68186 - DNA, 194 bp, Homo sapiens
tccttcactccctacacatacactcaatcagacccacaaacacgtttagcaggccataacttttgttcggaaacaagaattcagagttgatttgcacatacgaagcaaaacaagtgagatccaagcctccagactctacaacagatgcttccaatatctatgtctaatgaagtaaactactctgaaaatcaaaa

SEQ ID NO: 68187 - DNA, 962 bp, Homo sapiens
ctaatattaagagagcaaaatagttgatgattagtttattagtatctcaaaataatccatttgatgtgctaaggtgctattagttacaacatttcaagtatacatgcaattcttgttagaaatattatccaccttttgaaatacatgttgattaaagactaacatgggctgtgggcataggtacagtaacagcataccataggccggagaaagagttgactttggaggtccaagatcaagaagcaggatgtctaacagggctcttgagaattctagggcagccggtactcgaaaggcaagatttgattgtgaatgatttcatgcaactccgttggttaataagcaaatcctgcccacacttgtggataacatggaagctacctgagcaggtaaaggctaagacagaagatccatgaacagaactggagttttgataattcaccaggaacttggttactttgttgtaccttttatgcttttatatttcttcttccctttcatttccatgcaacgtatttataacttgtagctagatttttagattactgccagacaaattcagtcaatttaattaattaggcaaattaaagtgaaaattatgttttaggggctgttaaaatttataagacgttagcacattcttctcatgtgcttttattattattacaaatgttgtttcataattagccatgtgttaattgttagcttggggaatgatttacgtgtttaaaattgggagaaatcattttggctatggctacctcttttaatttacttacatatttttttcccatcacacagtgtttgacttttacaaccacataaattttgattagaacctgaaataattcagtaaaacaagatgatggttttttgttctgctcaatctttgtatcataaccttcacttctcaatgctcaaatgatggaatgaaaagtggacaattcttgactgcatcgtgc

SEQ ID NO: 68188 - DNA, 205 bp, Homo sapiens
aagccactctgatatcagtcagttctgagattccttatttgaacttgatttcctgggccctgatggacactagcataactgtccaggcagcaggatgaagaaagtcatgaagagcacacttgcccgtcacacacggcttctgcttttacctcatggaccaaaacttagtcttgtggccacatctagctgcaagtgaagctggcaa

SEQ ID NO: 68189 - DNA, 424 bp, Homo sapiens
tcacctgtgaaatgaggacagtaaggacacaagtatcagcttcatggagttgttgtaaaaattaggaaaaataatgcatccaaatcacttggcatagtgcctggcacgtagttgtgttaactgttaattatagcacttgtccgtttttgctatttaagttttttttttctttctttcttcctgttagtcatttttagaataggaaaaattgccagataaactaactggttgaattcagcgtcaatcagatgtcaccctaataatggtcaaataagttagtagtaatctattatctctggtgtccaaaagttttcactggggtgtctgtggatgaaacacagagttggagttgagatttcttcacttccatccttccattccaatatcagatgtaattttttcttaatgtctgagaataatagta

SEQ ID NO: 68190 - DNA, 307 bp, Homo sapiens
attcccaaaaatagagtctggacctcttaccgctacaaattccaggttctcaggtacagcctgagagtatgcagatataatacaccacagatgattctctcccttttttttttttttttttgagacagaatctcattctgtcacccaggctggagtgcagtgggctgatctcggctcactactgctcccgcctcctggattcaagcaattctcctgcctcagcctcccgagtagctgggactacaggtgcacaccaccatgcccatccaatttttgtatttttagtatagttggggtttcaccatgt

SEQ ID NO: 68191 - DNA, 1321 bp, Homo sapiens
taaaaaagttatttcaatcaagtcttagttttattcctcactatataggaaaaaaatctttaatgcctcaaaagttccattcagcattacatttgcattactcttatttgcagcaaatatgagtaaaattataggtttttaaaggtctctaataacatccacttatattggttttgtagataatccataaattaccagaaataaattattccacatttattacacacccatgtaatagatgtcgtgccaggccctggaatatactaatggcatcacctcatgtggtaaaaagacacattccgccatcctggagtatacaaaggtagactagcatatagttcatgtgctcaaggagttcatttttattgacatgatacagatagaattgtagtttagggaatcaaaatctaataaaatgaggctaattccattttcccattaacactaataactagtgtgtaaatctgaatatgacacattctatatgaaagaagctctgtgtgcatctacactaaatactcgtgtgtgccaggtactgttttaaactacgtatatttttttaattctcataactgttctctgaggtatgtactaatactaaagcttattgttaaaggaaggcagaaaaattaagtaacttggcctaagtttgcataactgtgatctgggatcaatatttgaacccatacaggctgattgcagagcctgcactcttaatttgagtgtgatatttatgtgcagtacctggctataagtacccacaaaacgtttcaaattctttataaaatttgcttagttaaaaaagtaccaattgcataatatggttataagtctggtagaagttaggctttttacaagacatgctgcttactgcaccaaggaggcaagaaggctttttagagagcccagaatttcctttcctcaactcctgcttccaagacagtcattttgcatgataaccgtttccccaaaaaacacagacacaaaatttaaagaactggaacagaggaagcagagcttatcatagtatatatgtttagtaccctgtcacttaggtccacccctctttctttgtggattgtggacattttgtttaactgctaaatcatgagaatatatgactgctgagacttttccaaggattttttaaaaaacacattaggctttgtgcagaagtaaagaaaaagtgctgtgagaaccccaggtaggtaatttactttctattgtactcatagtttgtttgaaacctcttcacctctatcccttattgttttatactctgtaaatctgattttacctttaataaacttttctgaagtga

SEQ ID NO: 68192 - DNA, 1460 bp, Homo sapiens
taaaaaagttatttcaatcaagtcttagttttattcctcactatataggaaaaaaatctttaatgcctcaaaagttccattcagcattacatttgcattactcttatttgcagcaaatatgagtaaaattataggtttttaaaggtctctaataacatccacttatattggttttgtagataatccataaattaccagaaataaattattccacatttattacacacccatgtaatagatgtcgtgccaggccctggaatatactaatggcatcacctcatgtggtaaaaagacacattccgccatcctggagtatacaaaggtagactagcatatagttcatgtgctcaaggagttcatttttattgacatgatacagatagaattgtagtttagggaatcaaaatctaataaaatgaggctaattccattttcccattaacactaataactagtgtgtaaatctgaatatgacacattctatatgaaagaagctctgtgtgcatctacactaaatactcgtgtgtgccaggtactgttttaaactacgtatatttttttaattctcataactgttctctgaggtatgtactaatactaaagcttattgttaaaggaaggcagaaaaattaagtaacttggcctaagtttgcataactgtgatctgggatcaatatttgaacccatacaggctgattgcagagcctgcactcttaatttgagtgtgatatttatgtgcagtacctggctataagtacccacaaaacgtttcaaattctttataaaatttgcttagttaaaaaagtaccaattgcataatatggttataagtctggtagaagttaggctttttacaagacatgctgcttactgcaccaaggaggcaagaaggctttttagagagcccagaatttcctttcctcaactcctgcttccaagacagtcattttgcatgataaccgtttccccaaaaaacacagacacaaaatttaaagaactggaacagaggaagcagagcttatcatagtatatatgtttagtaccctgtcacttaggtccacccctctttctttgtggattgtggacattttgtttaactgctaaatcatgagaatatatgactgctgagacttttccaaggattttttaaaaaacacattaggctttgtgcagaagtaaagaaaaagtgctgtgagaaccccaggtaggtaatttactttctattgtactcatagtttgtttgaaacctcttcacctctatcccttattgttttatactctgtaaatctgattttacctttaataaacttttctgaagtgagtgagttttttttgtcttatttcccattagattctctaccttctttgttcactttacgtatgttattgccactcccttcaaaactggtggtttaattaaagtgacagcatcttctatatacccagtactgttgaggatt

SEQ ID NO: 68193 - DNA, 570 bp, Homo sapiens
gtcacggtgcttggtcgcgttattgggtccgggaattcagagaatctcgttgtccagggccagctgatacttcaccctcttatcccaacgccaacccttgatagatgcgaaccagtcgtatttcctttgtgggaaaggagtcgctttttaaagacgtgcactggccatctagggaggagcttttacttcaactcaaaataggactggagctgactggtgacctggcgctcgatggacggaaacgctgttcttgccgcttcggcagctcccatactggtgggagaggcaaacttgcagtctgctcatcttaagatggtgaatgttgagatagggttgctcccgaaaagccgagaagaggagccgtttgacccaacttgagggtgatccgatagacactctttagggcgtctgcagagtgggtgcgcgtggagacagtcaataagagaaaatcgtaaatacagatggtattctaaatctagcatgcatgtaaagttgtgtgacattttaaagattacattttacactttagtattgttttcatttttaatcacataaatgggggaacaccat

SEQ ID NO: 68194 - DNA, 478 bp, Homo sapiens
gtcacggtgcttggtcgcgttattgggtccgggaattcagagaatctcgttgtccagggccagctgatacttcaccctcttatcccaacgccaacccttgatagatgcgaaccagtcgtatttcctttgtgggaaaggagtcgctttttaaagacgtgcactggccatctagggaggagcttttacttcaactcaaaataggactggagctgactggtgacctggcgctcgatggacggaaacgctgttcttgccgcttcggcagctcccatactggtgggagaggcaaacttgcagtctgctcatcttaagatggtgaatgttgagatagggttgctcccgaaaagccgagaagaggagccgtttgacccaacttgagggtgatccgatagacactctttagggcgtctgcagagtgggtgcgcgtggagacagtcaataagagaaaatcgtaaatacagatggtattctaaatcta

SEQ ID NO: 68195 - DNA, 1253 bp, Homo sapiens
  misc_feature (564)..(564): n is a, c, g, or t
  misc_feature (1242)..(1242): n is a, c, g, or t
gggagagctggattagcaaaggccaaccaggagcccatcctcctgcagacccatctccaaataccatcccattgggggttaagttttcagtgtatgaattagggagacacagttcagtctactgcacccacctacctactttaggaagaaaacatggagttgtcaactttattcggtagtgtcacatttagacgtggcttctctgccctcctgggaacactctgctcctctggcaacatggtgtatggctcaatccaccttctcgccactgcatccctactgctcagtccctccttttcacgagtggttggctggacttctctttcatagacacattcgctactacaagtccagtcacaaggttaatgagctcagtttccatgctgataactcctccaacagcttgacctcagttccttgttctcttcactccatttacatttacttgctcttgaacatgacttcatccactgattctcatagtcaaacaccagatcaaaattcacctttgctgaaatgccatgctctggtcacacttacctgtccttccagctttgtgatgancacacagctattcatttttcccagaggtgccagtccattttccaccccatccctttcttttagtcccctttatctgagctcactttcccaatctaagcaggattatgtggcttttcaattaagacactcttgctaatattttaaattcccttggcctattgtcttttcagtgtatttgttggtcttttcaatgtatttattcagtggtctccagcttcagctctcttcactcctattcttatcggaggttctacttccctgaggaaaaagtcagtcattgtatggacagtctttgaccttctgtcctgccctctgtcagccagactttgtactcataatcattctagtctgttatcctgtttatcacagaaataattttaagacattgatattgggcccgttgcagtggctcatgcctgtaatcccagcactttgggagaccaaggtgagtgtattgcatgagtccaggagttcaggaccagcccaggcaacatggcaaaaccccatctctacaaaaaaatacaaaaaaaaaaaaaatagttggatgtggtgggtgtatctgtggtcccaactactcaggaggctgagtggaaggatcacctgaacccaagaggcagagtttgcagtgagctatgattgttccactgcactccagcctgggcaacagagtgagatccntctcaaaaaaa

SEQ ID NO: 68196 - DNA, 476 bp, Homo sapiens
  misc_feature (26)..(26): n is a, c, g, or t
  misc_feature (72)..(72): n is a, c, g, or t
atggctgaaactggcccgcaaggagnatgtcactgttaagatcaggaaaaaatgtaagagtttacggttctntcctgtcacgctccaagttggggtatatttagacattcatgagtagttgctggtgttcatttaattgtatatgtaaagtgtaattataatgtgcctggcctccttatattaattttcagtgacagaattgaaatattttaaactctcagtttagtactttcttaaatgattatgttgaattttttttggtttttaaaatttttaattttattattattattattttttgagacagagtctcaatttgttgcccaggctggagtataatggtgcaatcttggctcactgcagccttaacctttgggcgcagatgatcctccaacctcagcctcccaagtagctgggactataggcgtgtgccaccatgaccagctaatttttttttaatagagacagggttttgc

SEQ ID NO: 68197 - DNA, 233 bp, Homo sapiens
gttagtcatcttagttactgagttttctaaggccacctaaatttcatactcaaggcgagtgcttcctttgtcttcccctaatcccaggcctggaaaaagccatcatatcaatgttttaaagatcactttcttatagtgatgagtacgggttgctaaagactttggtggttaaaaaccgagaaattgagggaaattcagtatctatcataatagtttaggtggaaaaccacaga

SEQ ID NO: 68198 - DNA, 393 bp, Homo sapiens
ccattgtctttgtcgatctccggacttatttctccttgagccacggatacagcttttttctgactttgcacctctgtgcgatacatgtattgggttttcaaaatgaaatgtgagctgagctttcctatgttggcgcattctcgtttatgctaaagtgttactttttattggctccgatttgaaaattcaactacctgaacctcgtgggatcccttcgtctgtagggagcttgaagttgatctccccccatctgcattcatgcctggagaatattgattttagggcttattcctaaagtcatttcatgggacacaccctagatcaaaactttcttttttcacttgattattattaaacttgtcattatggacattttcaaacgtctccaaaggt

SEQ ID NO: 68199 - DNA, 185 bp, Homo sapiens
tacaatggagatcatatagctcacaaagcttaaaatatacattatctggccctctacagaaaagtttgctgactcatattgtaagccataaaactatgttctctgaccacacggaatatattcttagtaacagaaacatatctagaagtccccaaatacatggaaacaaaaaaccacacatctaa

SEQ ID NO: 68200 - DNA, 606 bp, Homo sapiens
tattaaaacagaaggggaaacaaaaggagactgagaggattgcttttgaagggtcatgttgcagcggcttctgctggatactaaaaagcaaattattatcgggggttgtttgtcattcacaggaggaattggattcctttatgtttataaagtcaccttggtatctggaaggagagcagaaactaacagagcctactttacttaaggcccctggcgctggttctctctggaggttgagtttccgtggggagagaagagtgcccagcgtgaccaccgttggctgacttcccatgccttattccttgtttcccccgctggggcccagcccaccagccccgcagtgcatgaagccacttatcaccacggttcccagagaggacgggctggcccaagtctgcattgtcacctgctctggggaaaacaaagccctctcccccgccctccccgcagcatgctgggcacagggccagcccgttctatgttttcagtaaattttcaaacatgctggttttggtggcagcttttgcagtgattatctcattaggggcttggccctgaaacaccttatttattgtggattgaaaaaagttcaccttttcaagcaaa

SEQ ID NO: 68201 - DNA, 350 bp, Homo sapiens
ctttttttctaaacaaggtcacattcacagtttcacattcacaggttccgggagatgcctttcaaaccacttcagccattcaacctgccacaataaccctatttgattgtttatctgatttttccctacaatggttgatgccccaaattatagctccaacacatttgatctgaatatttagtactcttgaaatatatttttaaatttctctcaaaaggataatcattttgtgccttctgatatacaaggtgtgagtgttgtcaacagttttccatgattcactccattctgggacttgcaatagcaagcaactgagaacttctaaaactacttaatttttatttcttctg

SEQ ID NO: 68202 - DNA, 275 bp, Homo sapiens
catatgaggtaattctgattgtttatatatacacatctttgtttatatgagtaaatatgtatggatgtataacgcataaaaacaaagttattggaaatgtatgatactttatagttgaattatataaacaaatatttgttttgtgtaaaacaaactaaatagttaaaattatttgactcctattttaggaggtaaatgtagtaaatgttttgaacagaaaatatatgacaaagtgctatggtaccacaagcttaatgcaattctcaaattgcttt

SEQ ID NO: 68203 - DNA, 117 bp, Homo sapiens
taagcaccaaattttgttgttttttttttctcccctccccacagatcccatctcaaatcattctgttaaccaccattccaacaggtcgaggagagcttaaacaccttcttcctctgc

SEQ ID NO: 68204 - DNA, 2330 bp, Homo sapiens
cgccctgccagccggcagcaaagggccctgggcaaactccaggaggcggaggaggctagtggcagtacctgggcaccctgaccctccccacaggccagagcccaccctcctgctcatgagggcagacaggcctttccagggacacagtccctcttctccccaggaccccagggccaactccccctgccggccctctgccatcaaattggcagtggctccaggggagtcccctggggatgggggaccactgttggggacccctctgcgtgcacccctgtagttggggaagcaggacaggggcctggggagacggaagggcgccaggggttgagagaggatggtggacgttgttggacttgaaagggaaacaggccctcggggaagcccctggccaggcctgcctctcccctccctggtgggcccagcgcccctgctcacttgtctctgcccacagtgcctgtctgtggaggacgccctgggcctgggcgagcctgaggggtcagggctgcccccgggcccggtcctggaggccaggtacgtcgcccgcctcagtgccgccgccgtcctgtacctcagcaaccccgagggcacctgtgaggacactcgggctggcctctgggcctctcatgcagaccacctcctggccctgctcgagagccccaaggccctgaccccgggcctgagctggctgctgcagaggatgcaggcccgggctgccggccagacccccaagacggcctgcgtagatatccctcagctgctggaggaggcggtgggggcgggggctccgggcagtgctggcggcgtcctggctgccctgctggaccatgtcaggagcgggtcttgcttccacgccttgccgagccctcagtacttcgtggactttgtgttccagcagcacagcagcgaggtccctatgacgctggccgagctgtcagccttgatgcagcgcctgggggtgggcagggaggcccacagtgaccacagtcatcggcacaggggagccagcagccgggaccctgtgcccctcatcagctccagcaacagctccagtgtgtgggacacggtatgcctgagtgccagggacgtgatggctgcatatggactgtcggaacaggctggggtgaccccggaggcctgggcccaactgagccctgccctgctccaacagcagctgagtggagcctgcacctcccagtccaggccccccgtccaggaccagctcagccagtcagagaggtatctgtacggctccctggccacgctgctcatctgcctctgcgcggtctttggcctcctgctgctgacctgcactggctgcaggggggtcgcccactacatcctgcagaccttcctgagcctggcagtgggtgcactcactggggacgctgtcctgcatctgacgcccaaggtgctggggctgcatacacacagcgaagagggcctcagcccacagcccacctggcgcctcctggctatgctggccgggctctacgccttcttcctgtttgagaacctcttcaatctcctgctgcccagggacccggaggacctggaggacgggccctgcggccacagcagccatagccacgggggccacagccacggtgtgtccctgcagctggcacccagcgagctccggcagcccaagcccccccacgagggctcccgcgcagacctggtggcggaggagagcccggagctgctgaaccctgagcccaggagactgagcccagagttgaggctactgccctatatgatcactctgggcgacgccgtgcacaacttcgccgacgggctggccgtgggcgccgccttcgcgtcctcctggaagaccgggctggccacctcgctggccgtgttctgccacgagttgccacacgagctgggggacttcgccgccttgctgcacgcggggctgtccgtgcgccaagcactgctgctgaacctggcctccgcgctcacggccttcgctggtctctacgtggcactcgcggttggagtcagcgaggagagcgaggcctggatcctggcagtggccaccggcctgttcctctacgtagcactctgcgacatgctcccggcgatgttgaaagtacgggacccgcggccctggctcctcttcctgctgcacaacgtgggcctgctgggcggctggaccgtcctgctgctgctgtccctgtacgaggatgacatcaccttctgataccctgccctagtcccccacctttgacttaagatcccacacctcacaaacctacagcccagaaaccagaagcccctatagaggccccagtcccaactccagtaaagacactcttgtccttgga

SEQ ID NO: 68205 - DNA, 2180 bp, Homo sapiens
ggctgtaccggccggagattttgggatcaccccagcaaagccgccctcagccagcccagaagcactgggccttggccacagcaacacccactgagcacgctgggagctgagtatggcgtccctggtctcgctggagctggggctgcttctggctgtgctggtggtgacggcgacggcgtccccgcctgctggtctgctgagcctgctcacctctggccagggcgctctggatcaagaggctctgggcggcctgttaaatacgctggcggaccgtgtgcactgcaccaacgggccgtgtggaaagtgcctgtctgtggaggacgccctgggcctgggcgagcctgaggggtcagggctgcccccgggcccggtcctggaggccaggtacgtcgcccgcctcagtgccgccgccgtcctgtacctcagcaaccccgagggcacctgtgaggacactcgggctggcctctgggcctctcatgcagaccacctcctggccctgctcgagagccccaaggccctgaccccgggcctgagctggctgctgcagaggatgcaggcccgggctgccggccagacccccaagacggcctgcgtagatatccctcagctgctggaggaggcggtgggggcgggggctccgggcagtgctggcggcgtcctggctgccctgctggaccatgtcaggagcgggtcttgcttccacgccttgccgagccctcagtacttcgtggactttgtgttccagcagcacagcagcgaggtccctatgacgctggccgagctgtcagccttgatgcagcgcctgggggtgggcagggaggcccacagtgaccacagtcatcggcacaggggagccagcagccgggaccctgtgcccctcatcagctccagcaacagctccagtgtgtgggacacggtatgcctgagtgccagggacgtgatggctgcatatggactgtcggaacaggctggggtgaccccggaggcctgggcccaactgagccctgccctgctccaacagcagctgagtggagcctgcacctcccagtccaggccccccgtccaggaccagctcagccagtcagagaggtatctgtacggctccctggccacgctgctcatctgcctctgcgcggtctttggcctcctgctgctgacctgcactggctgcaggggggtcgcccactacatcctgcagaccttcctgagcctggcagtgggtgcactcactggggacgctgtcctgcatctgacgcccaaggtgctggggctgcatacacacagcgaagagggcctcagcccacagcccacctggcgcctcctggctatgctggccgggctctacgccttcttcctgtttgagaacctcttcaatctcctgctgcccagggacccggaggacctggaggacgggccctgcggccacagcagccatagccacgggggccacagccacggtgtgtccctgcagctggcacccagcgagctccggcagcccaagcccccccacgagggctcccgcgcagacctggtggcggaggagagcccggagctgctgaaccctgagcccaggagactgagcccagagttgaggctactgccctatatgatcactctgggcgacgccgtgcacaacttcgccgacgggctggccgtgggcgccgccttcgcgtcctcctggaagaccgggctggccacctcgctggccgtgttctgccacgagttgccacacgagctgggggacttcgccgccttgctgcacgcggggctgtccgtgcgccaagcactgctgctgaacctggcctccgcgctcacggccttcgctggtctctacgtggcactcgcggttggagtcagcgaggagagcgaggcctggatcctggcagtggccaccggcctgttcctctacgtagcactctgcgacatgctcccggcgatgttgaaagtacgggacccgcggccctggctcctcttcctgctgcacaacgtgggcctgctgggcggctggaccgtcctgctgctgctgtccctgtacgaggatgacatcaccttctgataccctgccctagtcccccacctttgacttaagatcccacacctcacaaacctacagcccagaaaccagaagcccctatagaggccccagtcccaactccagtaaagacactcttgtccttgga

SEQ ID NO: 68206 - DNA, 960 bp, Homo sapiens
cgggcgggacttactcaaggctcctcccaggtggcggaggagagcccggagctgctgaaccctgagcccaggagactgagcccagagttgaggctactgccctatatgatcactctgggcgacgccgtgcacaacttcgccgacgggctggccgtgggcgccgccttcgcgtcctcctggaagaccgggctggccacctcgctggccgtgttctgccacgagttgccacacgagctgggggacttcgccgccttgctgcacgcggggctgtccgtgcgccaagcactgctgctgaacctggcctccgcgctcacggccttcgctggtctctacgtggcactcgcggttggagtcagcgaggagagcgaggcctggatcctggcagtggccaccggcctgttcctctacgtagcactctgcgacatgctcccggcgatgttgaaagtacgggacccgcggccctggctcctcttcctgctgcacaacgtgggcctgctgggcggctggaccgtcctgctgctgctgtccctgtcctaggcccgtgcctgatccaggatccaagctcccggaagctggcactgggcccgccctgggtaggcagcagtgagcaaggcgggcggacagcgctgggctcgcggggtcctgcgtcctccgcgggagtgttggcggcgggggtcgctctgcgcggggacactgggcagagggggcgtgcggcctctctaggaagctttctcggagccccagacactggcgaggcgccgcgccccctcttctggattccggcgcgccccctgaacccgggagctacgagcggagtcgcttctccctgcagccgtcctgggtctggcgcggacgcaccccccggccgaccccgagccgctgcagccggcgcccctgcggcttccaacccgcgctgctccgcccgcagcggaggccccgcacttcgcgcgataggggttt

SEQ ID NO: 68207 - DNA, 492 bp, Homo sapiens
cacgcctttttcttgggcgtaacgatactttcttgttttatttctcatgattccgtttctaggtcctaggcccgtgcctgatccaggatccaagctcccggaagctggcactgggcccgccctgggtaggcagcagtgagcaaggcgggcggacagcgctgggctcgcggggtcctgcgtcctccgcgggagtgttggcggcgggggtcgctctgcgcggggacactgggcagagggggcgtgcggcctctctaggaagctttctcggagccccagacactggcgaggcgccgcgccccctcttctggattccggcgcgccccctgaacccgggagctacgagcggagtcgcttctccctgcagccgtcctgggtctggcgcggacgcaccccccggccgaccccgagccgctgcagccggcgcccctgcggcttccaacccgcgctgctccgcccgcagcggaggccccgcacttcgcgcgataggggttt

SEQ ID NO: 68208 - DNA, 1860 bp, Homo sapiens
cgccctgccagccggcagcaaagggccctgggcaaactccaggaggcggaggaggctagtggcagtacctgggcaccctgaccctccccacaggccagagcccaccctcctgctcatgggggctccgggcagtgctggcggcgtcctggctgccctgctggaccatgtcaggagcgggtcttgcttccacgccttgccgagccctcagtacttcgtggactttgtgttccagcagcacagcagcgaggtccctatgacgctggccggtgaggcctgggctgggctgtggaggggggcacccccgattccccagcctccacgtccctggggggcagggccggaacccacacagactcgcggtgccaactcttctccctgccagagctgtcagccttgatgcagcgcctgggggtgggcagggaggcccacagtgaccacagtcatcggcacaggggagccagcagccgggaccctgtgcccctcatcagctccagcaacagctccagtgtgtgggacacggtgagctgcgccctggggtaagatggggcctcaccggggtctgcttgggcccctgagcctgtcctgccaccccccaggtatgcctgagtgccagggacgtgatggctgcatatggactgtcggaacaggctggggtgaccccggaggcctgggcccaactgagccctgccctgctccaacagcagctgagtggagcctgcacctcccagtccaggccccccgtccaggaccagctcagccagtcagagaggtatctgtacggctccctggccacgctgctcatctgcctctgcgcggtctttggcctcctgctgctgacctgcactggctgcaggggggtcgcccactacatcctgcagaccttcctgagcctggcagtgggtgcactcactggggacgctgtcctgcatctgacgcccaaggtgctggggctgcatacacacagcgaagagggcctcagcccacagcccacctggcgcctcctggctatgctggccgggctctacgccttcttcctgtttgagaacctcttcaatctcctgctgcccagggacccggaggacctggaggacgggccctgcggccacagcagccatagccacgggggccacagccacggtgtgtccctgcagctggcacccagcgagctccggcagcccaagcccccccacgagggctcccgcgcagacctggtggcggaggagagcccggagctgctgaaccctgagcccaggagactgagcccagagttgaggctactgccctatatgatcactctgggcgacgccgtgcacaacttcgccgacgggctggccgtgggcgccgccttcgcgtcctcctggaagaccgggctggccacctcgctggccgtgttctgccacgagttgccacacgagctgggggacttcgccgccttgctgcacgcggggctgtccgtgcgccaagcactgctgctgaacctggcctccgcgctcacggccttcgctggtctctacgtggcactcgcggttggagtcagcgaggagagcgaggcctggatcctggcagtggccaccggcctgttcctctacgtagcactctgcgacatgctcccggcgatgttgaaagtacgggacccgcggccctggctcctcttcctgctgcacaacgtgggcctgctgggcggctggaccgtcctgctgctgctgtccctgtacgaggatgacatcaccttctgataccctgccctagtcccccacctttgacttaagatcccacacctcacaaacctacagcccagaaaccagaagcccctatagaggccccagtcccaactccagtaaagacactcttgtccttgga

SEQ ID NO: 68209 - DNA, 668 bp, Homo sapiens
cacagaggaggtggccagcacagcggaggagagcccggagctgctgaaccctgagcccaggagactgagcccagagttgaggctactgccctatatgatcactctgggcgacgccgtgcacaacttcgccgacgggctggccgtgggcgccgccttcgcgtcctcctggaagaccgggctggccacctcgctggccgtgttctgccacgagttgccacacgagctgggggacttcgccgccttgctgcacgcggggctgtccgtgcgccaagcactgctgctgaacctggcctccgcgctcacggccttcgctggtctctacgtggcactcgcggttggagtcagcgaggagagcgaggcctggatcctggcagtggccaccggcctgttcctctacgtagcactctgcgacatgctcccggcgatgttgaaagtacgggacccgcggccctggctcctcttcctgctgcacaacgtgggcctgctgggcggctggaccgtcctgctgctgctgtccctgtacgaggatgacatcaccttctgataccctgccctagtcccccacctttgacttaagatcccacacctcacaaacctacagcccagaaaccagaagcccctatagaggccccagtcccaactccagtaaagacactcttgtccttgga

SEQ ID NO: 68210 - DNA, 2273 bp, Homo sapiens
ggctgtaccggccggagattttgggatcaccccagcaaagccgccctcagccagcccagaagcactgggccttggccacagcaacacccactgagcacgctgggagctgagtatggcgtccctggtctcgctggagctggggctgcttctggctgtgctggtggtgacggcgacggcgtccccgcctgctggtctgctgagcctgctcacctctggccagggcgctctggatcaagaggctctgggcggcctgttaaatacgctggcggaccgtgtgcactgcaccaacgggccgtgtggaaagtgcctgtctgtggaggacgccctgggcctgggcgagcctgaggggtcagggctgcccccgggcccggtcctggaggccaggtacgtcgcccgcctcagtgccgccgccgtcctgtacctcagcaaccccgagggcacctgtgaggacactcgggctggcctctgggcctctcatgcagaccacctcctggccctgctcgagagccccaaggccctgaccccgggcctgagctggctgctgcagaggatgcaggcccgggctgccggccagacccccaagacggcctgcgtagatatccctcagctgctggaggaggcggtgggggcgggggctccgggcagtgctggcggcgtcctggctgccctgctggaccatgtcaggagcgggtcttgcttccacgccttgccgagccctcagtacttcgtggactttgtgttccagcagcacagcagcgaggtccctatgacgctggccgagctgtcagccttgatgcagcgcctgggggtgggcagggaggcccacagtgaccacagtcatcggcacaggggagccagcagccgggaccctgtgcccctcatcagctccagcaacagctccagtgtgtgggacacggtatgcctgagtgccagggacgtgatggctgcatatggactgtcggaacaggctggggtgaccccggaggcctgggcccaactgagccctgccctgctccaacagcagctgagtggagcctgcacctcccagtccaggccccccgtccaggaccagctcagccagtcagagaggtatctgtacggctccctggccacgctgctcatctgcctctgcgcggtctttggcctcctgctgctgacctgcactggctgcaggggggtcgcccactacatcctgcagaccttcctgagcctggcagtgggtgcactcactggggacgctgtcctgcatctgacgcccaaggtgctggggctgcatacacacagcgaagagggcctcagcccacagcccacctggcgcctcctggctatgctggccgggctctacgccttcttcctgtttgagaacctcttcaatctcctgctgcccagggacccggaggacctggaggacgggccctgcggccacagcagccatagccacgggggccacagccacggtgtgtccctgcagctggcacccagcgagctccggcagcccaagcccccccacgagggctcccgcgcagacctggtggcggaggagagcccggagctgctgaaccctgagcccaggagactgagcccagagttgaggctactgccctatatgatcactctgggcgacgccgtgcacaacttcgccgacgggctggccgtgggcgccgccttcgcgtcctcctggaagaccgggctggccacctcgctggccgtgttctgccacgagttgccacacgagctgggggacttcgccgccttgctgcacgcggggctgtccgtgcgccaagcactgctgctgaacctggcctccgcgctcacggccttcgctggtctctacgtggcactcgcggttggagtcagcgaggagagcgaggcctggatcctggcagtggccaccggcctgttcctctacgtagcactctgcgacatgctcccggcgatgttgaaagtacgggacccgcggccctggctcctcttcctgctgcacaacgtgggcctgctgggcggctggaccgtcctgctgctgctgtccctgtacgaggatgacatcaccttctgataccctgccctagtcccccacctttgacttaagatcccacacctcacaaacctacagcccagaaaccagaagcccctatagaggccccagtcccaactccagtaaagacactcttgtccttggaaaaaactcacccctcttaccatcaataaaatacataaaaactatatcatctatacctaatctcacaacatcaacacaaccaaacacaaaatcc

SEQ ID NO: 68211 - DNA, 2272 bp, Homo sapiens
ggctgtaccggccggagattttgggatcaccccagcaaagccgccctcagccagcccagaagcactgggccttggccacagcaacacccactgagcacgctgggagctgagtatggcgtccctggtctcgctggagctggggctgcttctggctgtgctggtggtgacggcgacggcgtccccgcctgctggtctgctgagcctgctcacctctggccagggcgctctggatcaagaggctctgggcggcctgttaaatacgctggcggaccgtgtgcactgcaccaacgggccgtgtggaaagtgcctgtctgtggaggacgccctgggcctgggcgagcctgaggggtcagggctgcccccgggcccggtcctggaggccaggtacgtcgcccgcctcagtgccgccgccgtcctgtacctcagcaaccccgagggcacctgtgaggacactcgggctggcctctgggcctctcatgcagaccacctcctggccctgctcgagagccccaaggccctgaccccgggcctgagctggctgctgcagaggatgcaggcccgggctgccggccagacccccaagacggcctgcgtagatatccctcagctgctggaggaggcggtgggggcgggggctccgggcagtgctggcggcgtcctggctgccctgctggaccatgtcaggagcgggtcttgcttccacgccttgccgagccctcagtacttcgtggactttgtgttccagcagcacagcagcgaggtccctatgacgctggccgagctgtcagccttgatgcagcgcctgggggtgggcagggaggcccacagtgaccacagtcatcggcacaggggagccagcagccgggaccctgtgcccctcatcagctccagcaacagctccagtgtgtgggacacggtatgcctgagtgccagggacgtgatggctgcatatggactgtcggaacaggctggggtgaccccggaggcctgggcccaactgagccctgccctgctccaacagcagctgagtggagcctgcacctcccagtccaggccccccgtccaggaccagctcagccagtcagagaggtatctgtacggctccctggccacgctgctcatctgcctctgcgcggtctttggcctcctgctgctgacctgcactggctgcaggggggtcgcccactacatcctgcagaccttcctgagcctggcagtgggtgcactcactggggacgctgtcctgcatctgacgcccaaggtgctggggctgcatacacacagcgaagagggcctcagcccacagcccacctggcgcctcctggctatgctggccgggctctacgccttcttcctgtttgagaacctcttcaatctcctgctgcccagggacccggaggacctggaggacgggccctgcggccacagcagccatagccacgggggccacagccacggtgtgtccctgcagctggcacccagcgagctccggcagcccaagcccccccacgagggctcccgcgcagacctggtggcggaggagagcccggagctgctgaaccctgagcccaggagactgagcccagagttgaggctactgccctatatgatcactctgggcgacgccgtgcacaacttcgccgacgggctggccgtgggcgccgccttcgcgtcctcctggaagaccgggctggccacctcgctggccgtgttctgccacgagttgccacacgagctgggggacttcgccgccttgctgcacgcggggctgtccgtgcgccaagcactgctgctgaacctggcctccgcgctcacggccttcgctggtctctacgtggcactcgcggttggagtcagcgaggagagcgaggcctggatcctggcagtggccaccggcctgttcctctacgtagcactctgcgacatggtcaggatggcgaggggaggggctgctctgggccgggagctgagcagaggagctgagcaggggcgctgacccggtgcccacttgctcctcagctcccggcgatgttgaaagtacgggacccgcggccctggctcctcttcctgctgcacaacgtgggcctgctgggcggctggaccgtcctgctgctgctgtccctgtacgaggatgacatcaccttctgataccctgccctagtcccccacctttgacttaagatcccacacctcacaaacctacagcccagaaaccagaagcccctatagaggccccagtcccaactccagtaaagacactcttgtccttgga

SEQ ID NO: 68212 - DNA, 2114 bp, Homo sapiens
ggctgtaccggccggagattttgggatcaccccagcaaagccgccctcagccagcccagaagcactgggccttggccacagcaacacccactgagcacgctgggagctgagtatggcgtccctggtctcgctggagctggggctgcttctggctgtgctggtggtgacggcgacggcgtccccgcctgctggtctgctgagcctgctcacctctggccagggcgctctggatcaagaggctctgggcggcctgttaaatacgctggcggaccgtgtgcactgcaccaacgggccgtgtggaaagtgcctgtctgtggaggacgccctgggcctgggcgagcctgaggggtcagggctgcccccgggcccggtcctggaggccaggtacgtcgcccgcctcagtgccgccgccgtcctgtacctcagcaaccccgagggcacctgtgaggacactcgggctggcctctgggcctctcatgcagaccacctcctggccctgctcgagagccccaaggccctgaccccgggcctgagctggctgctgcagaggatgcaggcccgggctgccggccagacccccaagacggcctgcgtagatatccctcagctgctggaggaggcggtgggggcgggggctccgggcagtgctggcggcgtcctggctgccctgctggaccatgtcaggagcgggtcttgcttccacgccttgccgagccctcagtacttcgtggactttgtgttccagcagcacagcagcgaggtccctatgacgctggccgagctgtcagccttgatgcagcgcctgggggtgggcagggaggcccacagtgaccacagtcatcggcacaggggagccagcagccgggaccctgtgcccctcatcagctccagcaacagctccagtgtgtgggacacggtatgcctgagtgccagggacgtgatggctgcatatggactgtcggaacaggctggggtgaccccggaggcctgggcccaactgagccctgccctgctccaacagcagctgagtggagcctgcacctcccagtccaggccccccgtccaggaccagctcagccagtcagagaggtatctgtacggctccctggccacgctgctcatctgcctctgcgcggtctttggcctcctgctgctgacctgcactggctgcaggggggtcgcccactacatcctgcagaccttcctgagcctggcagtgggtgcactcactggggacgctgtcctgcatctgacgcccaaggtgctggggctgcatacacacagcgaagagggcctcagcccacagcccacctggcgcctcctggctatgctggccgggctctacgccttcttcctgtttgagaacctcttcaatctcctgctgcccagggacccggaggacctggaggacgggccctgcggccacagcagccatagccacgggggccacagccacggtgtgtccctgcagctggcacccagcgagctccggcagcccaagcccccccacgagggctcccgcgcagacctggtggcggaggagagcccggagctgctgaaccctgagcccaggagactgagcccagagttgaggctactgccctatatgatcactctgggcgacgccgtgcacaacttcgccgacgggctggccgtgggcgccgccttcgcgtcctcctggaagaccgggctggccacctcgctggccgtgttctgccacgagttgccacacgagctgggggacttcgccgccttgctgcacgcggggctgtccgtgcgccaagcactgctgctgaacctggcctccgcgctcacggccttcgctggtctctacgtggcactcgcggttggagtcagcgaggagagcgaggcctggatcctggcagtggccaccggcctgttcctcttcctgctgcacaacgtgggcctgctgggcggctggaccgtcctgctgctgctgtccctgtacgaggatgacatcaccttctgataccctgccctagtcccccacctttgacttaagatcccacacctcacaaacctacagcccagaaaccagaagcccctatagaggccccagtcccaactccagtaaagacactcttgtccttgga

SEQ ID NO: 68213 - DNA, 2461 bp, Homo sapiens
ggctgtaccggccggagattttgggatcaccccagcaaagccgccctcagccagcccagaagcactgggccttggccacagcaacacccactgagcacgctgggagctgagtatggcgtccctggtctcgctggagctggggctgcttctggctgtgctggtggtgacggcgacggcgtccccgcctgctggtctgctgagcctgctcacctctggccagggcgctctggatcaagaggctctgggcggcctgttaaatacgctggcggaccgtgtgcactgcaccaacgggccgtgtggaaagtgcctgtctgtggaggacgccctgggcctgggcgagcctgaggggtcagggctgcccccgggcccggtcctggaggccaggtacgtcgcccgcctcagtgccgccgccgtcctgtacctcagcaaccccgagggcacctgtgaggacactcgggctggcctctgggcctctcatgcagaccacctcctggccctgctcgagagccccaaggccctgaccccgggcctgagctggctgctgcagaggatgcaggcccgggctgccggccagacccccaagacggcctgcgtagatatccctcagctgctggaggaggcggtgggggcgggggctccgggcagtgctggcggcgtcctggctgccctgctggaccatgtcaggagcgggtcttgcttccacgccttgccgagccctcagtacttcgtggactttgtgttccagcagcacagcagcgaggtccctatgacgctggccgagctgtcagccttgatgcagcgcctgggggtgggcagggaggcccacagtgaccacagtcatcggcacaggggagccagcagccgggaccctgtgcccctcatcagctccagcaacagctccagtgtgtgggacacggtatgcctgagtgccagggacgtgatggctgcatatggactgtcggaacaggctggggtgaccccggaggcctgggcccaactgagccctgccctgctccaacagcagctgagtggagcctgcacctcccagtccaggccccccgtccaggaccagctcagccagtcagagaggtatctgtacggctccctggccacgctgctcatctgcctctgcgcggtctttggcctcctgctgctgacctgcactggctgcaggggggtcgcccactacatcctgcagaccttcctgagcctggcagtgggtgcactcactggggacgctgtcctgcatctgacgcccaaggtgctggggctgcatacacacagcgaagagggcctcagcccacagcccacctggcgcctcctggctatgctggccgggctctacgccttcttcctgtttgagaacctcttcaatctcctgctgcccagggacccggaggacctggaggacgggccctgcggccacagcagccatagccacgggggccacagccacggtgtgtccctgcagctggcacccagcgagctccggcagcccaagcccccccacgagggctcccgcgcagacctggtggcggaggagagcccggagctgctgaaccctgagcccaggagactgagcccagagttgaggctactgccctatatgatcactctgggcgacgccgtgcacaacttcgccgacgggctggccgtgggcgccgccttcgcgtcctcctggaagaccgggctggccacctcgctggccgtgttctgccacgagttgccacacgagctgggggacttcgccgccttgctgcacgcggggctgtccgtgcgccaagcactgctgctgaacctggcctccgcgctcacggccttcgctggtctctacgtggcactcgcggttggagtcagcgaggagagcgaggcctggatcctggcagtggccaccggcctgttcctctacgtagcactctgcgacatgctcccggcgatgttgaaagtacgggacccgcggccctggctcctcttcctgctgcacaacgtgggcctgctgggcggctggaccgtcctgctgctgctgtccctgtcctaggcccgtgcctgatccaggatccaagctcccggaagctggcactgggcccgccctgggtaggcagcagtgagcaaggcgggcggacagcgctgggctcgcggggtcctgcgtcctccgcgggagtgttggcggcgggggtcgctctgcgcggggacactgggcagagggggcgtgcggcctctctaggaagctttctcggagccccagacactggcgaggcgccgcgccccctcttctggattccggcgcgccccctgaacccgggagctacgagcggagtcgcttctccctgcagccgtcctgggtctggcgcggacgcaccccccggccgaccccgagccgctgcagccggcgcccctgcggcttccaacccgcgctgctccgcccgcagcggaggccccgcacttcgcgcgataggggttt

SEQ ID NO: 68214 - DNA, 343 bp, Homo sapiens
ccaagcgtccgcccacgcgtccgaggacgggtggcctggatcctggcagtggccaccggcctgttcctctacgtagcactctgcgacatgctcccggcgatgttgaaagtacgggacccgcggccctggctcctcttcctgctgcacaacgtgggcctgctgggcggctggaccgtcctgctgctgctgtccctgtacgaggatgacatcaccttctgataccctgccctagtcccccacctttgacttaagatcccacacctcacaaacctacagcccagaaaccagaagcccctatagaggccccagtcccaactccagtaaagacactcttgtccttgga

SEQ ID NO: 68215 - DNA, 2434 bp, Homo sapiens
tgttattactatttttgagacagagtctagctctgtcgcctaggctagaagcaaaactccaactcgaaaaaaaaaagaccaccgaggctgcctgtccaggggaaggggcccagccctcgacccccacaggcagtggctccaggctgttggggaggatctgccactggaatggttaacccaggcatctccagcagccaatcacagagctttgcaggaatacctgggagaggtcctcatgcagcccgggcgggtcctagcccagccccagtctggccctggacaaccccagcaaagccgccctcagccagcccagaagcactgggccttggccacagcaacacccactgagcacgctgggagctgagtatggcgtccctggtctcgctggagctggggctgcttctggctgtgctggtggtgacggcgacggcgtccccgcctgctggtctgctgagcctgctcacctctggccagggcgctctggatcaagaggctctgggcggcctgttaaatacgctggcggaccgtgtgcactgcaccaacgggccgtgtggaaagtgcctgtctgtggaggacgccctgggcctgggcgagcctgaggggtcagggctgcccccgggcccggtcctggaggccaggtacgtcgcccgcctcagtgccgccgccgtcctgtacctcagcaaccccgagggcacctgtgaggacactcgggctggcctctgggcctctcatgcagaccacctcctggccctgctcgagagccccaaggccctgaccccgggcctgagctggctgctgcagaggatgcaggcccgggctgccggccagacccccaagacggcctgcgtagatatccctcagctgctggaggaggcggtgggggcgggggctccgggcagtgctggcggcgtcctggctgccctgctggaccatgtcaggagcgggtcttgcttccacgccttgccgagccctcagtacttcgtggactttgtgttccagcagcacagcagcgaggtccctatgacgctggccgagctgtcagccttgatgcagcgcctgggggtgggcagggaggcccacagtgaccacagtcatcggcacaggggagccagcagccgggaccctgtgcccctcatcagctccagcaacagctccagtgtgtgggacacggtatgcctgagtgccagggacgtgatggctgcatatggactgtcggaacaggctggggtgaccccggaggcctgggcccaactgagccctgccctgctccaacagcagctgagtggagcctgcacctcccagtccaggccccccgtccaggaccagctcagccagtcagagaggtatctgtacggctccctggccacgctgctcatctgcctctgcgcggtctttggcctcctgctgctgacctgcactggctgcaggggggtcgcccactacatcctgcagaccttcctgagcctggcagtgggtgcactcactggggacgctgtcctgcatctgacgcccaaggtgctggggctgcatacacacagcgaagagggcctcagcccacagcccacctggcgcctcctggctatgctggccgggctctacgccttcttcctgtttgagaacctcttcaatctcctgctgcccagggacccggaggacctggaggacgggccctgcggccacagcagccatagccacgggggccacagccacggtgtgtccctgcagctggcacccagcgagctccggcagcccaagcccccccacgagggctcccgcgcagacctggtggcggaggagagcccggagctgctgaaccctgagcccaggagactgagcccagagttgaggctactgccctatatgatcactctgggcgacgccgtgcacaacttcgccgacgggctggccgtgggcgccgccttcgcgtcctcctggaagaccgggctggccacctcgctggccgtgttctgccacgagttgccacacgagctgggggacttcgccgccttgctgcacgcggggctgtccgtgcgccaagcactgctgctgaacctggcctccgcgctcacggccttcgctggtctctacgtggcactcgcggttggagtcagcgaggagagcgaggcctggatcctggcagtggccaccggcctgttcctctacgtagcactctgcgacatgctcccggcgatgttgaaagtacgggacccgcggccctggctcctcttcctgctgcacaacgtgggcctgctgggcggctggaccgtcctgctgctgctgtccctgtacgaggatgacatcaccttctgataccctgccctagtcccccacctttgacttaagatcccacacctcacaaacctacagcccagaaaccagaagcccctatagaggccccagtcccaactccagtaaagacactcttgtccttgga

SEQ ID NO: 68216 - DNA, 679 bp, Homo sapiens
cgggcgggacttactcaaggctcctcccaggtggcggaggagagcccggagctgctgaaccctgagcccaggagactgagcccagagttgaggctactgccctatatgatcactctgggcgacgccgtgcacaacttcgccgacgggctggccgtgggcgccgccttcgcgtcctcctggaagaccgggctggccacctcgctggccgtgttctgccacgagttgccacacgagctgggggacttcgccgccttgctgcacgcggggctgtccgtgcgccaagcactgctgctgaacctggcctccgcgctcacggccttcgctggtctctacgtggcactcgcggttggagtcagcgaggagagcgaggcctggatcctggcagtggccaccggcctgttcctctacgtagcactctgcgacatgctcccggcgatgttgaaagtacgggacccgcggccctggctcctcttcctgctgcacaacgtgggcctgctgggcggctggaccgtcctgctgctgctgtccctgtacgaggatgacatcaccttctgataccctgccctagtcccccacctttgacttaagatcccacacctcacaaacctacagcccagaaaccagaagcccctatagaggccccagtcccaactccagtaaagacactcttgtccttgga

SEQ ID NO: 68217 - DNA, 802 bp, Homo sapiens
cgggcgggacttactcaaggctcctcccaggtggcggaggagagcccggagctgctgaaccctgagcccaggagactgagcccaggtgagcccagggggcgaccccggaagggctgggggatctggggtttgtgtggagcgcgggtggggcccaaggcttggcggtaggcgacaggccacgcgaacccacgggcctctgcgcccgcagagttgaggctactgccctatatgatcactctgggcgacgccgtgcacaacttcgccgacgggctggccgtgggcgccgccttcgcgtcctcctggaagaccgggctggccacctcgctggccgtgttctgccacgagttgccacacgagctgggggacttcgccgccttgctgcacgcggggctgtccgtgcgccaagcactgctgctgaacctggcctccgcgctcacggccttcgctggtctctacgtggcactcgcggttggagtcagcgaggagagcgaggcctggatcctggcagtggccaccggcctgttcctctacgtagcactctgcgacatgctcccggcgatgttgaaagtacgggacccgcggccctggctcctcttcctgctgcacaacgtgggcctgctgggcggctggaccgtcctgctgctgctgtccctgtacgaggatgacatcaccttctgataccctgccctagtcccccacctttgacttaagatcccacacctcacaaacctacagcccagaaaccagaagcccctatagaggccccagtcccaactccagtaaagacactcttgtccttgga

SEQ ID NO: 68218 - DNA, 2196 bp, Homo sapiens
ggctgtaccggccggagattttgggatcaccccagcaaagccgccctcagccagcccagaagcactgggccttggccacagcaacacccactgagcacgctgggagctgagtatggcgtccctggtctcgctggagctggggctgcttctggctgtgctggtggtgacggcgacggcgtccccgcctgctggtctgctgagcctgctcacctctggccagggcgctctggatcaagaggctctgggcggcctgttaaatacgctggcggaccgtgtgcactgcaccaacgggccgtgtggaaagtgcctgtctgtggaggacgccctgggcctgggcgagcctgaggggtcagggctgcccccgggcccggtcctggaggccaggtacgtcgcccgcctcagtgccgccgccgtcctgtacctcagcaaccccgagggcacctgtgaggacactcgggctggcctctgggcctctcatgcagaccacctcctggccctgctcgagagccccaaggccctgaccccgggcctgagctggctgctgcagaggatgcaggcccgggctgccggccagacccccaagacggcctgcgtagatatccctcagctgctggaggaggcggtgggggcgggggctccgggcagtgctggcggcgtcctggctgccctgctggaccatgtcaggagcgggtcttgcttccacgccttgccgagccctcagtacttcgtggactttgtgttccagcagcacagcagcgaggtccctatgacgctggccgagctgtcagccttgatgcagcgcctgggggtgggcagggaggcccacagtgaccacagtcatcggcacaggggagccagcagccgggaccctgtgcccctcatcagctccagcaacagctccagtgtgtgggacacggtgagctgcgccctggggtaagatggggcctcaccggggtctgcttgggcccctgagcctgtcctgccaccccccaggtatgcctgagtgccagggacgtgatggctgcatatggactgtcggaacaggctggggtgaccccggaggcctgggcccaactgagccctgccctgctccaacagcagctgagtggagcctgcacctcccagtccaggccccccgtccaggaccagctcagccagtcagagaggtatctgtacggctccctggccacgctgctcatctgcctctgcgcggtctttggcctcctgctgctgacctgcactggctgcaggggggtcgcccactacatcctgcagaccttcctgagcctggcagtgggtgcactcactggggacgctgtcctgcatctgacgcccaaggtgctggggctgcatacacacagcgaagagggcctcagcccacagcccacctggcgcctcctggctatgctggccgggctctacgccttcttcctgtttgagaacctcttcaatctcctgctgcccagggacccggaggacctggaggacgggccctgcggccacagcagccatagccacgggggccacagccacggtgtgtccctgcagctggcacccagcgagctccggcagcccaagcccccccacgagggctcccgcgcagacctggtggcggaggagagcccggagctgctgaaccctgagcccaggagactgagcccaggggacttcgccgccttgctgcacgcggggctgtccgtgcgccaagcactgctgctgaacctggcctccgcgctcacggccttcgctggtctctacgtggcactcgcggttggagtcagcgaggagagcgaggcctggatcctggcagtggccaccggcctgttcctctacgtagcactctgcgacatggtcaggatggcgaggggaggggctgctctgggccgggagctgagcagaggagctgagcaggggcgctgacccggtgcccacttgctcctcagctcccggcgatgttgaaagtacgggacccgcggccctggctcctcttcctgctgcacaacgtgggcctgctgggcggctggaccgtcctgctgctgctgtccctgtacgaggatgacatcaccttctgataccctgccctagtcccccacctttgacttaagatcccacacctcacaaacctacagcccagaaaccagaagcccctatagaggccccagtcccaactccagtaaagacactcttgtccttgga

SEQ ID NO: 68219 - DNA, 2110 bp, Homo sapiens
ggctgtaccggccggagattttgggatcaccccagcaaagccgccctcagccagcccagaagcactgggccttggccacagcaacacccactgagcacgctgggagctgagtatggcgtccctggtctcgctggagctggggctgcttctggctgtgctggtggtgacggcgacggcgtccccgcctgctggtctgctgagcctgctcacctctggccagggcgctctggatcaagaggctctgggcggcctgttaaatacgctggcggaccgtgtgcactgcaccaacgggccgtgtggaaagtgcctgtctgtggaggacgccctgggcctgggcgagcctgaggggtcagggctgcccccgggcccggtcctggaggccaggtacgtcgcccgcctcagtgccgccgccgtcctgtacctcagcaaccccgagggcacctgtgaggacactcgggctggcctctgggcctctcatgcagaccacctcctggccctgctcgagagccccaaggccctgaccccgggcctgagctggctgctgcagaggatgcaggcccgggctgccggccagacccccaagacggcctgcgtagatatccctcagctgctggaggaggcggtgggggcgggggctccgggcagtgctggcggcgtcctggctgccctgctggaccatgtcaggagcgggtcttgcttccacgccttgccgagccctcagtacttcgtggactttgtgttccagcagcacagcagcgaggtccctatgacgctggccgagctgtcagccttgatgcagcgcctgggggtgggcagggaggcccacagtgaccacagtcatcggcacaggggagccagcagccgggaccctgtgcccctcatcagctccagcaacagctccagtgtgtgggacacggtatgcctgagtgccagggacgtgatggctgcatatggactgtcggaacaggctggggtgaccccggaggcctgggcccaactgagccctgccctgctccaacagcagctgagtggagcctgcacctcccagtccaggccccccgtccaggaccagctcagccagtcagagaggtatctgtacggctccctggccacgctgctcatctgcctctgcgcggtctttggcctcctgctgctgacctgcactggctgcaggggggtcgcccactacatcctgcagaccttcctgagcctggcagtgggtgcactcactggggacgctgtcctgcatctgacgcccaaggtgctggggctgcatacacacagcgaagagggcctcagcccacagcccacctggcgcctcctggctatgctggccgggctctacgccttcttcctgtttgagaacctcttcaatctcctgctgcccagggacccggaggacctggaggacgggccctgcggccacagcagccatagccacgggggccacagccacggtgtgtccctgcagctggcacccagcgagctccggcagcccaagcccccccacgagggctcccgcgcagacctggtggcggaggagagcccggagctgctgaaccctgagcccaggagactgagcccagagttgaggctactgccctatatgatcactctgggcgacgccgtgcacaacttcgccgacgggctggccgtgggcgccgccttcgcgtcctcctggaagaccgggctggccacctcgctggccgtgttctgccacgagttgccacacgagctgggggacttcgccgccttgctgcacgcggggctgtccgtgcgccaagcactgctgctgaacctggcctccgcgctcacggccttcgctggtctctacgtggcactcgcggttggagtcagcgaggagagcgaggcctggatcctggcagtggccaccggcctgttcctctacgtagcactctgcgacatgctcccggcgatgttgaaagtacgggacccgcggccctggctcctcttcctgctgcacaacgtgggcctgctgggcggctggaccgtcctgctgctgctgtccctgtacgaggatgacatcaccttctgataccctgccccagcccgcccccgcccagccgtccgcaaagatctctaagtacct

SEQ ID NO: 68220 - DNA, 245 bp, Homo sapiens
taattacaaataagcttgagcccctttttgtgtttattggctatttcacttttgataataggtgatattagggaataatttaagtggaatgttattttagaaatccatactgaaatacttaaggatgtaatactaatttactgtaaaatatttcagcataaaaaaagtgcagacatagataacatttcactgacatcagaaaatattacctgggaatacatcaaaaagtattcaagaactctgtc

SEQ ID NO: 68221 - DNA, 2013 bp, Homo sapiens
  misc_feature (67)..(69): n is a, c, g, or t
  misc_feature (554)..(554): n is a, c, g, or t
  misc_feature (558)..(558): n is a, c, g, or t
  misc_feature (566)..(566): n is a, c, g, or t
  misc_feature (569)..(569): n is a, c, g, or t
  misc_feature (573)..(573): n is a, c, g, or t
  misc_feature (581)..(581): n is a, c, g, or t
  misc_feature (1150)..(1150): n is a, c, g, or t
  misc_feature (1443)..(1443): n is a, c, g, or t
  misc_feature (1772)..(1772): n is a, c, g, or t
  misc_feature (1883)..(1883): n is a, c, g, or t
  misc_feature (1886)..(1886): n is a, c, g, or t
  misc_feature (1888)..(1888): n is a, c, g, or t
  misc_feature (1893)..(1893): n is a, c, g, or t
  misc_feature (1896)..(1896): n is a, c, g, or t
  misc_feature (1908)..(1908): n is a, c, g, or t
  misc_feature (1929)..(1930): n is a, c, g, or t
  misc_feature (1932)..(1933): n is a, c, g, or t
  misc_feature (1947)..(1948): n is a, c, g, or t
  misc_feature (1950)..(1950): n is a, c, g, or t
  misc_feature (1952)..(1952): n is a, c, g, or t
  misc_feature (1965)..(1965): n is a, c, g, or t
  misc_feature (1970)..(1970): n is a, c, g, or t
  misc_feature (1979)..(1979): n is a, c, g, or t
  misc_feature (1982)..(1982): n is a, c, g, or t
  misc_feature (1986)..(1986): n is a, c, g, or t
  misc_feature (1994)..(1994): n is a, c, g, or t
  misc_feature (2000)..(2000): n is a, c, g, or t
  misc_feature (2008)..(2008): n is a, c, g, or t
  misc_feature (2010)..(2013): n is a, c, g, or t
attccgggctatacgtgaatttaaagattttttggttgacaattttttggctgagtttgtctaaagnnntgggattacaggtgtgagccactgcctggcctgaaatgggttttgactgcttctaagaccctgctcagtcccagttcctctgagttgctcagtgatatcttcaataaaagctgggactggccatattgaattttacctgggccctgctcacaggtgcaccccttgttgatctatggggccctgccccagacccccaaattcccattcttggtctggcaagtgatttgctgaactgtttgtccccactgatcaatgggggaaaaatgcctgttcatgagactttggttctttcctaacttcccccccactccttaccttcctgcaggcccctgaactttagccccacctcagtggagccggcacagggccccatcagagctcccaacaggaatagggtcacctcgggctctatctctccatacccaccttccacccacttctctggttctcttttggttttgttgtgttgttttttttttttttgngacngagtctcnctntgtngcccaggntggagtgcagtggggcaaaagccacagacactcaaggccagccagtgcaagcagccggcagccgggaggggggctgaaccccaaaaagccacagggatggagctgcccaaggccatgggagcccacctcttgcatcagtgtgacctggatgtgagacatggagtcaaaggggatcatttggaactttaaggtttaatgactgccctattagattttggacttgcatggggcctgtagcccctttgttttacccaatttcttccgtgtagagtgggtatatttacccaatgcctgaacccccattgtatgtaggaagtaattaagttgctttcaattttacaggctcataggaggaagggacttgccttgtctcagatgagactttggacttggacttttgggttaatgctggaataagctaagactttgggagacagttagaaaggcatgattgtgttttgaaatgtgaggacatgagatttgggaggggccaggggcagaatgatacagtttgtccgtgtcccccacccaaatctcatcttgaattatagtttccataattcccaagngtcctgggaggaacccggtgggaggtaactgaatcatgggagcagttactgccaggctgttctcgtgttagtgagtgagttctcaggagatctgatggttttataagggccctttccccgctttgctcagcacttctccttcctactgccctgtgaagaaagtgcctttcttcccctttgccttccaccatgattgtaagtttcctgagactttcctagccatgcaggactgtgagtccattaaacctctttacttataaattagccagtctcgggtctctcttcatagcagngtgagaacagactaatgcaggggggctattatgttgccaatcacaggtatataataaaaagttaagaattataatttctaagtggtaggatttcccttaatccttttctcttatctatattttcagaagttttcccaggaatacacatactgcttttgaaatgagaagaatgaaatctcatttatagtctatattgacgtctttgcaatgttcattaatccacctctcaggacagccctgagaagtgcatactgttcctgaacagttaacagttacaaagatgaattgaaaagtatttaggcggccaggcgtggtggctcacacctgtnatcccagcactttgggaggccgaggtgggtggatcacgaggtcaggagatcgagaccatcctggctaacacggtgaaaccccatctctactaaaaatacaaaaaaatatgntgngnacctntantcccagctactngggaggctgaggcaggagaanngnntgaacctgggaggnngngnttgcagtgagccnagatngcgccactncantccngcctgggngacagngagactcnannnn

SEQ ID NO: 68222 - DNA, 347 bp, Homo sapiens
ctgtgctatcaagcacataagccgaagcacaagaatagtttgaggggcaggtggagtttcatttaacaaaaacattggtccactattattaagacacaatttgaagtcagacttttctttccgtggtaagtccgaggtaatcaaaatcattctcttcaatgtcattgtgggattctcagacattcagatggtgaaaacaaagaaataatttcatttattccattatatttagagtttagaagtagcaagaaacactatatcagtttgtccccctaaggaaaggcatggacaccttgtttcttcttgcaaatgatttaagcaactaagatttcagaaccaattttcag

SEQ ID NO: 68223 - DNA, 1919 bp, Homo sapiens
gtccatttgcggtggtaatcgcaggcacatgctgggagccaggctttaagacatctgccttagccccagcagtgtcaccaaaccctggcctaagctgcccacgcagatctgagagaagcagaatactctcagtccccgccctcatagagctagccctaactttcatttatatcactccatctcatgccaggaaggatttaaggtgacaaaaattacttatcctatagggaagcaggccaagcccaggttctgaggaacggcagtcaggatgcaggaatgagcccagctcagtttagctttgtgtatttgaagcacagagagtcactgagccagagccagattcagatgccagaagcctctatcctttgtatccatcccactccgagaatggcagtgaagagaaagggtctcacagagacctggctggccgagagatgagccaaggtcctttgtggccgtgtcctgcagcagtcggacctgcttgactagactggactctgtgtgaattctttcccccaaccccagacttctcaaagtgctcccacgctaaagctttctgcatctggccctccctgctcctggcaacccctctaacctcctaaatcccagggaagagggagagcaagctggcagaacacccagatgtcctgggtgggagtgcttacatcactgtgtctaagtcatggggaaacaggccaaatgctatagtgggtgagcacctcttgggcaggtccccccaagcccagcagcacatgtgttcaacatgcaaaagcagactcacaccccaccctctgaggcttagtgtgactcccaggattcctagcagagcctggtctggccctctttagagacaagatcaacaccatttattaagaacccaccaagagaacccacaaccctgcccttgaggaggtttcagtgtgctggcaaaaccaagacaagccacacacaagaccatttataggactctttgaaacacttataaagcaaagataaacatattaagatagattaacaccatgcaaactgaatgcgcatagactgacgatatgcagtaatggagagtttagagatgggtggagttaattagggaaggcttttggaagatgcaaattttaggcagaatttacaagtaggtaattggcagagagcaggaagtacatcccagaatttcctgttaaaagcatgggttttgctgtaagacaaagccccacattgtcatttattaactttgcagtcctggaaagtcatttgacctctctaggcttaaggtccttcacctataaaacagaggtaataggccgggcgtgagccactgcacccggactgtgctttctttttcaatcgaggttagagttggccatgagggaacttatataagatttggaaggcagaagcaaaagagcagccattactctcagaaggtcactgtggttggatatggtgttggccaataggtcaaacctccatgtccatctgctctttcttatgtcttgccctgatatccaatagcagccacagctgatcaaaagatgcttggctacggatccacagagaggtggttatgcagaggtaatagcttcccatgcatagccttccacacgagctcctgttcttgatcccgctttgctagttgaacatgcctgctgctcaaatttccgtgcgagcctagggtttggcttgcctacaccactgctcctaggcactctggctagggactttgctatctgactcctcttccagacttttgcttctccagtactgcccacatttttgtaagatctaattcctactaaaaaaaaattcctctttccataattcttatcatgattctgcttctttcactgaatcctggatgatacagataagtatcaatcagtcaacagtagttacctctgaaaacggaaataaaagtgatt

SEQ ID NO: 68224 - DNA, 202 bp, Homo sapiens
aaaggcaagctcgccactgctgcatggaaggctgatgccccagcttgcccatgtagcagaaagctctgggtctcgatatctgctcggcttcttaacagctatgtggctttgtacaagtaactctgtctctctgggcctcaatttcctcatctgtgaaataggataataaatgtacagaccacataggtttcctgtgaggact

SEQ ID NO: 68225 - DNA, 730 bp, Homo sapiens
gcagtcccgcttcctatctcatcctcattacctatgggataaagcccaagcagggtgccatgtatgaccatgcactgcatagcccacaaaatcatacacagcaggcctgagtcccatctccttcattcagcaagtattcaatctccagacattctcagctggcacccaagggtcctgagggtcctgttgctgtctttttcttctgctttctctctcacctactcccttaggtaccatgtacttgagccacaccaaacttggtacatcttttcatacctgtgtgcttcacacacgaatgtctccatctgctttctgtgaatgctggggcaataggatgggcatggacttgaaatcctgtttctctgccatttacagttaggtgaatgtgggcaagttaaccctctgagccccagttttctaatctgtaaaatgggattaggcttatataatgtgcctcagattgtatgtagcacatgagagcccctccccactcctaaaagttggtttctaactctctttgcatgccgaactcctattcatccttgaagacccaactcaaatgttaccttcttggtaacattgccctccttcccttcaagtgggtaaagtttatctttctcagtttctactctttccaccagccctgcatagcacttataaacctctgttggaaacactgtcatatttttctgttttcctggttcacatgaataaagcacacagccagaaa

SEQ ID NO: 68226 - DNA, 576 bp, Homo sapiens
acctcagctttgcatttttaatacaatttcagtctattctatcaacccaaatacataatattttccaaataagaaaaatctaaaatatgtttttaaactcaacttgaaatcagagaatttaaagttttgaataaaattgacaaatatttattggtaatctttaacttatacatttggctacatatattaaaaatttgtattttatttaaatattctcatttttccactttcacatttcaagcaatttattcaaattcttcacataggttaaagacctcagtctattgcaagggcattctctgagctacttaatacctcttcccagcactcatcatttccatttccatttaagttacctgagaagcagaactttctgaatgtaagcatgatggtttacttatctgaacataacttctgggagtctatttggagttattccttcactctctgaagagttaaaaattaggactattctggccgggcgcggtggctcatgcctgtaatcccagcactttgggaggccgaggagggtggatcatgaagtcaggagattgagaccatcctggctaaaacggt

SEQ ID NO: 68227 - DNA, 362 bp, Homo sapiens
attttaatgaaataggatagagcagaaaatagattttattgcagataataagggtaaagtgctgttttgaggaacttgagtttcagatatacacacacatatgtgcaaatgagtacatgtgcatgtcctgagttgtgatataaaaggcatttctttctgtggactatggtttaagaagcttgaaaatcagtgatccagatagatctttggttccttctgaccctctgaacttctaacttattatgactattatctggcactttgctgaagtcttcttttccacttcaagtcctcctaccagactgtgtggcaactaagtccacatggctgacagggtgaacacccaagcccccagttccttg

SEQ ID NO: 68228 - DNA, 417 bp, Homo sapiens
gctaaaaattcaagatacaaaaaggtatctccctctcacctgttcccacagccaccttcccaggggtgcctatattttcagatgttttaggcctgtaagcatatacttacatgcataaaagtaggtaagtgcatatccttccacacatgtaagtatatacatacatatatatacatacacagtcatgcaccacctaaagacagagatacattctgacaaatgcatcactacatgtttctgtcactctgttaacatcttagagtgcacttacacacacctagatggtacagcctgttagacacctaggctgtacggtagagtctattgctccaaggctacaaacctgtacagcatgttatacactgaatactgtaggcaactgcaacacaatggtaagtatttgtgtatctaaacaac

SEQ ID NO: 68229 - DNA, 339 bp, Homo sapiens
atcactttgtcaaactctagattacataggatactcttatcacctatctagtattaaagactcttcctggaaataagaggaaatcattcaaagaagggttagttcttcctctgtcctgaagtaattcagtttttattgatggttgaggataagataatctttaaaaaagtttcatccacttctgggcgtgtcatgacaaatgggcttatctgaagcattggtttgacttttttgtttgtttgtttgtttgagatggagtcttggtctgttgctcaggctggagtgcagtggcgcaatctcggctcactgcaaccggatccgagagctcccaacgcgttg

SEQ ID NO: 68230 - DNA, 457 bp, Homo sapiens
gagcaagaccctgtctcaaaaaagcaaaaaagcaaaaaaaaaaaaaaaaaaaaaaaggaagtctttcttcagatacttacgtgaaaaaaacctgcaatatcttttaagtgaaaaaaacagtgccaagcagcacacatagtataagccccaaccaacctttttttttttttttttttgagacagagtctggctgtgccctgccactttctaagctttgcgaagagtgagttgactgagcagccaggtagatgtgggttcagatctctgcttctgtcctgctgtgccaagtgctggggcagacacaggcagagagtggacagcggcatggtgcctgctgctagccatttctatgcaaaaccagatgtctggtcccatcctggaggccaattctaggtatgtgggtgggcctgggaacctgtgaaacaagtaaactgacttagacaccccccaccccgcc

SEQ ID NO: 68231 - DNA, 1522 bp, Homo sapiens
gaattcctcgagcactgttggcctactgtaaagttattggaaattgtgatgccaaggatttccccatcaaatataaagagaggcatcctctggagtacctgcgacaatatcctcactttaggtgtaggactaacgttctgggttctatattgaggattcgcagtgaagcgacagctgctattcattctttctttaaggacagtggctttgtacatattcatactccaataatcacatccaatgactctgagggagctggagaactttttcaacttgaaccttcaggcaaacttaaggtacctgaggagaatttcttcaatgttcctgctttcttaactgtctcaggacaacttcatctagaagtgatgtcaggagcttttactcaagtgtttacctttggtccgaccttccgagctgaaaattctcagagccggaggcacctggcagagttttatatgatagaagcagagatttcttttgttgacagccttcaagatcttatgcaggttatagaggaactgttcaaggctacaacaatgatggttctctcaaaatgtcctgaagatgttgaactctgtcacaaattcatagcacctggccaaaaggacagattagaacatatgctaaaaaacaactttttaatcatttcttatactgaagcagtggagatcttaaagcaagcatcccagaacttcacctttaccccagagtggggtgctgacctacggactgaacatgaaaagtacctggtgaagcactgtggcaacatacctgtcttcgttattaattatccattaacactcaagcctttctacatgagggataatgaagatggccctcagcacacggttgctgctgttgatcttctggttcctggagttggggaactctttggaggaggcctcagagaagaacgataccatttcttagaggagcgcttagccagtcgggacttacagaagtctaccaatggtatctggaccttcgtcgatttggatctgtgccacatggaggttttgggatgggatttgaacgctacctgcagtgcatcttgggtgttgacaatatcaaagatgttatccctttcccaaggtttcctcattcatgccttttatagctggaagattggttaaggaaaagcaccccccatggcagagacactgcacatgattgtgcatacagcagaatgcatgtttggattttagaaatgcagatttcaatatgtaattgttgtgccataagatatcatagaaaaaatataagtggttgtgattttcttagaaagttgagggtatttcacgtaaggatgagctcccgcaagaagaggtacttatagcaaggggactctcaaatccattacctcaattaagaaatgaagaaattgaattagtctcaaagtttcttttaaactctaaaacagaatgagataatgtattttacgttgtctataatcattaaatcactccctgtgtaatttgtgagaaccatctagtagctcgaaataaaataatgttgcatcttt

SEQ ID NO: 68232 - DNA, 1332 bp, Homo sapiens
actccagaatggtatcttgtttttttaattttatacttctttgattaataatcagaatttattttatatgtcctaataacaatactacaaattaaactcttcattgccacattataagaaaaaacagacaaaaatatacacaccttaaatgttcaactaaaaaggaaagcagttaaataattataattctaatcaataaactattaaacattaaagctattaaaacataatgtgaagtatttttactaatataggaaaaatattagtttgtaatattaggtaagacaagtggtaagtttttatctgtaattatactttataaatgtataagggaaaaaatttgaaaggaaatccacaaaaatgtaattttccggtgctgataggtgatttttaatgtttcataatttttaacactatccacatttttataattaacatttctatcacatttatgaagaaaatacatttgtgttcagtatactacacaaatggtgcaagagagaggaaattgtccacttataatttgtatgtagtcagtaagattctggtaggtagttaattagccattgccaaaatgttaaaggtttacttgcttcagaaactgactgttggaatcacctgaaaatataatgctaataattttttttttttccttaggttgctgctgttgatcttctggttcctggagttggggaactctttggaggaggcctcagagaagaacgataccatttcttagaggagcgcttagccagatcgggacttacagaagtctaccaatggtatctggaccttcgtcgatttggatctgtgccacatggaggttttgggatgggatttgaacgctacctgcagtgcatcttgggtgttgacaatatcaaagatgttatccctttcccaaggtttcctcattcatgccttttatagctggaagattggttaaggaaaagcaccccccatggcagagacactgcacatgattgtgcatacagcagaatgcatgtttggattttagaaatgcagatttcaatatgtaattgttgtgccataagatatcatagaaaaaatataagtggttgtgattttcttagaaagttgagggtatttcacgtaaggatgagctcccgcaagaagaggtacttatagcaaggggactctcaaatccattacctcaattaagaaatgaagaaattgaattagtctcaaagtttcttttaaactctaaaacagaatgagataatgtattttacgttgtctataatcattaaatcactccctgtgtaatttgtgagaaccatctagtagctcgaaataaaataatgttgcatcttt

SEQ ID NO: 68233 - DNA, 825 bp, Homo sapiens
actccagaatggtatcttgtttttttaattttatacttctttgattaataatcagaatttattttatatgtcctaataacaatactacaaattaaactcttcattgccacattataagaaaaaacagacaaaaatatacacaccttaaatgttcaactaaaaaggaaagcagttaaataattataattctaatcaataaactattaaacattaaagctattaaaacataatgtgaagtatttttactaatataggaaaaatattagtttgtaatattaggtaagacaagtggtaagtttttatctgtaattatactttataaatgtataagggaaaaaatttgaaaggaaatccacaaaaatgtaattttccggtgctgataggtgatttttaatgtttcataatttttaacactatccacatttttataattaacatttctatcacatttatgaagaaaatacatttgtgttcagtatactacacaaatggtgcaagagagaggaaattgtccacttataatttgtatgtagtcagtaagattctggtaggtagttaattagccattgccaaaatgttaaaggtttacttgcttcagaaactgactgttggaatcacctgaaaatataatgctaataattttttttttttccttaggttgctgctgttgatcttctggttcctggagttggggaactctttggaggaggcctcagagaagaacgataccatttcttagaggagcgcttagccagatacaatacctgaaatataaaataaataattatacatcactctagcatatagttatgaatatattataac

SEQ ID NO: 68234 - DNA, 2550 bp, Homo sapiens
ccttcttccccgtagcgtgatgacgtaagcggcgttggcgtggtgaggtaggagtggttgcgcgtgttgcggcccgggttctgttcgtaggtttacaattgtcgcgggtagtggggcgccccagctgccaactgcacgtggtttctttctggcgtttgcctagtgtcctgtccattccgccccgttgggaagtgggaagcggagaggttctgtggggacagagctgggagtcctgaaggagaaagcgcgcagccgaggggctctggagtgccttagagcagagctgcggccgcggaaggggagcagctgagaaaggagggccgctgcaggcggggttcgaaccgtggggtctgggctgctcccgcggagggcctgggcggacgcgggatgctgggggtccgctgcctgctgcggtccgtgcgcttctgttcctccgcccccttccccaagcacaaaccttcagccaaactgagcgtgcgggacgctctcggggctcagaacgcgagtggggagcgcattaagatccagggatggattcgttctgtccgatcccagaaggaagtcttgttcctgcatgtaaatgatgggtcatctttggaaagccttcaggttgttgcagattcaggccttgacagtagagaattaacttttgggagttctgtggaagtacaagggcagctgataaaaagtccatccaaaaggcaaaatgtggaactgaaggcagaaaaaattaaagttattggaaattgtgatgccaaggatttccccatcaaatataaagagaggcatcctctggagtacctgcgacaatatcctcactttaggtgtaggactaacgttctgggttctatattgaggattcgcagtgaagcgacagctgctattcattctttctttaaggacagtggctttgtacatattcatactccaataatcacatccaatgactctgagggagctggagaactttttcaacttgaaccttcaggcaaacttaaggtacctgaggagaatttcttcaatgttcctgctttcttaactgtctcaggacaacttcatctagaagtgatgtcaggagcttttactcaagtgtttacctttggtccgaccttccgagctgaaaattctcagagccggaggcacctggcagagttttatatgatagaagcagagatttcttttgttgacagccttcaagatcttatgcaggttatagaggaactgttcaaggctacaacaatgatggttctctcaaaatgtcctgaagatgttgaactctgtcacaaattcatagcacctggccaaaaggacagattagaacatatgctaaaaaacaactttttaatcatttcttatactgaagcagtggagatcttaaagcaagcatcccagaacttcacctttaccccagagtggggtgctgacctacggactgaacatgaaaagtacctggtgaagcactgtggcaacatacctgtcttcgttattaattatccattaacactcaagcctttctacatgagggataatgaagatggccctcagcacacggttgctgctgttgatcttctggttcctggagttggggaactctttggaggaggcctcagagaagaacgataccatttcttagaggagcgcttagccagtcgggacttacagaagtctaccaatggtatctggaccttcgtcgatttggatctgtgccacatggaggttttgggatgggatttgaacgctacctgcagtgcatcttgggtgttgacaatatcaaagatgttatccctttcccaaggtttcctcattcatgccttttatagctggaagattggttaaggaaaagcaccccccatggcagagacactgcacatgattgtgcatacagcagaatgcatgtttggattttagaaatgcagatttcaatatgtaattgttgtgccataagatatcatagaaaaaatataagtggttgtgattttcttagaaagttgagggtatttcacgtaaggatgagctcccgcaagaagaggtacttatagcaaggggactctcaaatccattacctcaattaagaaatgaagaaattgaattagtctcaaagtttcttttaaactctaaaacagaatgagataatgtattttacgttgtctataatcattaaatcactccctgtgtaatttgtgagaaccatctagtagctcgaaataaaataatgttgcatcttttctcccttgccatatactttgtgataaatccttatctcattttcagtacttcattaaacattgcagaaaaaaatattccttaaggtcttaattgatttaaagaagtagctattctgaattgaaatctcctttcattgaactggatgaaaaaatcatgtttaataactgttgcttttcaattttcaaagctgttgagatattacattaagtatttcaactctttaatcactgttgttataatttgtttatatttgatgtttataatttgtctaataaaatagatttttttaatagaaaaaaaaaaaaaaacaactcgcgactagat

SEQ ID NO: 68235 - DNA, 2119 bp, Homo sapiens
ccttcttccccgtagcgtgatgacgtaagcggcgttggcgtggtgaggtaggagtggttgcgcgtgttgcggcccgggttctgttcgtaggtttacaattgtcgcgggtagtggggcgccccagctgccaactgcacgtggtttctttctggcgtttgcctagtgtcctgtccattccgccccgttgggaagtgggaagcggagaggttctgtggggacagagctgggagtcctgaaggagaaagcgcgcagccgaggggctctggagtgccttagagcagagctgcggccgcggaaggggagcagctgagaaaggagggccgctgcaggcggggttcgaaccgtggggtctgggctgctcccgcggagggcctgggcggacgcgggatgctgggggtccgctgcctgctgcggtccgtgcgcttctgttcctccgcccccttccccaagcacaaaccttcagccaaactgagcgtgcgggacgctctcggggctcagaacgcgagtggggagcgcattaagatccagggatggattcgttctgtccgatcccagaaggaagtcttgttcctgcatgtaaatgatgggtcatctttggaaagccttcaggttgttgcagattcaggccttgacagtagagaattaacttttgggagttctgtggaagtacaagggcagctgataaaaagtccatccaaaaggcaaaatgtggaactgaaggcagaaaaaattaaagttattggaaattgtgatgccaaggatttccccatcaaatataaagagaggcatcctctggagtacctgcgacaatatcctcactttaggtgtaggactaacgttctgggttctatattgaggattcgcagtgaagcgacagctgctattcattctttctttaaggacagtggctttgtacatattcatactccaataatcacatccaatgactctgagggagctggagaactttttcaacttgaatggggtgctgacctacggactgaacatgaaaagtacctggtgaagcactgtggcaacatacctgtcttcgttattaattatccattaacactcaagcctttctacatgagggataatgaagatggccctcagcacacggttgctgctgttgatcttctggttcctggagttggggaactctttggaggaggcctcagagaagaacgataccatttcttagaggagcgcttagccagatcgggacttacagaagtctaccaatggtatctggaccttcgtcgatttggatctgtgccacatggaggttttgggatgggatttgaacgctacctgcagtgcatcttgggtgttgacaatatcaaagatgttatccctttcccaaggtttcctcattcatgccttttatagctggaagattggttaaggaaaagcaccccccatggcagagacactgcacatgattgtgcatacagcagaatgcatgtttggattttagaaatgcagatttcaatatgtaattgttgtgccataagatatcatagaaaaaatataagtggttgtgattttcttagaaagttgagggtatttcacgtaaggatgagctcccgcaagaagaggtacttatagcaaggggactctcaaatccattacctcaattaagaaatgaagaaattgaattagtctcaaagtttcttttaaactctaaaacagaatgagataatgtattttacgttgtctataatcattaaatcactccctgtgtaatttgtgagaaccatctagtagctcgaaataaaataatgttgcatcttttctcccttgccatatactttgtgataaatccttatctcattttcagtacttcattaaacattgcagaaaaaaatattccttaaggtcttaattgatttaaagaagtagctattctgaattgaaatctcctttcattgaactggatgaaaaaatcatgtttaataactgttgcttttcaattttcaaagctgttgagatattacattaagtatttcaactctttaatcactgttgttataatttgtttatatttgatgtttataatttgtctaataaaatagatttttttaatagaaaaaaaaaaaaaaacaactcgcgactagat

SEQ ID NO: 68236 - DNA, 2226 bp, Homo sapiens
ccttcttccccgtagcgtgatgacgtaagcggcgttggcgtggtgaggtaggagtggttgcgcgtgttgcggcccgggttctgttcgtaggtttacaattgtcgcgggtagtggggcgccccagctgccaactgcacgtggtttctttctggcgtttgcctagtgtcctgtccattccgccccgttgggaagtgggaagcggagaggttctgtggggacagagctgggagtcctgaaggagaaagcgcgcagccgaggggctctggagtgccttagagcagagctgcggccgcggaaggggagcagctgagaaaggagggccgctgcaggcggggttcgaaccgtggggtctgggctgctcccgcggagggcctgggcggacgcgggatgctgggggtccgctgcctgctgcggtccgtgcgcttctgttcctccgcccccttccccaagcacaaaccttcagccaaactgagcgtgcgggacgctctcggggctcagaacgcgagtggggagcgcattaagatccagggatggattcgttctgtccgatcccagaaggaagtcttgttcctgcatgtaaatgatgggtcatctttggaaagccttcaggttgttgcagattcaggccttgacagtagagaattaacttttgggagttctgtggaagtacaagggcagctgataaaaagtccatccaaaaggcaaaatgtggaactgaaggcagaaaaaattaaagttattggaaattgtgatgccaaggatttccccatcaaatataaagagaggcatcctctggagtacctgcgacaatatcctcactttaggtgtaggactaacgttctgggttctatattgaggattcgcagtgaagcgacagctgctattcattctttctttaaggacagtggctttgtacatattcatactccaataatcacatccaatgactctgagggagctggagaactttttcaacttgaaccttcaggcaaacttaaggtacctgaggagaatttcttcaatgttcctgctttcttaactgtctcaggacaacttcatctagaagtgatgtcaggagcttttactcaagtgtttacctttggtccgaccttccgagctgaaaattctcagagccggaggcacctggcagagttttatatgatagaagcagagatttcttttgttgacagccttcaagatcttatgcaggttatagaggaactgttcaaggctacaacaatgatggttctctcaaaatgtcctgaagatgttgaactctgtcacaaattcatagcacctggccaaaaggacagattagaacatatgctaaaaaacaactttttaatcatttcttatactgaagcagtggagatcttaaagcaagcatcccagaacttcacctttaccccagagtggggtgctgacctacggactgaacatgaaaagtacctggtgaagcactgtggcaacatacctgtcttcgttattaattatccattaacactcaagcctttctacatgagggataatgaagatggccctcagcacacggttgctgctgttgatcttctggttcctggagttggggaactctttggaggaggcctcagagaagaacgataccatttcttagaggagcgcttagccagatcgggacttacagaagtctaccaatggtatctggaccttcgtcgatttggatctgtgccacatggaggttttgggatgggatttgaacgctacctgcagtgcatcttgggtgttgacaatatcaaagatgttatccctttcccaaggtttcctcattcatgccttttatagctggaagattggttaaggaaaagcaccccccatggcagagacactgcacatgattgtgcatacagcagaatgcatgtttggattttagaaatgcagatttcaatatgtaattgttgtgccataagatatcatagaaaaaatataagtggttgtgattttcttagaaagttgagggtatttcacgtaaggatgagctcccgcaagaagaggtacttatagcaaggggactctcaaatccattacctcaattaagaaatgaagaaattgaattagtctcaaagtttcttttaaactctaaaacagaatgagataatgtattttacgttgtctataatcattaaatcactccctgtgtaatttgtgagaaccatctagtagctcgaaataaaataatgttgcatcttt

SEQ ID NO: 68237 - DNA, 2364 bp, Homo sapiens
ccttcttccccgtagcgtgatgacgtaagcggcgttggcgtggtgaggtaggagtggttgcgcgtgttgcggcccgggttctgttcgtaggtttacaattgtcgcgggtagtggggcgccccagctgccaactgcacgtggtttctttctggcgtttgcctagtgtcctgtccattccgccccgttgggaagtgggaagcggagaggttctgtggggacagagctgggagtcctgaaggagaaagcgcgcagccgaggggctctggagtgccttagagcagagctgcggccgcggaaggggagcagctgagaaaggagggccgctgcaggcggggttcgaaccgtggggtctgggctgctcccgcggagggcctgggcggacgcgggatgctgggggtccgctgcctgctgcggtccgtgcgcttctgttcctccgcccccttccccaagcacaaaccttcagccaaactgagcgtgcgggacgctctcggggctcagaacgcgagtggggagcgcattaagatccagggatggattcgttctgtccgatcccagaaggaagtcttgttcctgcatgtaaatgatgggtcatctttggaaagccttcaggttgttgcagattcaggccttgacagtagagaattaacttttgggagttctgtggaagtacaagggcagctgataaaaagtccatccaaaaggcaaaatgtggaactgaaggcagaaaagaggcatcctctggagtacctgcgacaatatcctcactttaggtgtaggactaacgttctgggttctatattgaggattcgcagtgaagcgacagctgctattcattctttctttaaggacagtggctttgtacatattcatactccaataatcacatccaatgactctgagggagctggagaactttttcaacttgaaccttcaggcaaacttaaggtacctgaggagaatttcttcaatgttcctgctttcttaactgtctcaggacaacttcatctagaagtgatgtcagggttatagaggaactgttcaaggctacaacaatgatggttctctcaaaatgtcctgaagatgttgaactctgtcacaaattcatagcacctggccaaaaggacagattagaacatatgctaaaaaacaactttttaatcatttcttatactgaagcagtggagatcttaaagcaagcatcccagaacttcacctttaccccagagtggggtgctgacctacggactgaacatgaaaagtacctggtgaagcactgtggcaacatacctgtcttcgttattaattatccattaacactcaagcctttctacatgagggataatgaagatggccctcagcacacggttgctgctgttgatcttctggttcctggagttggggaactctttggaggaggcctcagagaagaacgataccatttcttagaggagcgcttagccagatcgggacttacagaagtctaccaatggtatctggaccttcgtcgatttggatctgtgccacatggaggttttgggatgggatttgaacgctacctgcagtgcatcttgggtgttgacaatatcaaagatgttatccctttcccaaggtttcctcattcatgccttttatagctggaagattggttaaggaaaagcaccccccatggcagagacactgcacatgattgtgcatacagcagaatgcatgtttggattttagaaatgcagatttcaatatgtaattgttgtgccataagatatcatagaaaaaatataagtggttgtgattttcttagaaagttgagggtatttcacgtaaggatgagctcccgcaagaagaggtacttatagcaaggggactctcaaatccattacctcaattaagaaatgaagaaattgaattagtctcaaagtttcttttaaactctaaaacagaatgagataatgtattttacgttgtctataatcattaaatcactccctgtgtaatttgtgagaaccatctagtagctcgaaataaaataatgttgcatcttttctcccttgccatatactttgtgataaatccttatctcattttcagtacttcattaaacattgcagaaaaaaatattccttaaggtcttaattgatttaaagaagtagctattctgaattgaaatctcctttcattgaactggatgaaaaaatcatgtttaataactgttgcttttcaattttcaaagctgttgagatattacattaagtatttcaactctttaatcactgttgttataatttgtttatatttgatgtttataatttgtctaataaaatagatttttttaatagaaaaaaaaaaaaaaacaactcgcgactagat

SEQ ID NO: 68238 - DNA, 1187 bp, Homo sapiens
ttcatccctccccttcccattccgttccatatatataactggttcttcgtggggtgctgacctacggactgaacatgaaaagtacctggtgaagcactgtggcaacatacctgtcttcgttattaattatccattaacactcaagcctttctacatgagggataatgaagatggccctcagcacacggttgctgctgttgatcttctggttcctggagttggggaactctttggaggaggcctcagagaagaacgataccatttcttagaggagcgcttagccagatcgggacttacagaagtctaccaatggtatctggaccttcgtcgatttggatctgtgccacatggaggttttgggatgggatttgaacgctacctgcagtgcatcttgggtgttgacaatatcaaagatgttatccctttcccaaggtttcctcattcatgccttttatagctggaagattggttaaggaaaagcaccccccatggcagagacactgcacatgattgtgcatacagcagaatgcatgtttggattttagaaatgcagatttcaatatgtaattgttgtgccataagatatcatagaaaaaatataagtggttgtgattttcttagaaagttgagggtatttcacgtaaggatgagctcccgcaagaagaggtacttatagcaaggggactctcaaatccattacctcaattaagaaatgaagaaattgaattagtctcaaagtttcttttaaactctaaaacagaatgagataatgtattttacgttgtctataatcattaaatcactccctgtgtaatttgtgagaaccatctagtagctcgaaataaaataatgttgcatcttttctcccttgccatatactttgtgataaatccttatctcattttcagtacttcattaaacattgcagaaaaaaatattccttaaggtcttaattgatttaaagaagtagctattctgaattgaaatctcctttcattgaactggatgaaaaaatcatgtttaataactgttgcttttcaattttcaaagctgttgagatattacattaagtatttcaactctttaatcactgttgttataatttgtttatatttgatgtttataatttgtctaataaaatagatttttttaatagaaaaaaaaaaaaaaacaactcgcgactagat

SEQ ID NO: 68239 - DNA, 1657 bp, Homo sapiens
actccagaatggtatcttgtttttttaattttatacttctttgattaataatcagaatttattttatatgtcctaataacaatactacaaattaaactcttcattgccacattataagaaaaaacagacaaaaatatacacaccttaaatgttcaactaaaaaggaaagcagttaaataattataattctaatcaataaactattaaacattaaagctattaaaacataatgtgaagtatttttactaatataggaaaaatattagtttgtaatattaggtaagacaagtggtaagtttttatctgtaattatactttataaatgtataagggaaaaaatttgaaaggaaatccacaaaaatgtaattttccggtgctgataggtgatttttaatgtttcataatttttaacactatccacatttttataattaacatttctatcacatttatgaagaaaatacatttgtgttcagtatactacacaaatggtgcaagagagaggaaattgtccacttataatttgtatgtagtcagtaagattctggtaggtagttaattagccattgccaaaatgttaaaggtttacttgcttcagaaactgactgttggaatcacctgaaaatataatgctaataattttttttttttccttaggttgctgctgttgatcttctggttcctggagttggggaactctttggaggaggcctcagagaagaacgataccatttcttagaggagcgcttagccagatcgggacttacagaagtctaccaatggtatctggaccttcgtcgatttggatctgtgccacatggaggttttgggatgggatttgaacgctacctgcagtgcatcttgggtgttgacaatatcaaagatgttatccctttcccaaggtttcctcattcatgccttttatagctggaagattggttaaggaaaagcaccccccatggcagagacactgcacatgattgtgcatacagcagaatgcatgtttggattttagaaatgcagatttcaatatgtaattgttgtgccataagatatcatagaaaaaatataagtggttgtgattttcttagaaagttgagggtatttcacgtaaggatgagctcccgcaagaagaggtacttatagcaaggggactctcaaatccattacctcaattaagaaatgaagaaattgaattagtctcaaagtttcttttaaactctaaaacagaatgagataatgtattttacgttgtctataatcattaaatcactccctgtgtaatttgtgagaaccatctagtagctcgaaataaaataatgttgcatcttttctcccttgccatatactttgtgataaatccttatctcattttcagtacttcattaaacattgcagaaaaaaatattccttaaggtcttaattgatttaaagaagtagctattctgaattgaaatctcctttcattgaactggatgaaaaaatcatgtttaataactgttgcttttcaattttcaaagctgttgagatattacattaagtatttcaactctttaatcactgttgttataatttgtttatatttgatgtttataatttgtctaataaaatagatttttttaatagaaaaaaaaaaaaaaacaactcgcgactagat

SEQ ID NO: 68240 - DNA, 1630 bp, Homo sapiens
actccagaatggtatcttgtttttttaattttatacttctttgattaataatcagaatttattttatatgtcctaataacaatactacaaattaaactcttcattgccacattataagaaaaaacagacaaaaatatacacaccttaaatgttcaactaaaaaggaaagcagttaaataattataattctaatcaataaactattaaacattaaagctattaaaacataatgtgaagtatttttactaatataggaaaaatattagtttgtaatattaggtaagacaagtggtaagtttttatctgtaattatactttataaatgtataagggaaaaaatttgaaaggaaatccacaaaaatgtaattttccggtgctgataggtgatttttaatgtttcataatttttaacactatccacatttttataattaacatttctatcacatttatgaagaaaatacatttgtgttcagtatactacacaaatggtgcaagagagaggaaattgtccacttataatttgtatgtagtcagtaagattctggtaggtagttaattagccattgccaaaatgttaaaggtttacttgcttcagaaactgactgttggaatcacctgaaaatataatgctaataattttttttttttccttaggttgctgctgttgatcttctggttcctggagttggggaactctttggaggaggcctcagagaagaacgataccatttcttagaggagcgcttagccaggtatctggaccttcgtcgatttggatctgtgccacatggaggttttgggatgggatttgaacgctacctgcagtgcatcttgggtgttgacaatatcaaagatgttatccctttcccaaggtttcctcattcatgccttttatagctggaagattggttaaggaaaagcaccccccatggcagagacactgcacatgattgtgcatacagcagaatgcatgtttggattttagaaatgcagatttcaatatgtaattgttgtgccataagatatcatagaaaaaatataagtggttgtgattttcttagaaagttgagggtatttcacgtaaggatgagctcccgcaagaagaggtacttatagcaaggggactctcaaatccattacctcaattaagaaatgaagaaattgaattagtctcaaagtttcttttaaactctaaaacagaatgagataatgtattttacgttgtctataatcattaaatcactccctgtgtaatttgtgagaaccatctagtagctcgaaataaaataatgttgcatcttttctcccttgccatatactttgtgataaatccttatctcattttcagtacttcattaaacattgcagaaaaaaatattccttaaggtcttaattgatttaaagaagtagctattctgaattgaaatctcctttcattgaactggatgaaaaaatcatgtttaataactgttgcttttcaattttcaaagctgttgagatattacattaagtatttcaactctttaatcactgttgttataatttgtttatatttgatgtttataatttgtctaataaaatagatttttttaatagaaaaaaaaaaaaaaacaactcgcgactagat

SEQ ID NO: 68241 - DNA, 1656 bp, Homo sapiens
actccagaatggtatcttgtttttttaattttatacttctttgattaataatcagaatttattttatatgtcctaataacaatactacaaattaaactcttcattgccacattataagaaaaaacagacaaaaatatacacaccttaaatgttcaactaaaaaggaaagcagttaaataattataattctaatcaataaactattaaacattaaagctattaaaacataatgtgaagtatttttactaatataggaaaaatattagtttgtaatattaggtaagacaagtggtaagtttttatctgtaattatactttataaatgtataagggaaaaaatttgaaaggaaatccacaaaaatgtaattttccggtgctgataggtgatttttaatgtttcataatttttaacactatccacatttttataattaacatttctatcacatttatgaagaaaatacatttgtgttcagtatactacacaaatggtgcaagagagaggaaattgtccacttataatttgtatgtagtcagtaagattctggtaggtagttaattagccattgccaaaatgttaaaggtttacttgcttcagaaactgactgttggaatcacctgaaaatataatgctaataattttttttttttccttaggttgctgctgttgatcttctggttcctggagttggggaactctttggaggaggcctcagagaagaacgataccatttcttagaggagcgcttagccagtcgggacttacagaagtctaccaatggtatctggaccttcgtcgatttggatctgtgccacatggaggttttgggatgggatttgaacgctacctgcagtgcatcttgggtgttgacaatatcaaagatgttatccctttcccaaggtttcctcattcatgccttttatagctggaagattggttaaggaaaagcaccccccatggcagagacactgcacatgattgtgcatacagcagaatgcatgtttggattttagaaatgcagatttcaatatgtaattgttgtgccataagatatcatagaaaaaatataagtggttgtgattttcttagaaagttgagggtatttcacgtaaggatgagctcccgcaagaagaggtacttatagcaaggggactctcaaatccattacctcaattaagaaatgaagaaattgaattagtctcaaagtttcttttaaactctaaaacagaatgagataatgtattttacgttgtctataatcattaaatcactccctgtgtaatttgtgagaaccatctagtagctcgaaataaaataatgttgcatcttttctcccttgccatatactttgtgataaatccttatctcattttcagtacttcattaaacattgcagaaaaaaatattccttaaggtcttaattgatttaaagaagtagctattctgaattgaaatctcctttcattgaactggatgaaaaaatcatgtttaataactgttgcttttcaattttcaaagctgttgagatattacattaagtatttcaactctttaatcactgttgttataatttgtttatatttgatgtttataatttgtctaataaaatagatttttttaatagaaaaaaaaaaaaaaacaactcgcgactagat

SEQ ID NO: 68242 - DNA, 1185 bp, Homo sapiens
gttgaagctgtcgcgaccacagttcctacgaaatagtaaaagcacttctggggtgctgacctacggactgaacatgaaaagtacctggtgaagcactgtggcaacatacctgtcttcgttattaattatccattaacactcaagcctttctacatgagggataatgaagatggccctcagcacacggttgctgctgttgatcttctggttcctggagttggggaactctttggaggaggcctcagagaagaacgataccatttcttagaggagcgcttagccagtcgggacttacagaagtctaccaatggtatctggaccttcgtcgatttggatctgtgccacatggaggttttgggatgggatttgaacgctacctgcagtgcatcttgggtgttgacaatatcaaagatgttatccctttcccaaggtttcctcattcatgccttttatagctggaagattggttaaggaaaagcaccccccatggcagagacactgcacatgattgtgcatacagcagaatgcatgtttggattttagaaatgcagatttcaatatgtaattgttgtgccataagatatcatagaaaaaatataagtggttgtgattttcttagaaagttgagggtatttcacgtaaggatgagctcccgcaagaagaggtacttatagcaaggggactctcaaatccattacctcaattaagaaatgaagaaattgaattagtctcaaagtttcttttaaactctaaaacagaatgagataatgtattttacgttgtctataatcattaaatcactccctgtgtaatttgtgagaaccatctagtagctcgaaataaaataatgttgcatcttttctcccttgccatatactttgtgataaatccttatctcattttcagtacttcattaaacattgcagaaaaaaatattccttaaggtcttaattgatttaaagaagtagctattctgaattgaaatctcctttcattgaactggatgaaaaaatcatgtttaataactgttgcttttcaattttcaaagctgttgagatattacattaagtatttcaactctttaatcactgttgttataatttgtttatatttgatgtttataatttgtctaataaaatagatttttttaatagaaaaaaaaaaaaaaacaactcgcgactagat

SEQ ID NO: 68243 - DNA, 925 bp, Homo sapiens
atgattgactggagtgacaaaactaaagagacaggaaagaaaggttcagtgtatctggaccttcgtcgatttggatctgtgccacatggaggttttgggatgggatttgaacgctacctgcagtgcatcttgggtgttgacaatatcaaagatgttatccctttcccaaggtttcctcattcatgccttttatagctggaagattggttaaggaaaagcaccccccatggcagagacactgcacatgattgtgcatacagcagaatgcatgtttggattttagaaatgcagatttcaatatgtaattgttgtgccataagatatcatagaaaaaatataagtggttgtgattttcttagaaagttgagggtatttcacgtaaggatgagctcccgcaagaagaggtacttatagcaaggggactctcaaatccattacctcaattaagaaatgaagaaattgaattagtctcaaagtttcttttaaactctaaaacagaatgagataatgtattttacgttgtctataatcattaaatcactccctgtgtaatttgtgagaaccatctagtagctcgaaataaaataatgttgcatcttttctcccttgccatatactttgtgataaatccttatctcattttcagtacttcattaaacattgcagaaaaaaatattccttaaggtcttaattgatttaaagaagtagctattctgaattgaaatctcctttcattgaactggatgaaaaaatcatgtttaataactgttgcttttcaattttcaaagctgttgagatattacattaagtatttcaactctttaatcactgttgttataatttgtttatatttgatgtttataatttgtctaataaaatagatttttttaatagaaaaaaaaaaaaaaacaactcgcgactagat

SEQ ID NO: 68244 - DNA, 676 bp, Homo sapiens
accccctctgccttcttattccactttatttttcttcatagcacgaatagctacttgtttatttatctgtctactctctcctcacctgcatctctcgctctctctctctctgacacacacatgcgcgcacgcacattgtctccatgaaggctgagctttatttttatctccagtgcctagaattgtgtgtagtgcctagtaggtgccaagtatatgtctgttggataaataaatgaattaatggtgaattttaggaaaaagtattttgctgttgtagtcttttaatagggcattggcatatcatggattcagagaataatctttacttgcttaagtgactagcttcactgtgtatattgcaagtagatgaggagttgaggttattgaatggttacttgtcttcaggcagatcattctttcataggattagatcagccttaattcctgattattcatgacctcacagtgtgatataggagtacgctttttctggttttaaaatgaactagttagcagctccattgtattgacttttctctgcttgtatcctgttttcctccagcatttcttatactgaagcagtggagatcttaaagcaagcatcccagaacttcacctttaccccagaggtagtattttgtgtgtatgtatatatgtgtgtgtgaaaatgcttcct

SEQ ID NO: 68245 - DNA, 185 bp, Homo sapiens
ttgctgctgttgatcttctggttcctggagttggggaactctttggaggaggcctcagagaagaacgataccatttcttagaggagcgcttagccagtcgggacttacagaagtctaccaatgagaaattgagcataaggcgctcaaaggtggtcattgcatagtaacagagtgaagaccctggg

SEQ ID NO: 68246 - DNA, 2551 bp, Homo sapiens
ccttcttccccgtagcgtgatgacgtaagcggcgttggcgtggtgaggtaggagtggttgcgcgtgttgcggcccgggttctgttcgtaggtttacaattgtcgcgggtagtggggcgccccagctgccaactgcacgtggtttctttctggcgtttgcctagtgtcctgtccattccgccccgttgggaagtgggaagcggagaggttctgtggggacagagctgggagtcctgaaggagaaagcgcgcagccgaggggctctggagtgccttagagcagagctgcggccgcggaaggggagcagctgagaaaggagggccgctgcaggcggggttcgaaccgtggggtctgggctgctcccgcggagggcctgggcggacgcgggatgctgggggtccgctgcctgctgcggtccgtgcgcttctgttcctccgcccccttccccaagcacaaaccttcagccaaactgagcgtgcgggacgctctcggggctcagaacgcgagtggggagcgcattaagatccagggatggattcgttctgtccgatcccagaaggaagtcttgttcctgcatgtaaatgatgggtcatctttggaaagccttcaggttgttgcagattcaggccttgacagtagagaattaacttttgggagttctgtggaagtacaagggcagctgataaaaagtccatccaaaaggcaaaatgtggaactgaaggcagaaaaaattaaagttattggaaattgtgatgccaaggatttccccatcaaatataaagagaggcatcctctggagtacctgcgacaatatcctcactttaggtgtaggactaacgttctgggttctatattgaggattcgcagtgaagcgacagctgctattcattctttctttaaggacagtggctttgtacatattcatactccaataatcacatccaatgactctgagggagctggagaactttttcaacttgaaccttcaggcaaacttaaggtacctgaggagaatttcttcaatgttcctgctttcttaactgtctcaggacaacttcatctagaagtgatgtcaggagcttttactcaagtgtttacctttggtccgaccttccgagctgaaaattctcagagccggaggcacctggcagagttttatatgatagaagcagagatttcttttgttgacagccttcaagatcttatgcaggttatagaggaactgttcaaggctacaacaatgatggttctctcaaaatgtcctgaagatgttgaactctgtcacaaattcatagcacctggccaaaaggacagattagaacatatgctaaaaaacaactttttaatcatttcttatactgaagcagtggagatcttaaagcaagcatcccagaacttcacctttaccccagagtggggtgctgacctacggactgaacatgaaaagtacctggtgaagcactgtggcaacatacctgtcttcgttattaattatccattaacactcaagcctttctacatgagggataatgaagatggccctcagcacacggttgctgctgttgatcttctggttcctggagttggggaactctttggaggaggcctcagagaagaacgataccatttcttagaggagcgcttagccagatcgggacttacagaagtctaccaatggtatctggaccttcgtcgatttggatctgtgccacatggaggttttgggatgggatttgaacgctacctgcagtgcatcttgggtgttgacaatatcaaagatgttatccctttcccaaggtttcctcattcatgccttttatagctggaagattggttaaggaaaagcaccccccatggcagagacactgcacatgattgtgcatacagcagaatgcatgtttggattttagaaatgcagatttcaatatgtaattgttgtgccataagatatcatagaaaaaatataagtggttgtgattttcttagaaagttgagggtatttcacgtaaggatgagctcccgcaagaagaggtacttatagcaaggggactctcaaatccattacctcaattaagaaatgaagaaattgaattagtctcaaagtttcttttaaactctaaaacagaatgagataatgtattttacgttgtctataatcattaaatcactccctgtgtaatttgtgagaaccatctagtagctcgaaataaaataatgttgcatcttttctcccttgccatatactttgtgataaatccttatctcattttcagtacttcattaaacattgcagaaaaaaatattccttaaggtcttaattgatttaaagaagtagctattctgaattgaaatctcctttcattgaactggatgaaaaaatcatgtttaataactgttgcttttcaattttcaaagctgttgagatattacattaagtatttcaactctttaatcactgttgttataatttgtttatatttgatgtttataatttgtctaataaaatagatttttttaatagaaaaaaaaaaaaaaacaactcgcgactagat

SEQ ID NO: 68247 - DNA, 2070 bp, Homo sapiens
ccttcttccccgtagcgtgatgacgtaagcggcgttggcgtggtgagggatggattcgttctgtccgatcccagaaggaagtcttgttcctgcatgtaaatgatgggtcatctttggaaagccttcaggttgttgcagattcaggccttgacagtagagaattaacttttgggagttctgtggaagtacaagggcagctgataaaaagtccatccaaaaggcaaaatgtggaactgaaggcagaaaaaattaaagttattggaaattgtgatgccaaggatttccccatcaaatataaagagaggcatcctctggagtacctgcgacaatatcctcactttaggtgtaggactaacgttctgggttctatattgaggattcgcagtgaagcgacagctgctattcattctttctttaaggacagtggctttgtacatattcatactccaataatcacatccaatgactctgagggagctggagaactttttcaacttgaaccttcaggcaaacttaaggtacctgaggagaatttcttcaatgttcctgctttcttaactgtctcaggacaacttcatctagaagtgatgtcaggagcttttactcaagtgtttacctttggtccgaccttccgagctgaaaattctcagagccggaggcacctggcagagttttatatgatagaagcagagatttcttttgttgacagccttcaagatcttatgcaggttatagaggaactgttcaaggctacaacaatgatggttctctcaaaatgtcctgaagatgttgaactctgtcacaaattcatagcacctggccaaaaggacagattagaacatatgctaaaaaacaactttttaatcatttcttatactgaagcagtggagatcttaaagcaagcatcccagaacttcacctttaccccagagtggggtgctgacctacggactgaacatgaaaagtacctggtgaagcactgtggcaacatacctgtcttcgttattaattatccattaacactcaagcctttctacatgagggataatgaagatggccctcagcacacggttgctgctgttgatcttctggttcctggagttggggaactctttggaggaggcctcagagaagaacgataccatttcttagaggagcgcttagccagatcgggacttacagaagtctaccaatggtatctggaccttcgtcgatttggatctgtgccacatggaggttttgggatgggatttgaacgctacctgcagtgcatcttgggtgttgacaatatcaaagatgttatccctttcccaaggtttcctcattcatgccttttatagctggaagattggttaaggaaaagcaccccccatggcagagacactgcacatgattgtgcatacagcagaatgcatgtttggattttagaaatgcagatttcaatatgtaattgttgtgccataagatatcatagaaaaaatataagtggttgtgattttcttagaaagttgagggtatttcacgtaaggatgagctcccgcaagaagaggtacttatagcaaggggactctcaaatccattacctcaattaagaaatgaagaaattgaattagtctcaaagtttcttttaaactctaaaacagaatgagataatgtattttacgttgtctataatcattaaatcactccctgtgtaatttgtgagaaccatctagtagctcgaaataaaataatgttgcatcttttctcccttgccatatactttgtgataaatccttatctcattttcagtacttcattaaacattgcagaaaaaaatattccttaaggtcttaattgatttaaagaagtagctattctgaattgaaatctcctttcattgaactggatgaaaaaatcatgtttaataactgttgcttttcaattttcaaagctgttgagatattacattaagtatttcaactctttaatcactgttgttataatttgtttatatttgatgtttataatttgtctaataaaatagatttttttaatagaaaaaaaaaaaaaaacaactcgcgactagat

SEQ ID NO: 68248 - DNA, 2496 bp, Homo sapiens
ccttcttccccgtagcgtgatgacgtaagcggcgttggcgtggtgaggtaggagtggttgcgcgtgttgcggcccgggttctgttcgtaggtttacaattgtcgcgggtagtggggcgccccagctgccaactgcacgtggtttctttctggcgtttgcctagtgtcctgtccattccgccccgttgggaagtgggaagcggagaggttctgtggggacagagctgggagtcctgaaggagaaagcgcgcagccgaggggctctggagtgccttagagcagagctgcggccgcggaaggggagcagctgagaaaggagggccgctgcaggcggggttcgaaccgtggggtctgggctgctcccgcggagggcctgggcggacgcgggatgctgggggtccgctgcctgctgcggtccgtgcgcttctgttcctccgcccccttccccaagcacaaaccttcagccaaactgagcgtgcgggacgctctcggggctcagaacgcgagtggggagcgcattaagatccagggatggattcgttctgtccgatcccagaaggaagtcttgttcctgcatgtaaatgatgggtcatctttggaaagccttcaggttgttgcagattcaggccttgacagtagagaattaacttttgggagttctgtggaagtacaagggcagctgataaaaagtccatccaaaaggcaaaatgtggaactgaaggcagaaaaaattaaagttattggaaattgtgatgccaaggatttccccatcaaatataaagagaggcatcctctggagtacctgcgacaatatcctcactttaggtgtaggactaacgttctgggttctatattgaggattcgcagtgaagcgacagctgctattcattctttctttaaggacagtggctttgtacatattcatactccaataatcacatccaatgactctgagggagctggagaactttttcaacttgaaccttcaggcaaacttaaggtacctgaggagaatttcttcaatgttcctgctttcttaactgtctcaggacaacttcatctagaagtgatgtcaggagcttttactcaagtgtttacctttggtccgaccttccgagctgaaaattctcagagccggaggcacctggcagagttttatatgatagaagcagagatttcttttgttgacagccttcaagatcttatgcaggttatagaggaactgttcaaggctacaacaatgatggttctctcaaaatgtcctgaagatgttgaactctgtcacaaattcatagcacctggccaaaaggacagattagaacatatgctaaaaaacaactttttaatcatttcttatactgaagcagtggagatcttaaagcaagcatcccagaacttcacctttaccccagagtggggtgctgacctacggactgaacatgaaaagtacctggtgaagcactgtggcaacatacctgtcttcgttattaattatccattaacactcaagcctttctacatgagggataatgaagatggccctcagcacacggttgctgctgttgatcttctggttcctggagttggggaactctttggaggaggcctcagagaagaacgataccatttcttagaggagcgcttagccagtcgggacttacagaagtctaccaatggtatctggaccttcgtcgatttggatctgtgccacatggaggttttgggatgggatttgaacgctacctgcagtgcatcttgggtgttgacaatatcaaagatgttatccctttcccaaggtttcctcattcatgccttttatagctggaagattggttaaggaaaagcaccccccatgaaatgcagatttcaatatgtaattgttgtgccataagatatcatagaaaaaatataagtggttgtgattttcttagaaagttgagggtatttcacgtaaggatgagctcccgcaagaagaggtacttatagcaaggggactctcaaatccattacctcaattaagaaatgaagaaattgaattagtctcaaagtttcttttaaactctaaaacagaatgagataatgtattttacgttgtctataatcattaaatcactccctgtgtaatttgtgagaaccatctagtagctcgaaataaaataatgttgcatcttttctcccttgccatatactttgtgataaatccttatctcattttcagtacttcattaaacattgcagaaaaaaatattccttaaggtcttaattgatttaaagaagtagctattctgaattgaaatctcctttcattgaactggatgaaaaaatcatgtttaataactgttgcttttcaattttcaaagctgttgagatattacattaagtatttcaactctttaatcactgttgttataatttgtttatatttgatgtttataatttgtctaataaaatagatttttttaatagaaaaaaaaaaaaaaacaactcgcgactagat

SEQ ID NO: 68249 - DNA, 1558 bp, Homo sapiens
gatgtggagggagcttgtacatcggaggtctggaccaataaggtccggagcaactccgtacttaggttgctgttaatcgggtgcacctgtcgtagagggatgttgttagatagcttagacttgctgggtggtgagctagtccgattccaagatcattagtgctaggttagtagaggcactgtctatcgtgggtctatcaaatatatgatgtgtgcgtactcaattagtgtccatgcaatagtgatgtaagtctagtgtcaatgttccagtagccactctgcgccatatagtgatcagggattaatgtgacgatattgctaggagaatacgagacttattctgaatgcattctcttagtactgaagcagtggagtagtcttatagcgcaagcatcccggatcttcacggtttaccccagagatggggtgctgacctacggactgaacatgaaaagtacctggtgaagcactgtggcaacatacctgtcttcgttattaattatccattaacactcaagcctttctacatgagggataatgaagatggccctcagcacacggttgctgctgttgatcttctggttcctggagttggggaactctttggaggaggcctcagagaagaacgataccatttcttagaggagcgcttagccagtcgggacttacagaagtctaccaatggtatctggaccttcgtcgatttggatctgtgccacatggaggttttgggatgggatttgaacgctacctgcagtgcatcttgggtgttgacaatatcaaagatgttatccctttcccaaggtttcctcattcatgccttttatagctggaagattggttaaggaaaagcaccccccatggcagagacactgcacatgattgtgcatacagcagaatgcatgtttggattttagaaatgcagatttcaatatgtaattgttgtgccataagatatcatagaaaaaatataagtggttgtgattttcttagaaagttgagggtatttcacgtaaggatgagctcccgcaagaagaggtacttatagcaaggggactctcaaatccattacctcaattaagaaatgaagaaattgaattagtctcaaagtttcttttaaactctaaaacagaatgagataatgtattttacgttgtctataatcattaaatcactccctgtgtaatttgtgagaaccatctagtagctcgaaataaaataatgttgcatcttttctcccttgccatatactttgtgataaatccttatctcattttcagtacttcattaaacattgcagaaaaaaatattccttaaggtcttaattgatttaaagaagtagctattctgaattgaaatctcctttcattgaactggatgaaaaaatcatgtttaataactgttgcttttcaattttcaaagctgttgagatattacattaagtatttcaactctttaatcactgttgttataatttgtttatatttgatgtttataatttgtctaataaaatagatttttttaatagaaaaaaaaaaaaaaacaactcgcgactagat

SEQ ID NO: 68250 - DNA, 1279 bp, Homo sapiens
gtccttgtacttgctgttccttttgcctggaatactcctcccaagatacttctatggttcatttccttactcggtcatttcttatactgaagcagtggagatcttaaagcaagcatcccagaacttcacctttaccccagagtggggtgctgacctacggactgaacatgaaaagtacctggtgaagcactgtggcaacatacctgtcttcgttattaattatccattaacactcaagcctttctacatgagggataatgaagatggccctcagcacacggttgctgctgttgatcttctggttcctggagttggggaactctttggaggaggcctcagagaagaacgataccatttcttagaggagcgcttagccagtcgggacttacagaagtctaccaatggtatctggaccttcgtcgatttggatctgtgccacatggaggttttgggatgggatttgaacgctacctgcagtgcatcttgggtgttgacaatatcaaagatgttatccctttcccaaggtttcctcattcatgccttttatagctggaagattggttaaggaaaagcaccccccatggcagagacactgcacatgattgtgcatacagcagaatgcatgtttggattttagaaatgcagatttcaatatgtaattgttgtgccataagatatcatagaaaaaatataagtggttgtgattttcttagaaagttgagggtatttcacgtaaggatgagctcccgcaagaagaggtacttatagcaaggggactctcaaatccattacctcaattaagaaatgaagaaattgaattagtctcaaagtttcttttaaactctaaaacagaatgagataatgtattttacgttgtctataatcattaaatcactccctgtgtaatttgtgagaaccatctagtagctcgaaataaaataatgttgcatcttttctcccttgccatatactttgtgataaatccttatctcattttcagtacttcattaaacattgcagaaaaaaatattccttaaggtcttaattgatttaaagaagtagctattctgaattgaaatctcctttcattgaactggatgaaaaaatcatgtttaataactgttgcttttcaattttcaaagctgttgagatattacattaagtatttcaactctttaatcactgttgttataatttgtttatatttgatgtttataatttgtctaataaaatagatttttttaatagaaaaaaaaaaaaaaacaactcgcgactagat

SEQ ID NO: 68251 - DNA, 371 bp, Homo sapiens
ggcagaggttgcggtgagccgagattgcgccattgcactccagcctgggaaacaagaacgaaactccgtctcaaaaaaaaaaaaaaatctggaggcaaattaacattatttctcaaataagtacagcaggccagtgtgttcatgtacatgaccccaatttgcacatacgctaagtgagggacaaacttgatcatgggcctgaaggatccggttgcagtgagccgagatcgccccactgtactccagcatgggcgacagagtgagattccgtctcaaaaaaagaaaagaaaagaaaagaaaacagcactcactgatggcttctatctaccataaacaattttctttttctttttaatttttttgagacgcag

SEQ ID NO: 68252 - DNA, 634 bp, Homo sapiens
catctgtttacttttaagaattgaaattttcttccagaatctccgaacaagaccctaagctatgacatccagttcaatgactattcgtctcccaaatatacgtacgcttttaataaatatgtaaatctttggaccaccttccaagtatggtgtgttcaacagatagtagtatgttactaccgtctgtaactaaaattttcaggggcttaacacaagagtaatttctttctggctcatataacactttaataatgcaggtgtcataatgtcagtggacccagtctccttccataccttagaacaggggtcaagaaacattttctgtaaagggccacatagtgttttaggctttgtgagccataaggtctgtctcaactatttaactctgcctctgcagctgttgctccacagacaatacttgaaaataaatgggcatggttatgttctagtgaaattttatttacaaatccaggcagcctgcttggacaaaaaaaaaaaaaaaaaaaaaaaagtcacacctacttttaaccacatgagcccagaaatgacacacagcattttctctaccatatcattactaagaatgaggcctcatcaagataaaagggggtatttcagtaaggccagatttaca

SEQ ID NO: 68253 - DNA, 809 bp, Homo sapiens
atttgccatgggacaccggaaggattgtgtacgtgcagccgcccccaagaaacacaaggacatgacttagcttctgtgcccacccccatggccattggtcttacatataccatacctggatatcattcattctcctcaaaagaaggagaatccactcaaaatgaacatcaggatgtgagctcccatcatggagatgcccaggcagaaaccagaagacgatgcagtcaggcatgggggcggggttggaggaggagctctgggacctcctctgcactgagattctgtgattctgcttttgttctgtgttccccgttctgcgattctgcttttggatctcacattgtttcttcctgtaaagcccttggcaaaaagtgctatccgactgtatgttgtcataccaagactttcatcacacagtgttttgccaacatcagactgtgcggataaagggttctttgagaaaatctatttcacgagtcttgggtcctctgccttcagaattcagcacccacctccctccacccccaccttcagtcacagacgaatgaatagtcgcagaagtgctcacatcctcccgcttctagttctttctgcctagcccctacacagtctccaaggccagcagtttcctgggtttctccactcagggagacatctattgcgcaccttctgttggcagcactgattgctgagccctggactccagcacagacgtgaaaaccctgttccaactggatccaacccctgactagctttgagactttggacaagttacttactctatctagtattcaccttcctctttcaaa

SEQ ID NO: 68254 - DNA, 286 bp, Homo sapiens
ttttaaaaaaacctgaaaagccaaaataacttgttgggaagtttcaatgtttacttcacctaaactaaggatgcctttggagaagaagtgctcagagccagactagactttgaattcatttactgagcctgttacataccagacactgggcataccccctttttttttttttcggtttgctttattgtgccttgcagatttttttttttttttttttcacaaaataaaggttgtgtccaaccccgtgttgagtgagtctattggcatcattttgccaacagcaaaa

SEQ ID NO: 68255 - DNA, 2714 bp, Homo sapiens
  misc_feature (1327)..(1327): n is a, c, g, or t
  misc_feature (2099)..(2099): n is a, c, g, or t
  misc_feature (2257)..(2257): n is a, c, g, or t
  misc_feature (2654)..(2654): n is a, c, g, or t
  misc_feature (2714)..(2714): n is a, c, g, or t
actctgtgatgttcacacaacaactaaataatttgatgtatccctgcgattaagcaacacatgattagtatgaagaatggtttgatagttgaaggaaattaactcaaaactcatttgcttccagggctagtaatatgttctacatcatgtatcaccccacgcctcaaactctagccctgtacactaacttatcacaaaccttggatttttttgcacaattatcaaaatgacatatcaaaccaaccgtacatcttgacataaaaacagtatgagacaaaatgaaattctcttgggatattgaaaaaattttttttgcctgtgaatttagtaattttacttattaagaattttcaaatgatttcagttcttaaactgaaaaataaaattcaaaaattaattgcattttttccagtgtttcttctatgtctttatattggtagaactgtccaactatatggtaaggatgtgaaatgttaaatttacttgaactagagttacaatgaacattagaattaataatcagacttcttttttttttctttttttgagaagggagtttcgctcttgttgcccaggctggagtgcagtggcacggtcttggctcaccgccacctccaccttccagattcaagcaattctcctgccccagcctcccgggtagctgggattacaggcatgcgccaccacacccagctaatttttgtattattagagatggggtttctctgtgttggtcaggctggtcctcaaactcccgatctcaggtgatctgcctgccttggcctcccaaagtgctgggattacaggcgtgagccacttcgcccggccaataatcagacttttagtagtaaaattactttcaaaaatggagattcctttgtcaaatagtactattattagtactaagattgtaaagaggttatttgtgtctgattttgagtttgatgctacagagaagacaggttaggcctgcattgacgtttttcatcaagggcagaattgatgatacagaaacttgatttctgtctaggcatggtggctcatacctacaatcctggtgctttgggaggcggaggctggaagctcactcgagactaggagtttgagaccagcttgggcaatgtagtgagaccaccgtttctacaaaacaaaaaacaggtttctttagttaagtataaatcattgatctgtgattaatccaaacactttttcctcagtatagaccttggggttcttcggtgtttgactaccttcttttgaaggaaaccaccttttttttttttttttttttttttgaggcagtctcactctgttgcccaggctggantgcagtggcacaatctcagcccactgcaacctccgcctcatgggttcaagtgattctccagcttcagcctcctgagtagctggcattacaggcatgcaccaccatgcccagctaatttttgtatttttagtaggggagggggtgtttcgccatgttgcccaggctgttctcaaactcctgacctcaagcgatccacccaccctggcctcccgaagtgctgggattacaggcatgatccaccgtgcccacccgaaaccacttgtaatatacctttaggagaatgcttttagttacatcatgatccctttcatgtagctaacaacaaaaatgaatattaaccccaaatattggaactcgtattttgaagcaagttatttcttggtatactttagtgccagaattggtactgttatgtgattaactgtttttgagactaagaaaatattttgctggacatctgatgaaattatcttaaaaacagtgcttgggtgttttccctggagtgtagtggcaagagtactctgttgtccatcagagccacttgctgctctcagctggccttgctgttgaatggcataatctgatttcgttggagtacccaagtcctaagatttgaagaataagggttattatctcagtctcatcttttctctgagatagcatttgttcaggaaatgttatctgttttcaatggtgaagggagtgagagtctgcttaggagttactgtatacattaaacattggtgaccggcctttaaagaattagaggctnggcctggtgacttacacctataatcccagcagattgggaggccagggcaggaggatatcttgagcccgggagttcaagaccagcctaggcagcatagtgagaccctgtctctacaacaaaatttttacttttttatttttatttttattttttgaganggagttttgctctgtcacccaggctggagtgcagtggcatgatcttggctcactgcaacctccacctcctgggttcaagcgattctcctgcctcagcctcctgagtagctgggaccacaggcgagggctaccatgcccagaatatttttgtattttttttttggtagagatggggtttcaccactttggccaggctggtcttgaactcctgacctcaagtgatccacctgcctcggcctcccgaagtgctgggattacaggcgtgagccactgcacccagccctacgaataatttttaaaaataaattagttgggtgtggtggcacacctgtggttctagctactctgtgaggctgaggcaagaggattgcttgggtccaggagatctagactgcantgagctgtgatcatgctacagcactcgaagcctggggaacagagcaagaacttgtctcan

SEQ ID NO: 68256 - DNA, 473 bp, Homo sapiens
tggccactgaaaagcaagttttatgagtgcataattttaaaagttcagagatcactccagtggaccgcaagggggagggattcattctatactttgagatcatttattaggaaaaataaaacatactaaagaaaggaaaagaaaatatagcatatatgttacattttaaaaattaaatttttaggccaggcatggtggctcatgtttgtaatcctagcactttgggaggctgaggtgggaggatcacttgagcccaggagttcaagaccagcatgggcaacatggtgagactctgtctccacaaaaaataaaaaactagcctgacatggtggcgcgtgcctgtggtcccagataccccagaggctgacgtgggaggatcacttgagcctgggagtttgtggctgcagtgaaccatgattgtaccagtgcactctagcctggccaacagagtgagaccatgtctcttaaaaaaa

SEQ ID NO: 68257 - DNA, 1024 bp, Homo sapiens
  misc_feature (37)..(37): n is a, c, g, or t
gaattccacaaggaaatcatctcaggaggaagggctnatacttggatccagaaaatatcaacatagccaaagaaaaacaatcaagacatacctccaggagctgtgtaacagcaaccggaaagagaaacaatggtgtgttcctatgtgggatataaagagccggggctcagggggctccacacctgcacctccttctcacctgctcctctacctgctccaccctcaatccaccagaaccatgggctgctgtggctgctccggaggctgtggctccagctgtggaggctgtgactccagctgtgggagctgtggctctggctgcaggggctgtggccccagctgctgtgcacccgtctactgctgcaagcccgtgtgctgctgtgttccagcctgttcctgctctagctgtggcaagcggggctgtggctcctgtgggggctccaagggaggctgtggttcttgtggctgctcccagtgcagttgctgcaagccctgctgttgctcttcaggctgtgggtcatcctgctgccagtgcagctgctgcaagccctactgctcccagtgcagctgctgtaagccctgttgctcctcctcgggtcgtgggtcatcctgctgccaatccagctgctgcaagccctgctgctcatcctcaggctgtgggtcatcctgctgccagtccagctgctgcaagccctgctgctcccagtccagatgctgtgtccctgtgtgctaccagtgcaagatctgaggctctagtgggaaacctcaggtagctcctgaagatctgtgctttccaacaagtgactacccttgaagcacatccccttctggatctgaaaagagcccttggctcagggcgtctttttccagcccctgaggaaatggaatgaaccactccctgcccattccctataagaatatcccaagacccaggcaattttgcccctctttcccacatgcccccatatgtctgagccaaactgcactgggggctgccctcatgccaagcaagagcctggaattc

SEQ ID NO: 68258 - DNA, 324 bp, Homo sapiens
taggaaacaacaagaaagtattagtacctactgtgtctcaagaactgtgctggaattaacccttaaaaatagcttgtgaaaaaggtgctgtttttcccattccacagaaaaggaaactgaaccctagaaaagatgttgactacccctagatctctctcactgagaagtggtgaaaaataaatccagaagccaggttttcccaagtccatattttttcattaggcttgtatcctcaaagataaaactcaactgagtgaactgagaaatttcaatttaagccaagttcattttccagagggtttagacatgataaaggtgacacag

SEQ ID NO: 68259 - DNA, 1765 bp, Homo sapiens
gtatcaacgcagagtggccattacggccgggcatcatttgtctgtgctattctgtttttctccaaacactataaacttgaagcaattgccctgactcgatttcagagaaggggatgtgttggaaagagcaagaataagaaagtgaccagattctgctgcagtctggtaaccccacgagtgtcagggactacttgcatgtttacttctatccttcatttgttttgattcaagcctttatgtgctgtggactcacctccctaagtaaccaggttcctcctctcgctgcaaccttgtttgcatccttcccaagaagaggctttgggaaatttttctgtaattacacttaccaaagagccatggaaccattaggatctccactgtgatgagagttaagccatagtgccatttcacacgtatacatttatgatgggatgggaacccgatacaatctctgtaggctgaatccctagttttatttccagtgagctgcttctgtgactgaagcacctctgtgggcttttgggaaccatggatgcacagatgagagagcacaggctcagagagtaagatggatttctagtgctagccaggtgaatgacacacagtgtatttcaagtttgaaaagcaaaaccatggtatctgacagtgctgattgtaatcacctcccaccactgtgcattttaaacatgagaacaaaaaacttttccaaaatttaaacttttcctaaatctttgtggtcattgctagttgttgacatcagatcctttggttttattctataacttgggctaaacgttaatatcccactaggtggaacatgtctcttccggagttgtgacaaccgaggctcagagctgtgatttttagaaaacaagatgactattaaatcctttggcctggtattcttgaatgtttttctcccagtgcttcccttgcctgtatggagcatctgcaaagtctgagcaggttttgaagtccaagagcatcccagctataaggctcttgcactgtgacagagctgcccacctccagtacaccctcagtgacctcgagtagatgcgtagggcagtcaaacccggcaacttatgccacaaccctaattccaggaagtcgtctgctaatggctaacccactgccatggtggcactggttttgcctgaggtcattgctagggcaggaatgaacagcaaccagcacagagcattgctaaattaattacagtaatctaattaattagtagctaggcttcttctgataggaaagtttcaaccagaaaccactagatgttctattatcatagcttttgtagattggatggaagaataagtaggaagaaagagtattaatgtagctagtagggaccagtgttgctgcttgtggctgaggcagtaatgctaaggctttagctcttcaaaagcagaatgaaaaggcacaaaaagcacttcaagcttgtttctgtacccagttgtccctgtattgtctacataaaatcctgtttcctgctatctgtctgtgattcctgtttattacaaattcagtgtgtctgactgatattaaacactgatattaaaatttcaaacttcacttatctgtgctgttgtgaacaggcagctgatctggcagccctcgaatgggaaacaagtgcttctgttgagctgtagcatatataatataaatgtgcctatgtgtattaaaatgtcttctgtaaacaatgaaaaaaaaaaacaaaacaccaaacaacaaactaacacaacaaaacagaggg

SEQ ID NO: 68260 - DNA, 1483 bp, Homo sapiens
  misc_feature (39)..(39): n is a, c, g, or t
  misc_feature (97)..(97): n is a, c, g, or t
  misc_feature (113)..(113): n is a, c, g, or t
  misc_feature (142)..(142): n is a, c, g, or t
  misc_feature (148)..(148): n is a, c, g, or t
  misc_feature (151)..(152): n is a, c, g, or t
  misc_feature (220)..(220): n is a, c, g, or t
  misc_feature (359)..(359): n is a, c, g, or t
  misc_feature (967)..(967): n is a, c, g, or t
tgagatggagtctctgttgtccaggctggagtgcagagntgcaatcttggctcactgcaacctctacttcctggattctgcctaagcctcccgagtngctgggattacaggcncgtaccaccacgcctggctaatttttgtnttttcngtnnagacggggattccccatgttggccaggctgatctcaaactcctgacctaaagtgatccacctgcctcngcctcccaaagtgctgagattacgggcatgagccactgcgcctggctacctcctgtgcatattaaagccacgttccacagcggagatccaggcaaaggatgtgctttgtagaccacatgatggagatttggggtgtttngttctcagttcataggaaaggccggaaaccagttcacttcgtcatttcagcgatcgctgtcctaggtttcaggcacttcaatgtaacgttgacatgagcccttccttttctttctttttcttttttaataaacagccagttttactgaaaaactggctgttgttacttcctgattctatggaactctaagtcaaaatcataaaagatagcatctaagcatatttcatactaacatccggaaatactcacacctaaattttgagaaacaaaatgtcccccagctttttgctgatacttccaccaatgtcacaggattatttgttttagattttttttctttccaagcaggcctggaggtaaatgagctgcttggaaaagattgttctcagagtctcaacaggtcaggtacaaatgcaaaaaatctacaaaatactaaggattggggctgggagttggaagttctcataactgcatagtccagaggatatagtagggattagcatgatcccactagctacctagaaggtagaaaggggagacacaaaatttccaaataagcacatcctcaaacatgcatggaaaaattatggtcaactgagagaccaggntggaaaggagaggaatttgtgggaagatggagggtgtgctatatggatgtgaagttcttctgaatgtttttgaattcaattttcctccatccaaatgaaagctgactttataaaatagcacttttgggaggaaggtagaaggaggaatcatgcttaaaaaaattagcacattctaagtgatcagatgtgatctttaatattgaaagccctcaaatttagtcattggaaagagtcaagcccggttccagggctagcatctaattagtttacaacttcctgaatcaataccaaacaaatgatgaaataaagtagataaactagctttctatagcatttacctttattttctgtgtgctacataaggtaccagaggaaagagcctttgcaaaaaataaaaacaaaaatgaataagcccagaacaacttggggatactatcttcgtcttggactggtttatactggaactcctgggaggtgtctgtgctgtctctcacagacaaatacaaaaaaaaaaaa

SEQ ID NO: 68261 - DNA, 178 bp, Homo sapiens
ttcagcaattttaaaggtgacttccaataaaatatgtatgtagatttacttcggggctggtagcctgggctgtaaatttataccaagtcaaccatggaaagcccttcaattaaaaaagaagaaagaaaatacaaaaaaataaagtttccatcagcatttatctttggattttaaaaag

SEQ ID NO: 68262 - DNA, 4092 bp, Homo sapiens
  misc_feature (16)..(16): n is a, c, g, or t
  misc_feature (144)..(144): n is a, c, g, or t
  misc_feature (900)..(900): n is a, c, g, or t
  misc_feature (1422)..(1422): n is a, c, g, or t
  misc_feature (1438)..(1439): n is a, c, g, or t
  misc_feature (1671)..(1672): n is a, c, g, or t
  misc_feature (1823)..(1823): n is a, c, g, or t
  misc_feature (1851)..(1852): n is a, c, g, or t
  misc_feature (2334)..(2334): n is a, c, g, or t
  misc_feature (2582)..(2582): n is a, c, g, or t
  misc_feature (2812)..(2812): n is a, c, g, or t
  misc_feature (2827)..(2827): n is a, c, g, or t
  misc_feature (3051)..(3051): n is a, c, g, or t
  misc_feature (3171)..(3171): n is a, c, g, or t
  misc_feature (3279)..(3279): n is a, c, g, or t
  misc_feature (3344)..(3344): n is a, c, g, or t
  misc_feature (3629)..(3629): n is a, c, g, or t
  misc_feature (3809)..(3809): n is a, c, g, or t
ccagagcctcaggatnagcccgaagggggtctgtggggacagcagacacgaaaggacctggcccttcaaggctggaagccagtgtcctactgggagctcagtctgtagtgccagggacccctctgcatagagtgagactccccncacacacatgaggctggattagacaagatccttcagctcctcatagggttggactcatctcagcagaatatggcctctggaagaaggggtcccctaagaatttggggctttcctgggctcttgcaagataagtcttggcccagtctgcccacaatcctggccctgagcctcagcctctgccatgggacaccacctctcaggcagggcatggttggtgtgttctgcagggacctgcctgtgcctcctgctggaaggagctgagtttttctgtgggagccagaaccttgggccagggaagccaggcagtgtcaggcagcaggatccctggcctgggatctccctctgcatccttgtcccatcagtcaagcactgtgagcagtgctttaaggtagaaatctgggtgcagtgtcttcttgtcctcatggaaggagcagaggtgttcagagccccctgggctctcctgaaaaactccctatttcaggcctcactgcagacccttcccaaagttagaactccaggaaatgtcctgggctgtcactctcttctttaagacccctacctttgccctgatgtctccccattgcccctcagatgcctccatccttctagattccccacttcctctaggaccctctgttccccaaaggccttacttgatgctgtagcactcccagaatatgaaatggcttctcaaaatgtggttcatgtccaggtcagtctagttcattttccccgaggacatctttctctgcaagnttttctttttcattttctgaagggcaggaccaagagaaggaaccagctttggaacagacacaagactcactgccacaaagagcaatgtgtaacagtcggtgctggtggaaagaaaagaggctttttctctgcagaaatttttttttcttttgcttgtatctgaaaccagggaaggtcaccagagttcagttcacctgtggtgaccatgttactctctgtgcccaggatgtgctactggccccctaaccctcagcctccaggtggtgtccttgtggtcagtgggcagtgacccctgagccactatcatgaatcttggtggtggctttggtaaaacgactgcaggacagggtttggggccattcagcaggaattgtggccgcttccattgagggcatgtcgccccactcaccaccattaatgcccacaggccacacacactgcatcactgaccacccatcaggtcacccatggatggaccagccttccatgcagcagggacaggctcttacctttgcctctagngcactgagaggcgcanntctgtctcactggaaggcagtgaggagagctgaggacctgcaccaggctgggggccgtcctccttcccaagcaggccccaggggaggaccagctccacctccagccaccccaggtctcagcctccctgttggctgatacacagaaaaggctgggaaacgggagcagaggaagcacagagctgggcatatgctgcttgagattcatgggacttccggctacacagtggagctnnccctcctgggctggaggcagcatcctctttgggaactgagaaactccaatcttgagatgggccagtgctggccaggggtgtgtgcctggacagaagtgatgacattgccaggctgtggtgcaaggatcttggcctgaaaactgctccgtgnactgaggatgcatctggagcctgtcctnnctgatggccccacagccattgcagggtctgaccatatagcatccacctgcctctcactgaacacgagccactgactcttcctgcttcctcactttcccagcctgtctaacccaaagaccaggactgtcttttcagccactctggctcttcttttatccttacgctgtcaaaacctctaagcaagaacacccagatccacatacctgccttgtccactctttaactgggctgctcagcactgcttggggcaccaggggccatgagggtgactgaggtttcacaggcacctgggatggtcctgtacccagtccccagcctcaggtggtgcttggggctttcagtcagcagcctcctccctttcactgcagcagccctggcacagggcacctggctgtcctcccatttttctctgactcagcctcgcccatctgtcctctgatcatggtgttgaccaagtcagcagggagctgagtctccagagngtgctttggggactgaccgaagcctctctgctgaggggtccaggtgagtcgctgccccgaccccaccccatttactgtcgtccccagatccatccactccaccccaggctggctccatccagatgcatcccaaagtcatcagttcctttgggtcacccccaccccaactttcccaatgacctctgcaggcacagactccatactgggtttttcccaccagatttcagatcccctctcagcatgagacncttggtcaggttaccttagcagcaagctctgctgcctctttgctttctctctgagatgcccatgccagggccctgaccatcttctcctcccagggccacagcttttcctgcccctgtacccttgtacccttccctgtggggtggcagaactggtctcctttagccctcagagacctgctggacaactgcccacaggccatgccaagcatccccccaccctgtggccacancctgcaaatttccanggctggctccaaggaacagggctggaccctcaggctggccccctcctcctttgttgacttagagactgcactgctgagaacccagggggttggtccagccatatctctattcccaccgtttctctgggttcccacaatgggccactcaacactggcctaacactgacaccatgggctggacctgcagggcatctaggggaggagtgctgatactgggaaagggntgggtcatagccatggagacatgggcttcctcagagagacccttctaataacaaaacctatccccgagttgagattgctgggttgggggcgtgggaggcagaagacactgaagaatttgnagctgatgactttccagatcaaaaatcttcctgccccatgtccactggcatcccggcctggccaacctccgcctcctgggttcaagtgattctcctgcctcagcctcntgagtagctgagattacaggcgcccgccaccatgcccagctaatttttgtatttttagtagagangaggtttcaacatgttggccaggctggtcttgaactcctgacctcaggtgatccaccctccttggcctcccaaatctagtaaatgtcacataatttataaggcaatataagagaatatttcttatattaactgactgtcaaaagcaactgtgtaatactgtttgtatcttcatggctatcagatatataaatttaatgtatttgccaataacagcacagaggtgagtgcaggaaaagtacctcagcactcacactgccacactgctcacactgtccacaggaccntctgctttagcccagagggagggtcaaaccaagccaggcctggtgggctggacggggcaccacgagtcctcttggaaactgaacccacccctgacacaactcagattaaagacaggagtgtggtgagctcttccctgcctgggcctccccgatccgtggcctcctgtgcagaactggacnccaggggtgtccagaaaggacccagcactgcccagtgcaaggtgcccaggacagaaacagacccctccaaggagacccctcctggcctgatgcccagccccaaacctagaccctctcctgaagggagacatgagaaacatatttatcagaaactggaataaaaacatacactaaaagcccaggaagcttttgtgaattcctagcatctctacaccacactgattagtgacagtttattcctgcagtacacctgtctataacagtgaataaagtgcttgggttt

SEQ ID NO: 68263 - DNA, 3359 bp, Homo sapiens
aggtggttgggtgacgccccaggaaagcgctccaggccgagggcgggcggcgccgccgcgcccgacgcctctgggggtggggacttcgcgggagtcgccggcggaggcgaggaggagctctgcgcggcgcggcgggcgatccgagccgggacgggctgcaggcgggggtgctgcagaggacacgaggcggcgggctggagacatggaccgcggcgagcaaggtctgctgagaacagacccagtccctgaggaaggagaagatgttgctgccacgatcagtgccacagagaccctctcggaagaggagcaggaagagctaagaagagaacttgcaaaggtagaagaagaaatccagactctgtctcaagtgttagcagcaaaagagaagcatctagcagagatcaagcggaaacttggaatcaattctctacaggaactaaaacagaacattgccaaagggtggcaagacgtgacagcaacatctgcttacaagaagacatctgaaaccttatcccaggctggacagaaggcctcagctgctttttcgtctgttggctcagtcatcaccaaaaagctggaagatgtaaaaaactccccaacttttaaatcatttgaagaaaaggtcgaaaacttaaagtctaaagtagggggaaccaagcctgctggtggtgattttggagaagtcttgaattcggctgcaaatgctagtgccaccaccacggagcctcttccagaaaagacacaggagagcctgtgagattcctacctttgttctgctacccactgccagatgctgcaagcgaggtccaagcacatcttgtcaacatgcattgccatgaatttctaccagatgtgcttttatttagctttacatattcctttgaccaaatagtttgtgggttaaacaaaatgaaaatatcttcacctctattcttgggaaacaccctttagtgtacatttatgttcctttatttaggaaacaccattataaaaacacttatagtaaatggggacattcactataatgatctaagaagctacagattgtcatagttgttttcctgctttacaaaattgctccagatctggaatgccagtttgacctttgtcttctataatatttcctttttttcccctctttgaatctctgtatatttgattcttaactaaaattgttctcttaaatattctgaatcctggtaattaaaagtttgggtgtattttctttacctccaaggaaagaactactagctacaaaaaatattttggaataagcattgttttggtataaggtacatattttggttgaagacaccagactgaagtaaacagctgtgcatccaatttattatagttttgtaagtaacaatatgtaatcaaacttctaggtgacttgagagtggaacctcctatatcattatttagcaccgtttgtgacagtaaccatttcagtgtattgtttattataccacttatatcaacttatttttcaccaggttaaaattttaatttctacaaaataacattctgaatcaagcacactgtatgttcagtaggttgaactatgaacactgtcatcaatgttcagttcaaaagcctgaaagtttagatctagaagctggtaaaaatgacaatatcaatcacattaggggaaccattgttgtcttcacttaatccatttagcactatttaaaataagcacaccaagttatatgactaatataacttgaaaattttttatactgaggggttggtgataactcttgaggatgtaatgcattaataaaaatcaactcatcattttctacttgttttcaatgtgttggaaactgtaaaatgatactgtagaacctgtctcctactttgaaaactgaatgtcagggctgagtgaatcaaagtgtctagacatatttgcatagaggccaaggtattctattctaataactgcttactcaacactaccaccttttccttatactgtatatgattatggcctacaatgttgtatttgttatttattaaattgtgattgttttattattgtttatgccaaatgttaactgccaagcttggagtgacctaaagcattttttaaaagcatggctagatttacttcagtataaattatcttatgaaaaccaaattttaaaagccacaggtgttgattgttataaaataacatgctgccattcttgattgctagagtttttgttagtactttggatgcaattaaaactatgtgctatcacatgtgaaaagcttaataaattccatctatcagtagtataggtctcaatatttattatgagaccagtggtctggaaacagcttgttgtaccgaatcaactggagtctatgcttaaaaaaaaaaaatttttttttaaccatccttaaattattgcttaatggtatcatattaacatattctaaataagggctttaaggcacaggctgttgaagcattttctcagaggagtggatctgtagaagtctgtctttctatagaaatattgtgcttactcaagtgttaaattattttttctatgaactagtctacttcttaaaattcaaacatattcttttgatcacattgtttcttgagcatcctgccctgctactaacttttcaacaaggcaaaatggagtaaagtggcaatttctttagatgagtgaaataccctcaagtctcttttctgcccaaaaagggaaaagtgatagaaatgggggtggcaagtggggtgagtggatgaaggtgggtattgggggtggctgtgaaagaaaataatggagaatcacttttctagacatctacctatacttaatctaagaaacaaagtaatctactgtaaagtactctgccccttgaaagaagtattaaaaagagtgaggatggatttagaaaaaaacatgaatttagaaatattcaaaatggtttttgtggcagattcaatattatgaattcacagatatttaaagaatgagaaacatagtaattagtagaaatgccagaaacagttcctggttcctcttgtgtttgacactaagaaaatagcaagagtgtgaaatctcagatacttatgaaatctcacagatgtaaggactcaagtgtagaagaaaatatccccttcttacaaaaagaaatgtcaatttatggagtttgtgggaaatagggcaagaattcttatgcttatgagagccaagtagtcagtggaagagagtagagctcaaaactggattatcaccttagcaacttagaatagtttgaaatagaaaaaaagtatttaatttggatctggatctgttaagatatgcacagtctattttttgtatagtattggaaaataaaaatgctataatttg

SEQ ID NO: 68264 - DNA, 976 bp, Homo sapiens
tgtttgcctgaactgtttgtacctctgggccatattgcagaaccctgcccttctttgttgactgaggaaagctcgctccctgcccaggtttttcattgttgatcgaaattaacaccaggtggtgaatagagcccctcctaaggttgctcaggataaatcatttattaaataggtctgcttatcaggaggggcgtgaaggctcccaaaaggaaatgctggcacctgggcccagaagccagggcctctaactcctggggttgatttcttcagtgaagttgcaccctacaaagggaatatggccaaagcggcactcaactgaaggctgatatcaggcgattagacagccatgcattctgcgtttgtctggaatggattgtagagagatggacttatatgaggactaccagtccccgtttgattttgatgcaggagtgaacaaaagctatctctacttgtctcctagtggaaattcatctccacccggatcacctactcttcagaaatttgactgcaccttttaattttaatgataatgatttgctgccacctacgggctaatgtggaaagagcagaacatgtcattaccaactttcttagatgctgaatataaaatctcaaggtcatcctggcagacttgaagccaactggacaacccgtcatcctcttttctgagagatttattttccttgatagcctagccgcatacttgaatagaaccagaatccccttggattctttttggaattgggcagtatacataaagcattgtgttagcagtcagatactgtatttctccccttgtttgagtagatttgcaaaacagtgtgtatcaaaaaagcatgaaagagtctttgctatttaagtaatggtttggtacctgagttttgcttgttttgttttggagatctgttgtagttggagaacctgggagttctgtacaaaacattaaaaataaaataacgtttaacaggtagct

SEQ ID NO: 68265 - DNA, 604 bp, Homo sapiens
ttttaccacgtttcccttgcccagacactggtgcctgcagaagctggttgtggtccatctggtccagctgcagccttgcacagagccggtgcctgtagctgctcaccctgctgcagcagctggtgtgcctggctgggcgcagtggctggaacctgcactcacttgctcacgcacccctcaccagcccatgcctggctcacccttggcaggtgtgggatctgggccagcagcacaagatgagcacagcctactgggcagagtgggcagaatgagcccagcaggcatgagcaaaactccagcagaggcgctgcaggccatggaagtttccagctggtgaagcgacatcctaagaactttgtgacactatcctttcttcttggtttgcacacatggttgaggcatgaatttctagtaaactcatggtcacctccacctagccgtcaatagctactattcattaagtgcccaggcatcttacactcatcacctttaactctttactcaggcatgtggcagtgtcaccattttatagataagaccaaagccagtagctgtaaagtattaggcttgaacttagcagtagaatgaaactattttctgttca

SEQ ID NO: 68266 - DNA, 4002 bp, Homo sapiens
aggtggttgggtgacgccccaggaaagcgctccaggccgagggcgggcggcgccgccgcgcccgacgcctctgggggtggggacttcgcgggagtcgccggcggaggcgaggaggagctctgcgcggcgcggcgggcgatccgagccgggacgggctgcaggcgggggtgctgcagaggacacgaggcggcgggctggagacatggaccgcggcgagcaaggtctgctgagaacagacccagtccctgaggaaggagaagatgttgctgccacgatcagtgccacagagaccctctcggaagaggagcaggaagagctaagaagagaacttgcaaaggtagaagaagaaatccagactctgtctcaagtgttagcagcaaaagagaagcatctagcagagatcaagcggaaacttggaatcaattctctacaggaactaaaacagaacattgccaaagggtggcaagacgtgacagcaacatctgcttacaagaagacatctgaaaccttatcccaggctggacagaaggcctcagctgctttttcgtctgttggctcagtcatcaccaaaaagctggaagatgtaaaaaactccccaacttttaaatcatttgaagaaaaggtcgaaaacttaaagtctaaagtagggggaaccaagcctgctggtggtgattttggagaagtcttgaattcggctgcaaatgctagtgccaccaccacggagcctcttccagaaaagacacaggagagcctgtgagattcctacctttgttctgctacccactgccagatgctgcaagcgaggtccaagcacatcttgtcaacatgcattgccatgaatttctaccagatgtgcttttatttagctttacatattcctttgaccaaatagtttgtgggttaaacaaaatgaaaatatcttcacctctattcttgggaaacaccctttagtgtacatttatgttcctttatttaggaaacaccattataaaaacacttatagtaaatggggacattcactataatgatctaagaagctacagattgtcatagttgttttcctgctttacaaaattgctccagatctggaatgccagtttgacctttgtcttctataatatttcctttttttcccctctttgaatctctgtatatttgattcttaactaaaattgttctcttaaatattctgaatcctggtaattaaaagtttgggtgtattttctttacctccaaggaaagaactactagctacaaaaaatattttggaataagcattgttttggtataaggtacatattttggttgaagacaccagactgaagtaaacagctgtgcatccaatttattatagttttgtaagtaacaatatgtaatcaaacttctaggtgacttgagagtggaacctcctatatcattatttagcaccgtttgtgacagtaaccatttcagtgtattgtttattataccacttatatcaacttatttttcaccaggttaaaattttaatttctacaaaataacattctgaatcaagcacactgtatgttcagtaggttgaactatgaacactgtcatcaatgttcagttcaaaagcctgaaagtttagatctagaagctggtaaaaatgacaatatcaatcacattaggggaaccattgttgtcttcacttaatccatttagcactatttaaaataagcacaccaagttatatgactaatataacttgaaaattttttatactgaggggttggtgataactcttgaggatgtaatgcattaataaaaatcaactcatcattttctacttgttttcaatgtgttggaaactgtaaaatgatactgtagaacctgtctcctactttgaaaactgaatgtcagggctgagtgaatcaaagtgtctagacatatttgcatagaggccaaggtattctattctaataactgcttactcaacactaccaccttttccttatactgtatatgattatggcctacaatgttgtatttgttatttattaaattgtgattgttttattattgtttatgccaaatgttaactgccaagcttggagtgacctaaagcattttttaaaagcatggctagatttacttcagtataaattatcttatgaaaaccaaattttaaaagccacaggtgttgattgttataaaataacatgctgccattcttgattgctagagtttttgttagtactttggatgcaattaaaactatgtgctatcacatgtgaaaagcttaataaattccatctatcagtagtataggtctcaatatttattatgagaccagtggtctggaaacagcttgttgtaccgaatcaactggagtctatgcttaaaaaaaaaaaatttttttttaaccatccttaaattattgcttaatggtatcatattaacatattctaaataagggctttaaggcacaggctgttgaagcattttctcagaggagtggatctgtagaagtctgtctttctatagaaatattgtgcttactcaagtgttaaattattttttctatgaactagtctacttcttaaaattcaaacatattcttttgatcacattgtttcttgagcatcctgccctgctactaacttttcaacaaggcaaaatggagtaaagtggcaatttctttagatgagtgaaataccctcaagtctcttttctgcccaaaaagggaaaagtgatagaaatgggggtggcaagtggggtgagtggatgaaggtgggtattgggggtggctgtgaaagaaaataatggagaatcacttttctagacatctacctatacttaatctaagaaacaaagtaatctactgtaaagtactctgccccttgaaagaagtattaaaaagagtgaggatggatttagaaaaaaacatgaatttagaaatattcaaaatggtttttgtggcagattcaatattatgaattcacagatatttaaagaatgagaaacatagtaattagtagaaatgccagaaacagttcctggttcctcttgtgtttgacactaagaaaatagcaagagtgtgaaatctcagatacttatgaaatctcacagatgtaaggactcaagtgtagaagaaaatatccccttcttacaaaaagaaatgtcaatttatggagtttgtgggaaatagggcaagaattcttatgcttatgagagccaagtagtcagtggaagagagtagagctcaaaactggattatcaccttagcaacttagaatagtttgaaatagaaaaaaagtatttaatttggatctggatctgttaagatatgcacagtctattttttgtatagtattggaaaataaaaatgctataatttgggtatgggttcttttgtatacattacctgcccattgaggaaaggggcaagtccattatgcaacttctctccaaacccttcatattctggatatgatacttaaagagccatgagcagctacattctgcctatcagaaggcatttattaaatgactgcttgctgaagatgtgtccaaagagatcctacattaaggtcatttgtcagaatgatgtttgtgtttgtttagagttggctgacctccaactcctggggtcaaggaatcctactgccttagcttcccaaatagctaggactataggcatgcacccggccatgtgttttatttatagctcttaaagcccagatgaagaaatcacatttttgcccatagtgaagaaacatttggccattgattagtccttattttcagtgactgtcctgttttcattagattagagagaccctgtgtgggccacagttaatataaaccattatcacttttaagtaaacctgcacatcttagatttcataatttccttattgttctgactcaaaatgaactaagagcttttcactttttgtttgtaagttctcagagagtcgggtctgcaagtgcttttgcctgccaggattttgtactcaaataaatgctatttggcaacta

SEQ ID NO: 68267 - DNA, 4288 bp, Homo sapiens
tgtttgcctgaactgtttgtacctctgggccatattgcagaaccctgcccttctttgttgactgaggaaagctcgctccctgcccaggtttttcattgttgatcgaaattaacaccaggtggtgaatagagcccctcctaaggttgctcaggataaatcatttattaaataggtctgcttatcaggaggggcgtgaaggctcccaaaaggaaatgctggcacctgggcccagaagccagggcctctaactcctggggttgatttcttcagtgaagttgcaccctacaaagggaatatggccaaagcggcactcaactgaaggctgatatcaggcgattagacagccatgcattctgcgtttgtctggaatggattgtagagagatggacttatatgaggactaccagtccccgtttgattttgatgcaggagtgaacaaaagctatctctacttgtctcctagtggaaattcatctccacccggatcacctactcttcagaaatttggtctgctgagaacagacccagtccctgaggaaggagaagatgttgctgccacgatcagtgccacagagaccctctcggaagaggagcaggaagagctaagaagagaacttgcaaaggtagaagaagaaatccagactctgtctcaagtgttagcagcaaaagagaagcatctagcagagatcaagcggaaacttggaatcaattctctacaggaactaaaacagaacattgccaaagggtggcaagacgtgacagcaacatctgcttacaagaagacatctgaaaccttatcccaggctggacagaaggcctcagctgctttttcgtctgttggctcagtcatcaccaaaaagctggaagatgtaaaaaactccccaacttttaaatcatttgaagaaaaggtcgaaaacttaaagtctaaagtagggggaaccaagcctgctggtggtgattttggagaagtcttgaattcggctgcaaatgctagtgccaccaccacggagcctcttccagaaaagacacaggagagcctgtgagattcctacctttgttctgctacccactgccagatgctgcaagcgaggtccaagcacatcttgtcaacatgcattgccatgaatttctaccagatgtgcttttatttagctttacatattcctttgaccaaatagtttgtgggttaaacaaaatgaaaatatcttcacctctattcttgggaaacaccctttagtgtacatttatgttcctttatttaggaaacaccattataaaaacacttatagtaaatggggacattcactataatgatctaagaagctacagattgtcatagttgttttcctgctttacaaaattgctccagatctggaatgccagtttgacctttgtcttctataatatttcctttttttcccctctttgaatctctgtatatttgattcttaactaaaattgttctcttaaatattctgaatcctggtaattaaaagtttgggtgtattttctttacctccaaggaaagaactactagctacaaaaaatattttggaataagcattgttttggtataaggtacatattttggttgaagacaccagactgaagtaaacagctgtgcatccaatttattatagttttgtaagtaacaatatgtaatcaaacttctaggtgacttgagagtggaacctcctatatcattatttagcaccgtttgtgacagtaaccatttcagtgtattgtttattataccacttatatcaacttatttttcaccaggttaaaattttaatttctacaaaataacattctgaatcaagcacactgtatgttcagtaggttgaactatgaacactgtcatcaatgttcagttcaaaagcctgaaagtttagatctagaagctggtaaaaatgacaatatcaatcacattaggggaaccattgttgtcttcacttaatccatttagcactatttaaaataagcacaccaagttatatgactaatataacttgaaaattttttatactgaggggttggtgataactcttgaggatgtaatgcattaataaaaatcaactcatcattttctacttgttttcaatgtgttggaaactgtaaaatgatactgtagaacctgtctcctactttgaaaactgaatgtcagggctgagtgaatcaaagtgtctagacatatttgcatagaggccaaggtattctattctaataactgcttactcaacactaccaccttttccttatactgtatatgattatggcctacaatgttgtatttgttatttattaaattgtgattgttttattattgtttatgccaaatgttaactgccaagcttggagtgacctaaagcattttttaaaagcatggctagatttacttcagtataaattatcttatgaaaaccaaattttaaaagccacaggtgttgattgttataaaataacatgctgccattcttgattgctagagtttttgttagtactttggatgcaattaaaactatgtgctatcacatgtgaaaagcttaataaattccatctatcagtagtataggtctcaatatttattatgagaccagtggtctggaaacagcttgttgtaccgaatcaactggagtctatgcttaaaaaaaaaaaatttttttttaaccatccttaaattattgcttaatggtatcatattaacatattctaaataagggctttaaggcacaggctgttgaagcattttctcagaggagtggatctgtagaagtctgtctttctatagaaatattgtgcttactcaagtgttaaattattttttctatgaactagtctacttcttaaaattcaaacatattcttttgatcacattgtttcttgagcatcctgccctgctactaacttttcaacaaggcaaaatggagtaaagtggcaatttctttagatgagtgaaataccctcaagtctcttttctgcccaaaaagggaaaagtgatagaaatgggggtggcaagtggggtgagtggatgaaggtgggtattgggggtggctgtgaaagaaaataatggagaatcacttttctagacatctacctatacttaatctaagaaacaaagtaatctactgtaaagtactctgccccttgaaagaagtattaaaaagagtgaggatggatttagaaaaaaacatgaatttagaaatattcaaaatggtttttgtggcagattcaatattatgaattcacagatatttaaagaatgagaaacatagtaattagtagaaatgccagaaacagttcctggttcctcttgtgtttgacactaagaaaatagcaagagtgtgaaatctcagatacttatgaaatctcacagatgtaaggactcaagtgtagaagaaaatatccccttcttacaaaaagaaatgtcaatttatggagtttgtgggaaatagggcaagaattcttatgcttatgagagccaagtagtcagtggaagagagtagagctcaaaactggattatcaccttagcaacttagaatagtttgaaatagaaaaaaagtatttaatttggatctggatctgttaagatatgcacagtctattttttgtatagtattggaaaataaaaatgctataatttgggtatgggttcttttgtatacattacctgcccattgaggaaaggggcaagtccattatgcaacttctctccaaacccttcatattctggatatgatacttaaagagccatgagcagctacattctgcctatcagaaggcatttattaaatgactgcttgctgaagatgtgtccaaagagatcctacattaaggtcatttgtcagaatgatgtttgtgtttgtttagagttggctgacctccaactcctggggtcaaggaatcctactgccttagcttcccaaatagctaggactataggcatgcacccggccatgtgttttatttatagctcttaaagcccagatgaagaaatcacatttttgcccatagtgaagaaacatttggccattgattagtccttattttcagtgactgtcctgttttcattagattagagagaccctgtgtgggccacagttaatataaaccattatcacttttaagtaaacctgcacatcttagatttcataatttccttattgttctgactcaaaatgaactaagagcttttcactttttgtttgtaagttctcagagagtcgggtctgcaagtgcttttgcctgccaggattttgtactcaaataaatgctatttggcaacta

SEQ ID NO: 68268 - DNA, 3886 bp, Homo sapiens
aggtggttgggtgacgccccaggaaagcgctccaggccgagggcgggcggcgccgccgcgcccgacgcctctgggggtggggacttcgcgggagtcgccggcggaggcgaggaggagctctgcgcggcgcggcgggcgatccgagccgggacgggctgcaggcgggggtgctgcagaggacacgaggcggcgggctggagacatggaccgcggcgagcaaggtagaagaagaaatccagactctgtctcaagtgttagcagcaaaagagaagcatctagcagagatcaagcggaaacttggaatcaattctctacaggaactaaaacagaacattgccaaagggtggcaagacgtgacagcaacatctgcttacaagaagacatctgaaaccttatcccaggctggacagaaggcctcagctgctttttcgtctgttggctcagtcatcaccaaaaagctggaagatgtaaaaaactccccaacttttaaatcatttgaagaaaaggtcgaaaacttaaagtctaaagtagggggaaccaagcctgctggtggtgattttggagaagtcttgaattcggctgcaaatgctagtgccaccaccacggagcctcttccagaaaagacacaggagagcctgtgagattcctacctttgttctgctacccactgccagatgctgcaagcgaggtccaagcacatcttgtcaacatgcattgccatgaatttctaccagatgtgcttttatttagctttacatattcctttgaccaaatagtttgtgggttaaacaaaatgaaaatatcttcacctctattcttgggaaacaccctttagtgtacatttatgttcctttatttaggaaacaccattataaaaacacttatagtaaatggggacattcactataatgatctaagaagctacagattgtcatagttgttttcctgctttacaaaattgctccagatctggaatgccagtttgacctttgtcttctataatatttcctttttttcccctctttgaatctctgtatatttgattcttaactaaaattgttctcttaaatattctgaatcctggtaattaaaagtttgggtgtattttctttacctccaaggaaagaactactagctacaaaaaatattttggaataagcattgttttggtataaggtacatattttggttgaagacaccagactgaagtaaacagctgtgcatccaatttattatagttttgtaagtaacaatatgtaatcaaacttctaggtgacttgagagtggaacctcctatatcattatttagcaccgtttgtgacagtaaccatttcagtgtattgtttattataccacttatatcaacttatttttcaccaggttaaaattttaatttctacaaaataacattctgaatcaagcacactgtatgttcagtaggttgaactatgaacactgtcatcaatgttcagttcaaaagcctgaaagtttagatctagaagctggtaaaaatgacaatatcaatcacattaggggaaccattgttgtcttcacttaatccatttagcactatttaaaataagcacaccaagttatatgactaatataacttgaaaattttttatactgaggggttggtgataactcttgaggatgtaatgcattaataaaaatcaactcatcattttctacttgttttcaatgtgttggaaactgtaaaatgatactgtagaacctgtctcctactttgaaaactgaatgtcagggctgagtgaatcaaagtgtctagacatatttgcatagaggccaaggtattctattctaataactgcttactcaacactaccaccttttccttatactgtatatgattatggcctacaatgttgtatttgttatttattaaattgtgattgttttattattgtttatgccaaatgttaactgccaagcttggagtgacctaaagcattttttaaaagcatggctagatttacttcagtataaattatcttatgaaaaccaaattttaaaagccacaggtgttgattgttataaaataacatgctgccattcttgattgctagagtttttgttagtactttggatgcaattaaaactatgtgctatcacatgtgaaaagcttaataaattccatctatcagtagtataggtctcaatatttattatgagaccagtggtctggaaacagcttgttgtaccgaatcaactggagtctatgcttaaaaaaaaaaaatttttttttaaccatccttaaattattgcttaatggtatcatattaacatattctaaataagggctttaaggcacaggctgttgaagcattttctcagaggagtggatctgtagaagtctgtctttctatagaaatattgtgcttactcaagtgttaaattattttttctatgaactagtctacttcttaaaattcaaacatattcttttgatcacattgtttcttgagcatcctgccctgctactaacttttcaacaaggcaaaatggagtaaagtggcaatttctttagatgagtgaaataccctcaagtctcttttctgcccaaaaagggaaaagtgatagaaatgggggtggcaagtggggtgagtggatgaaggtgggtattgggggtggctgtgaaagaaaataatggagaatcacttttctagacatctacctatacttaatctaagaaacaaagtaatctactgtaaagtactctgccccttgaaagaagtattaaaaagagtgaggatggatttagaaaaaaacatgaatttagaaatattcaaaatggtttttgtggcagattcaatattatgaattcacagatatttaaagaatgagaaacatagtaattagtagaaatgccagaaacagttcctggttcctcttgtgtttgacactaagaaaatagcaagagtgtgaaatctcagatacttatgaaatctcacagatgtaaggactcaagtgtagaagaaaatatccccttcttacaaaaagaaatgtcaatttatggagtttgtgggaaatagggcaagaattcttatgcttatgagagccaagtagtcagtggaagagagtagagctcaaaactggattatcaccttagcaacttagaatagtttgaaatagaaaaaaagtatttaatttggatctggatctgttaagatatgcacagtctattttttgtatagtattggaaaataaaaatgctataatttgggtatgggttcttttgtatacattacctgcccattgaggaaaggggcaagtccattatgcaacttctctccaaacccttcatattctggatatgatacttaaagagccatgagcagctacattctgcctatcagaaggcatttattaaatgactgcttgctgaagatgtgtccaaagagatcctacattaaggtcatttgtcagaatgatgtttgtgtttgtttagagttggctgacctccaactcctggggtcaaggaatcctactgccttagcttcccaaatagctaggactataggcatgcacccggccatgtgttttatttatagctcttaaagcccagatgaagaaatcacatttttgcccatagtgaagaaacatttggccattgattagtccttattttcagtgactgtcctgttttcattagattagagagaccctgtgtgggccacagttaatataaaccattatcacttttaagtaaacctgcacatcttagatttcataatttccttattgttctgactcaaaatgaactaagagcttttcactttttgtttgtaagttctcagagagtcgggtctgcaagtgcttttgcctgccaggattttgtactcaaataaatgctatttggcaacta

SEQ ID NO: 68269 - DNA, 3845 bp, Homo sapiens
ggagcttaaatagggattttacttagattttgcactttaaaaaatggtttaaatccccaaccaggtctgctgagaacagacccagtccctgaggaaggagaagatgttgctgccacgatcagtgccacagagaccctctcggaagaggagcaggaagagctaagaagagaacttgcaaaggtagaagaagaaatccagactctgtctcaagtgttagcagcaaaagagaagcatctagcagagatcaagcggaaacttggaatcaattctctacaggaactaaaacagaacattgccaaagggtggcaagacgtgacagcaacatctgcttacaagaagacatctgaaaccttatcccaggctggacagaaggcctcagctgctttttcgtctgttggctcagtcatcaccaaaaagctggaagatgtaaaaaactccccaacttttaaatcatttgaagaaaaggtcgaaaacttaaagtctaaagtagggggaaccaagcctgctggtggtgattttggagaagtcttgaattcggctgcaaatgctagtgccaccaccacggagcctcttccagaaaagacacaggagagcctgtgagattcctacctttgttctgctacccactgccagatgctgcaagcgaggtccaagcacatcttgtcaacatgcattgccatgaatttctaccagatgtgcttttatttagctttacatattcctttgaccaaatagtttgtgggttaaacaaaatgaaaatatcttcacctctattcttgggaaacaccctttagtgtacatttatgttcctttatttaggaaacaccattataaaaacacttatagtaaatggggacattcactataatgatctaagaagctacagattgtcatagttgttttcctgctttacaaaattgctccagatctggaatgccagtttgacctttgtcttctataatatttcctttttttcccctctttgaatctctgtatatttgattcttaactaaaattgttctcttaaatattctgaatcctggtaattaaaagtttgggtgtattttctttacctccaaggaaagaactactagctacaaaaaatattttggaataagcattgttttggtataaggtacatattttggttgaagacaccagactgaagtaaacagctgtgcatccaatttattatagttttgtaagtaacaatatgtaatcaaacttctaggtgacttgagagtggaacctcctatatcattatttagcaccgtttgtgacagtaaccatttcagtgtattgtttattataccacttatatcaacttatttttcaccaggttaaaattttaatttctacaaaataacattctgaatcaagcacactgtatgttcagtaggttgaactatgaacactgtcatcaatgttcagttcaaaagcctgaaagtttagatctagaagctggtaaaaatgacaatatcaatcacattaggggaaccattgttgtcttcacttaatccatttagcactatttaaaataagcacaccaagttatatgactaatataacttgaaaattttttatactgaggggttggtgataactcttgaggatgtaatgcattaataaaaatcaactcatcattttctacttgttttcaatgtgttggaaactgtaaaatgatactgtagaacctgtctcctactttgaaaactgaatgtcagggctgagtgaatcaaagtgtctagacatatttgcatagaggccaaggtattctattctaataactgcttactcaacactaccaccttttccttatactgtatatgattatggcctacaatgttgtatttgttatttattaaattgtgattgttttattattgtttatgccaaatgttaactgccaagcttggagtgacctaaagcattttttaaaagcatggctagatttacttcagtataaattatcttatgaaaaccaaattttaaaagccacaggtgttgattgttataaaataacatgctgccattcttgattgctagagtttttgttagtactttggatgcaattaaaactatgtgctatcacatgtgaaaagcttaataaattccatctatcagtagtataggtctcaatatttattatgagaccagtggtctggaaacagcttgttgtaccgaatcaactggagtctatgcttaaaaaaaaaaaatttttttttaaccatccttaaattattgcttaatggtatcatattaacatattctaaataagggctttaaggcacaggctgttgaagcattttctcagaggagtggatctgtagaagtctgtctttctatagaaatattgtgcttactcaagtgttaaattattttttctatgaactagtctacttcttaaaattcaaacatattcttttgatcacattgtttcttgagcatcctgccctgctactaacttttcaacaaggcaaaatggagtaaagtggcaatttctttagatgagtgaaataccctcaagtctcttttctgcccaaaaagggaaaagtgatagaaatgggggtggcaagtggggtgagtggatgaaggtgggtattgggggtggctgtgaaagaaaataatggagaatcacttttctagacatctacctatacttaatctaagaaacaaagtaatctactgtaaagtactctgccccttgaaagaagtattaaaaagagtgaggatggatttagaaaaaaacatgaatttagaaatattcaaaatggtttttgtggcagattcaatattatgaattcacagatatttaaagaatgagaaacatagtaattagtagaaatgccagaaacagttcctggttcctcttgtgtttgacactaagaaaatagcaagagtgtgaaatctcagatacttatgaaatctcacagatgtaaggactcaagtgtagaagaaaatatccccttcttacaaaaagaaatgtcaatttatggagtttgtgggaaatagggcaagaattcttatgcttatgagagccaagtagtcagtggaagagagtagagctcaaaactggattatcaccttagcaacttagaatagtttgaaatagaaaaaaagtatttaatttggatctggatctgttaagatatgcacagtctattttttgtatagtattggaaaataaaaatgctataatttgggtatgggttcttttgtatacattacctgcccattgaggaaaggggcaagtccattatgcaacttctctccaaacccttcatattctggatatgatacttaaagagccatgagcagctacattctgcctatcagaaggcatttattaaatgactgcttgctgaagatgtgtccaaagagatcctacattaaggtcatttgtcagaatgatgtttgtgtttgtttagagttggctgacctccaactcctggggtcaaggaatcctactgccttagcttcccaaatagctaggactataggcatgcacccggccatgtgttttatttatagctcttaaagcccagatgaagaaatcacatttttgcccatagtgaagaaacatttggccattgattagtccttattttcagtgactgtcctgttttcattagattagagagaccctgtgtgggccacagttaatataaaccattatcacttttaagtaaacctgcacatcttagatttcataatttccttattgttctgactcaaaatgaactaagagcttttcactttttgtttgtaagttctcagagagtcgggtctgcaagtgcttttgcctgccaggattttgtactcaaataaatgctatttggcaacta

SEQ ID NO: 68270 - DNA, 4141 bp, Homo sapiens
aggtggttgggtgacgccccaggaaagcgctccaggccgagggcgggcggcgccgccgcgcccgacgcctctgggggtggggacttcgcgggagtcgccggcggaggcgaggaggagctctgcgcggcgcggcgggcgatccgagccgggacgggctgcaggcgggggtgctgcagaggacacgaggcggcgggctggagacatggaccgcggcgagcaaggtctgctgagaacagacccagtccctgaggaaggagaagatgttgctgccacgatcagtgccacagagaccctctcggaagaggagcaggaagagctaagaagagaacttgcaaaggtagaagaagaaatccagactctgtctcaagtgttagcagcaaaagagaagcatctagcagagatcaagcggaaacttggaatcaattctctacaggaactaaaacagaacattgccaaagggtggcaagacgtgacagcaacatctgcgaggagcaagcttctagcagcagaaaccgaactgctctgtcttctgtattgagagccatctgcagagctgttacaagaagacatctgaaaccttatcccaggctggacagaaggcctcagctgctttttcgtctgttggctcagtcatcaccaaaaagctggaagatgtaaaattgcaagccttttcacattcctttagtatacgttccattcagcattcaattagcatgcctgctatgagaaactccccaacttttaaatcatttgaagaaaaggtcgaaaacttaaagtctaaagtagggggaaccaagcctgctggtggtgattttggagaagtcttgaattcggctgcaaatgctagtgccaccaccacggagcctcttccagaaaagacacaggagagcctgtgagattcctacctttgttctgctacccactgccagatgctgcaagcgaggtccaagcacatcttgtcaacatgcattgccatgaatttctaccagatgtgcttttatttagctttacatattcctttgaccaaatagtttgtgggttaaacaaaatgaaaatatcttcacctctattcttgggaaacaccctttagtgtacatttatgttcctttatttaggaaacaccattataaaaacacttatagtaaatggggacattcactataatgatctaagaagctacagattgtcatagttgttttcctgctttacaaaattgctccagatctggaatgccagtttgacctttgtcttctataatatttcctttttttcccctctttgaatctctgtatatttgattcttaactaaaattgttctcttaaatattctgaatcctggtaattaaaagtttgggtgtattttctttacctccaaggaaagaactactagctacaaaaaatattttggaataagcattgttttggtataaggtacatattttggttgaagacaccagactgaagtaaacagctgtgcatccaatttattatagttttgtaagtaacaatatgtaatcaaacttctaggtgacttgagagtggaacctcctatatcattatttagcaccgtttgtgacagtaaccatttcagtgtattgtttattataccacttatatcaacttatttttcaccaggttaaaattttaatttctacaaaataacattctgaatcaagcacactgtatgttcagtaggttgaactatgaacactgtcatcaatgttcagttcaaaagcctgaaagtttagatctagaagctggtaaaaatgacaatatcaatcacattaggggaaccattgttgtcttcacttaatccatttagcactatttaaaataagcacaccaagttatatgactaatataacttgaaaattttttatactgaggggttggtgataactcttgaggatgtaatgcattaataaaaatcaactcatcattttctacttgttttcaatgtgttggaaactgtaaaatgatactgtagaacctgtctcctactttgaaaactgaatgtcagggctgagtgaatcaaagtgtctagacatatttgcatagaggccaaggtattctattctaataactgcttactcaacactaccaccttttccttatactgtatatgattatggcctacaatgttgtatttgttatttattaaattgtgattgttttattattgtttatgccaaatgttaactgccaagcttggagtgacctaaagcattttttaaaagcatggctagatttacttcagtataaattatcttatgaaaaccaaattttaaaagccacaggtgttgattgttataaaataacatgctgccattcttgattgctagagtttttgttagtactttggatgcaattaaaactatgtgctatcacatgtgaaaagcttaataaattccatctatcagtagtataggtctcaatatttattatgagaccagtggtctggaaacagcttgttgtaccgaatcaactggagtctatgcttaaaaaaaaaaaatttttttttaaccatccttaaattattgcttaatggtatcatattaacatattctaaataagggctttaaggcacaggctgttgaagcattttctcagaggagtggatctgtagaagtctgtctttctatagaaatattgtgcttactcaagtgttaaattattttttctatgaactagtctacttcttaaaattcaaacatattcttttgatcacattgtttcttgagcatcctgccctgctactaacttttcaacaaggcaaaatggagtaaagtggcaatttctttagatgagtgaaataccctcaagtctcttttctgcccaaaaagggaaaagtgatagaaatgggggtggcaagtggggtgagtggatgaaggtgggtattgggggtggctgtgaaagaaaataatggagaatcacttttctagacatctacctatacttaatctaagaaacaaagtaatctactgtaaagtactctgccccttgaaagaagtattaaaaagagtgaggatggatttagaaaaaaacatgaatttagaaatattcaaaatggtttttgtggcagattcaatattatgaattcacagatatttaaagaatgagaaacatagtaattagtagaaatgccagaaacagttcctggttcctcttgtgtttgacactaagaaaatagcaagagtgtgaaatctcagatacttatgaaatctcacagatgtaaggactcaagtgtagaagaaaatatccccttcttacaaaaagaaatgtcaatttatggagtttgtgggaaatagggcaagaattcttatgcttatgagagccaagtagtcagtggaagagagtagagctcaaaactggattatcaccttagcaacttagaatagtttgaaatagaaaaaaagtatttaatttggatctggatctgttaagatatgcacagtctattttttgtatagtattggaaaataaaaatgctataatttgggtatgggttcttttgtatacattacctgcccattgaggaaaggggcaagtccattatgcaacttctctccaaacccttcatattctggatatgatacttaaagagccatgagcagctacattctgcctatcagaaggcatttattaaatgactgcttgctgaagatgtgtccaaagagatcctacattaaggtcatttgtcagaatgatgtttgtgtttgtttagagttggctgacctccaactcctggggtcaaggaatcctactgccttagcttcccaaatagctaggactataggcatgcacccggccatgtgttttatttatagctcttaaagcccagatgaagaaatcacatttttgcccatagtgaagaaacatttggccattgattagtccttattttcagtgactgtcctgttttcattagattagagagaccctgtgtgggccacagttaatataaaccattatcacttttaagtaaacctgcacatcttagatttcataatttccttattgttctgactcaaaatgaactaagagcttttcactttttgtttgtaagttctcagagagtcgggtctgcaagtgcttttgcctgccaggattttgtactcaaataaatgctatttggcaacta

SEQ ID NO: 68271 - DNA, 3555 bp, Homo sapiens
aaccagtacctggaaggctcatctaaggtcttctaggcctagcattctaacatcaaatgatcatctgatgatcatttaaggttgttgaaaaattctggttgtgaacttctttgtctttttagttcttcatgatcatgcaggaaactccccaacttttaaatcatttgaagaaaaggtcgaaaacttaaagtctaaagtagggggaaccaagcctgctggtggtgattttggagaagtcttgaattcggctgcaaatgctagtgccaccaccacggagcctcttccagaaaagacacaggagagcctgtgagattcctacctttgttctgctacccactgccagatgctgcaagcgaggtccaagcacatcttgtcaacatgcattgccatgaatttctaccagatgtgcttttatttagctttacatattcctttgaccaaatagtttgtgggttaaacaaaatgaaaatatcttcacctctattcttgggaaacaccctttagtgtacatttatgttcctttatttaggaaacaccattataaaaacacttatagtaaatggggacattcactataatgatctaagaagctacagattgtcatagttgttttcctgctttacaaaattgctccagatctggaatgccagtttgacctttgtcttctataatatttcctttttttcccctctttgaatctctgtatatttgattcttaactaaaattgttctcttaaatattctgaatcctggtaattaaaagtttgggtgtattttctttacctccaaggaaagaactactagctacaaaaaatattttggaataagcattgttttggtataaggtacatattttggttgaagacaccagactgaagtaaacagctgtgcatccaatttattatagttttgtaagtaacaatatgtaatcaaacttctaggtgacttgagagtggaacctcctatatcattatttagcaccgtttgtgacagtaaccatttcagtgtattgtttattataccacttatatcaacttatttttcaccaggttaaaattttaatttctacaaaataacattctgaatcaagcacactgtatgttcagtaggttgaactatgaacactgtcatcaatgttcagttcaaaagcctgaaagtttagatctagaagctggtaaaaatgacaatatcaatcacattaggggaaccattgttgtcttcacttaatccatttagcactatttaaaataagcacaccaagttatatgactaatataacttgaaaattttttatactgaggggttggtgataactcttgaggatgtaatgcattaataaaaatcaactcatcattttctacttgttttcaatgtgttggaaactgtaaaatgatactgtagaacctgtctcctactttgaaaactgaatgtcagggctgagtgaatcaaagtgtctagacatatttgcatagaggccaaggtattctattctaataactgcttactcaacactaccaccttttccttatactgtatatgattatggcctacaatgttgtatttgttatttattaaattgtgattgttttattattgtttatgccaaatgttaactgccaagcttggagtgacctaaagcattttttaaaagcatggctagatttacttcagtataaattatcttatgaaaaccaaattttaaaagccacaggtgttgattgttataaaataacatgctgccattcttgattgctagagtttttgttagtactttggatgcaattaaaactatgtgctatcacatgtgaaaagcttaataaattccatctatcagtagtataggtctcaatatttattatgagaccagtggtctggaaacagcttgttgtaccgaatcaactggagtctatgcttaaaaaaaaaaaatttttttttaaccatccttaaattattgcttaatggtatcatattaacatattctaaataagggctttaaggcacaggctgttgaagcattttctcagaggagtggatctgtagaagtctgtctttctatagaaatattgtgcttactcaagtgttaaattattttttctatgaactagtctacttcttaaaattcaaacatattcttttgatcacattgtttcttgagcatcctgccctgctactaacttttcaacaaggcaaaatggagtaaagtggcaatttctttagatgagtgaaataccctcaagtctcttttctgcccaaaaagggaaaagtgatagaaatgggggtggcaagtggggtgagtggatgaaggtgggtattgggggtggctgtgaaagaaaataatggagaatcacttttctagacatctacctatacttaatctaagaaacaaagtaatctactgtaaagtactctgccccttgaaagaagtattaaaaagagtgaggatggatttagaaaaaaacatgaatttagaaatattcaaaatggtttttgtggcagattcaatattatgaattcacagatatttaaagaatgagaaacatagtaattagtagaaatgccagaaacagttcctggttcctcttgtgtttgacactaagaaaatagcaagagtgtgaaatctcagatacttatgaaatctcacagatgtaaggactcaagtgtagaagaaaatatccccttcttacaaaaagaaatgtcaatttatggagtttgtgggaaatagggcaagaattcttatgcttatgagagccaagtagtcagtggaagagagtagagctcaaaactggattatcaccttagcaacttagaatagtttgaaatagaaaaaaagtatttaatttggatctggatctgttaagatatgcacagtctattttttgtatagtattggaaaataaaaatgctataatttgggtatgggttcttttgtatacattacctgcccattgaggaaaggggcaagtccattatgcaacttctctccaaacccttcatattctggatatgatacttaaagagccatgagcagctacattctgcctatcagaaggcatttattaaatgactgcttgctgaagatgtgtccaaagagatcctacattaaggtcatttgtcagaatgatgtttgtgtttgtttagagttggctgacctccaactcctggggtcaaggaatcctactgccttagcttcccaaatagctaggactataggcatgcacccggccatgtgttttatttatagctcttaaagcccagatgaagaaatcacatttttgcccatagtgaagaaacatttggccattgattagtccttattttcagtgactgtcctgttttcattagattagagagaccctgtgtgggccacagttaatataaaccattatcacttttaagtaaacctgcacatcttagatttcataatttccttattgttctgactcaaaatgaactaagagcttttcactttttgtttgtaagttctcagagagtcgggtctgcaagtgcttttgcctgccaggattttgtactcaaataaatgctatttggcaacta

SEQ ID NO: 68272 - DNA, 3212 bp, Homo sapiens
aagcagtcgtatcaacgcagagtgtccattacggccgggattgccatgaatttctaccagatgtgcttttatttagctttacatattcctttgaccaaatagtttgtgggttaaacaaaatgaaaatatcttcacctctattcttgggaaacaccctttagtgtacatttatgttcctttatttaggaaacaccattataaaaacacttatagtaaatggggacattcactataatgatctaagaagctacagattgtcatagttgttttcctgctttacaaaattgctccagatctggaatgccagtttgacctttgtcttctataatatttcctttttttcccctctttgaatctctgtatatttgattcttaactaaaattgttctcttaaatattctgaatcctggtaattaaaagtttgggtgtattttctttacctccaaggaaagaactactagctacaaaaaatattttggaataagcattgttttggtataaggtacatattttggttgaagacaccagactgaagtaaacagctgtgcatccaatttattatagttttgtaagtaacaatatgtaatcaaacttctaggtgacttgagagtggaacctcctatatcattatttagcaccgtttgtgacagtaaccatttcagtgtattgtttattataccacttatatcaacttatttttcaccaggttaaaattttaatttctacaaaataacattctgaatcaagcacactgtatgttcagtaggttgaactatgaacactgtcatcaatgttcagttcaaaagcctgaaagtttagatctagaagctggtaaaaatgacaatatcaatcacattaggggaaccattgttgtcttcacttaatccatttagcactatttaaaataagcacaccaagttatatgactaatataacttgaaaattttttatactgaggggttggtgataactcttgaggatgtaatgcattaataaaaatcaactcatcattttctacttgttttcaatgtgttggaaactgtaaaatgatactgtagaacctgtctcctactttgaaaactgaatgtcagggctgagtgaatcaaagtgtctagacatatttgcatagaggccaaggtattctattctaataactgcttactcaacactaccaccttttccttatactgtatatgattatggcctacaatgttgtatttgttatttattaaattgtgattgttttattattgtttatgccaaatgttaactgccaagcttggagtgacctaaagcattttttaaaagcatggctagatttacttcagtataaattatcttatgaaaaccaaattttaaaagccacaggtgttgattgttataaaataacatgctgccattcttgattgctagagtttttgttagtactttggatgcaattaaaactatgtgctatcacatgtgaaaagcttaataaattccatctatcagtagtataggtctcaatatttattatgagaccagtggtctggaaacagcttgttgtaccgaatcaactggagtctatgcttaaaaaaaaaaaatttttttttaaccatccttaaattattgcttaatggtatcatattaacatattctaaataagggctttaaggcacaggctgttgaagcattttctcagaggagtggatctgtagaagtctgtctttctatagaaatattgtgcttactcaagtgttaaattattttttctatgaactagtctacttcttaaaattcaaacatattcttttgatcacattgtttcttgagcatcctgccctgctactaacttttcaacaaggcaaaatggagtaaagtggcaatttctttagatgagtgaaataccctcaagtctcttttctgcccaaaaagggaaaagtgatagaaatgggggtggcaagtggggtgagtggatgaaggtgggtattgggggtggctgtgaaagaaaataatggagaatcacttttctagacatctacctatacttaatctaagaaacaaagtaatctactgtaaagtactctgccccttgaaagaagtattaaaaagagtgaggatggatttagaaaaaaacatgaatttagaaatattcaaaatggtttttgtggcagattcaatattatgaattcacagatatttaaagaatgagaaacatagtaattagtagaaatgccagaaacagttcctggttcctcttgtgtttgacactaagaaaatagcaagagtgtgaaatctcagatacttatgaaatctcacagatgtaaggactcaagtgtagaagaaaatatccccttcttacaaaaagaaatgtcaatttatggagtttgtgggaaatagggcaagaattcttatgcttatgagagccaagtagtcagtggaagagagtagagctcaaaactggattatcaccttagcaacttagaatagtttgaaatagaaaaaaagtatttaatttggatctggatctgttaagatatgcacagtctattttttgtatagtattggaaaataaaaatgctataatttgggtatgggttcttttgtatacattacctgcccattgaggaaaggggcaagtccattatgcaacttctctccaaacccttcatattctggatatgatacttaaagagccatgagcagctacattctgcctatcagaaggcatttattaaatgactgcttgctgaagatgtgtccaaagagatcctacattaaggtcatttgtcagaatgatgtttgtgtttgtttagagttggctgacctccaactcctggggtcaaggaatcctactgccttagcttcccaaatagctaggactataggcatgcacccggccatgtgttttatttatagctcttaaagcccagatgaagaaatcacatttttgcccatagtgaagaaacatttggccattgattagtccttattttcagtgactgtcctgttttcattagattagagagaccctgtgtgggccacagttaatataaaccattatcacttttaagtaaacctgcacatcttagatttcataatttccttattgttctgactcaaaatgaactaagagcttttcactttttgtttgtaagttctcagagagtcgggtctgcaagtgcttttgcctgccaggattttgtactcaaataaatgctatttggcaacta

SEQ ID NO: 68273 - DNA, 2807 bp, Homo sapiens
atgaaaaagaaacattgctaaatatacaatatataatcaaaggaaagaactactagctacaaaaaatattttggaataagcattgttttggtataaggtacatattttggttgaagacaccagactgaagtaaacagctgtgcatccaatttattatagttttgtaagtaacaatatgtaatcaaacttctaggtgacttgagagtggaacctcctatatcattatttagcaccgtttgtgacagtaaccatttcagtgtattgtttattataccacttatatcaacttatttttcaccaggttaaaattttaatttctacaaaataacattctgaatcaagcacactgtatgttcagtaggttgaactatgaacactgtcatcaatgttcagttcaaaagcctgaaagtttagatctagaagctggtaaaaatgacaatatcaatcacattaggggaaccattgttgtcttcacttaatccatttagcactatttaaaataagcacaccaagttatatgactaatataacttgaaaattttttatactgaggggttggtgataactcttgaggatgtaatgcattaataaaaatcaactcatcattttctacttgttttcaatgtgttggaaactgtaaaatgatactgtagaacctgtctcctactttgaaaactgaatgtcagggctgagtgaatcaaagtgtctagacatatttgcatagaggccaaggtattctattctaataactgcttactcaacactaccaccttttccttatactgtatatgattatggcctacaatgttgtatttgttatttattaaattgtgattgttttattattgtttatgccaaatgttaactgccaagcttggagtgacctaaagcattttttaaaagcatggctagatttacttcagtataaattatcttatgaaaaccaaattttaaaagccacaggtgttgattgttataaaataacatgctgccattcttgattgctagagtttttgttagtactttggatgcaattaaaactatgtgctatcacatgtgaaaagcttaataaattccatctatcagtagtataggtctcaatatttattatgagaccagtggtctggaaacagcttgttgtaccgaatcaactggagtctatgcttaaaaaaaaaaaatttttttttaaccatccttaaattattgcttaatggtatcatattaacatattctaaataagggctttaaggcacaggctgttgaagcattttctcagaggagtggatctgtagaagtctgtctttctatagaaatattgtgcttactcaagtgttaaattattttttctatgaactagtctacttcttaaaattcaaacatattcttttgatcacattgtttcttgagcatcctgccctgctactaacttttcaacaaggcaaaatggagtaaagtggcaatttctttagatgagtgaaataccctcaagtctcttttctgcccaaaaagggaaaagtgatagaaatgggggtggcaagtggggtgagtggatgaaggtgggtattgggggtggctgtgaaagaaaataatggagaatcacttttctagacatctacctatacttaatctaagaaacaaagtaatctactgtaaagtactctgccccttgaaagaagtattaaaaagagtgaggatggatttagaaaaaaacatgaatttagaaatattcaaaatggtttttgtggcagattcaatattatgaattcacagatatttaaagaatgagaaacatagtaattagtagaaatgccagaaacagttcctggttcctcttgtgtttgacactaagaaaatagcaagagtgtgaaatctcagatacttatgaaatctcacagatgtaaggactcaagtgtagaagaaaatatccccttcttacaaaaagaaatgtcaatttatggagtttgtgggaaatagggcaagaattcttatgcttatgagagccaagtagtcagtggaagagagtagagctcaaaactggattatcaccttagcaacttagaatagtttgaaatagaaaaaaagtatttaatttggatctggatctgttaagatatgcacagtctattttttgtatagtattggaaaataaaaatgctataatttgggtatgggttcttttgtatacattacctgcccattgaggaaaggggcaagtccattatgcaacttctctccaaacccttcatattctggatatgatacttaaagagccatgagcagctacattctgcctatcagaaggcatttattaaatgactgcttgctgaagatgtgtccaaagagatcctacattaaggtcatttgtcagaatgatgtttgtgtttgtttagagttggctgacctccaactcctggggtcaaggaatcctactgccttagcttcccaaatagctaggactataggcatgcacccggccatgtgttttatttatagctcttaaagcccagatgaagaaatcacatttttgcccatagtgaagaaacatttggccattgattagtccttattttcagtgactgtcctgttttcattagattagagagaccctgtgtgggccacagttaatataaaccattatcacttttaagtaaacctgcacatcttagatttcataatttccttattgttctgactcaaaatgaactaagagcttttcactttttgtttgtaagttctcagagagtcgggtctgcaagtgcttttgcctgccaggattttgtactcaaataaatgctatttggcaacta

SEQ ID NO: 68274 - DNA, 2351 bp, Homo sapiens
aggtggttgggtgacgccccaggaaagcgctccaggccgagggcgggcggcgccgccgcgcccgacgcctctgggggtggggacttcgcgggagtcgccggcggaggcgaggaggagctctgcgcggcgcggcgggcgatccgagccgggacgggctgcaggcgggggtgctgcagaggacacgaggcggcgggctggagacatggaccgcggcgagcaaggtctgctgagaacagacccagtccctgaggaaggagaagatgttgctgccacgatcagtgccacagagaccctctcggaagaggagcaggaagagctaagaagagaacttgcaaaggtagaagaagaaatccagactctgtctcaagtgttagcagcaaaagagaagcatctagcagagatcaagcggaaacttggaatcaattctctacaggaactaaaacagaacattgccaaagggtggcaagacgtgacagcaacatctgcttacaagaagacatctgaaaccttatcccaggctggacagaaggcctcagctgctttttcgtctgttggctcagtcatcaccaaaaagctggaagatgtaaaaaactccccaacttttaaatcatttgaagaaaaggtcgaaaacttaaagtctaaagtagggggaaccaagcctgctggtggtgattttggagaagtcttgaattcggctgcaaatgctagtgccaccaccacggagcctcttccagaaaagacacaggagagcctgtgagattcctacctttgttctgctacccactgccagatgctgcaagcgaggtccaagcacatcttgtcaacatgcattgccatgaatttctaccagatgtgcttttatttagctttacatattcctttgaccaaatagtttgtgggttaaacaaaatgaaaatatcttcacctctattcttgggaaacaccctttagtgtacatttatgttcctttatttaggaaacaccattataaaaacacttatagtaaatggggacattcactataatgatctaagaagctacagattgtcatagttgttttcctgctttacaaaattgctccagatctggaatgccagtttgacctttgtcttctataatatttcctttttttcccctctttgaatctctgtatatttgattcttaactaaaattgttctcttaaatattctgaatcctggtaattaaaagtttgggtgtattttctttacctccaaggaaagaactactagctacaaaaaatattttggaataagcattgttttggtataaggtacatattttggttgaagacaccagactgaagtaaacagctgtgcatccaatttattatagttttgtaagtaacaatatgtaatcaaacttctaggtgacttgagagtggaacctcctatatcattatttagcaccgtttgtgacagtaaccatttcagtgtattgtttattataccacttatatcaacttatttttcaccaggttaaaattttaatttctacaaaataacattctgaatcaagcacactgtatgttcagtaggttgaactatgaacactgtcatcaatgttcagttcaaaagcctgaaagtttagatctagaagctggtaaaaatgacaatatcaatcacattaggggaaccattgttgtcttcacttaatccatttagcactatttaaaataagcacaccaagttatatgactaatataacttgaaaattttttatactgaggggttggtgataactcttgaggatgtaatgcattaataaaaatcaactcatcattttctacttgttttcaatgtgttggaaactgtaaaatgatactgtagaacctgtctcctactttgaaaactgaatgtcagggctgagtgaatcaaagtgtctagacatatttgcatagaggccaaggtattctattctaataactgcttactcaacactaccaccttttccttatactgttgctgtttcttttttgtcgctggagcccctgcaggtttctggtgtcttgggggtatgatgttacttgtagaggcagatactgttgcagcactgccaggtcttggggaggtgggtgggctgctcacagttttactggcatccagttcagatgaagctcctgcagttgctccctgggtcccttttccaatctgatccttctttttacccttctttcttccccggtagtaagaacgttctcgcattggcagccatctttcttgatctggggtaacttttgggtcataattcttcgccaattttcccttctttttctttttcttcttaatcaaatctccctgtccttgttcctttggttgcctacactagtgga

SEQ ID NO: 68275 - DNA, 2019 bp, Homo sapiens
aggtggttgggtgacgccccaggaaagcgctccaggccgagggcgggcggcgccgccgcgcccgacgcctctgggggtggggacttcgcgggagtcgccggcggaggcgaggaggagctctgcgcggcgcggcgggcgatccgagccgggacgggctgcaggcgggggtgctgcagaggacacgaggcggcgggctggagacatggaccgcggcgagcaaggtctgctgagaacagacccagtccctgaggaaggagaagatgttgctgccacgatcagtgccacagagaccctctcggaagaggagcaggaagagctaagaagagaacttgcaaaggtagaagaagaaatccagactctgtctcaagtgttagcagcaaaagagaagcatctagcagagatcaagcggaaacttggaatcaattctctacaggaactaaaacagaacattgccaaagggtggcaagacgtgacagcaacatctgcttacaagaagacatctgaaaccttatcccaggctggacagaaggcctcagctgctttttcgtctgttggctcagtcatcaccaaaaagctggaagatgtaaaaaactccccaacttttaaatcatttgaagaaaaggtcgaaaacttaaagtctaaagtagggggaaccaagcctgctggtggtgattttggagaagtcttgaattcggctgcaaatgctagtgccaccaccacggagcctcttccagaaaagacacaggagagcctgtgagattcctacctttgttctgctacccactgccagatgctgcaagcgaggtccaagcacatcttgtcaacatgcattgccatgaatttctaccagatgtgcttttatttagctttacatattcctttgaccaaatagtttgtgggttaaacaaaatgaaaatatcttcacctctattcttgggaaacaccctttagtgtacatttatgttcctttatttaggaaacaccattataaaaacacttatagtaaatggggacattcactataatgatctaagaagctacagattgtcatagttgttttcctgctttacaaaattgctccagatctggaatgccagtttgacctttgtcttctataatatttcctttttttcccctctttgaatctctgtatatttgattcttaactaaaattgttctcttaaatattctgaatcctggtaattaaaagtttgggtgtattttctttacctccaaggaaagaactactagctacaaaaaatattttggaataagcattgttttggtataaggtacatattttggttgaagacaccagactgaagtaaacagctgtgcatccaatttattatagttttgtaagtaacaatatgtaatcaaacttctaggtgacttgagagtggaacctcctatatcattatttagcaccgtttgtgacagtaaccatttcagtgtattgtttattataccacttatatcaacttatttttcaccaggttaaaattttaatttctacaaaataacattctgaatcaagcacactgtatgttcagtaggttgaactatgaacactgtcatcaatgttcagttcaaaagcctgaaagtttagatctagaagctggtaaaaatgacaatatcaatcacattaggggaaccattgttgtcttcacttaatccatttagcactatttaaaataagcacaccaagttatatgactaatataactttggccttccttcctcttcctcctgattatatacaacatatctcctttcaagactattatttccatcatgcttattccttcacaaatctaaaccttgaggtgatatgaacgcaaccaacatcaagtaaagcatactcaattcagacatgaagaaaactggcacggtatacaatacaccccccgagcatctcatatatcactggcacagtacgattcagtgtactgctacagcccatagataaatatggcagctagatcagctcattgttacctcttgtcgagtgcacaggtc

SEQ ID NO: 68276 - DNA, 2819 bp, Homo sapiens
aggtggttgggtgacgccccaggaaagcgctccaggccgagggcgggcggcgccgccgcgcccgacgcctctgggggtggggacttcgcgggagtcgccggcggaggcgaggaggagctctgcgcggcgcggcgggcgatccgagccgggacgggctgcaggcgggggtgctgcagaggacacgaggcggcgggctggagacatggaccgcggcgagcaaggtctgctgagaacagacccagtccctgaggaaggagaagatgttgctgccacgatcagtgccacagagaccctctcggaagaggagcaggaagagctaagaagagaacttgcaaaggtagaagaagaaatccagactctgtctcaagtgttagcagcaaaagagaagcatctagcagagatcaagcggaaacttggaatcaattctctacaggaactaaaacagaacattgccaaagggtggcaagacgtgacagcaacatctgcttacaagaagacatctgaaaccttatcccaggctggacagaaggcctcagctgctttttcgtctgttggctcagtcatcaccaaaaagctggaagatgtaaaattgcaagccttttcacattcctttagtatacgttccattcagcattcaattagcatgcctgctatgagaaactccccaacttttaaatcatttgaagaaaaggtcgaaaacttaaagtctaaagtagggggaaccaagcctgctggtggtgattttggagaagtcttgaattcggctgcaaatgctagtgccaccaccacggagcctcttccagaaaagacacaggagagcctgtgagattcctacctttgttctgctacccactgccagatgctgcaagcgaggtccaagcacatcttgtcaacatgcattgccatgaatttctaccagatgtgcttttatttagctttacatatcttatgaaaaccaaattttaaaagccacaggtgttgattgttataaaataacatgctgccattcttgattgctagagtttttgttagtactttggatgcaattaaaactatgtgctatcacatgtgaaaagcttaataaattccatctatcagtagtataggtctcaatatttattatgagaccagtggtctggaaacagcttgttgtaccgaatcaactggagtctatgcttaaaaaaaaaaaatttttttttaaccatccttaaattattgcttaatggtatcatattaacatattctaaataagggctttaaggcacaggctgttgaagcattttctcagaggagtggatctgtagaagtctgtctttctatagaaatattgtgcttactcaagtgttaaattattttttctatgaactagtctacttcttaaaattcaaacatattcttttgatcacattgtttcttgagcatcctgccctgctactaacttttcaacaaggcaaaatggagtaaagtggcaatttctttagatgagtgaaataccctcaagtctcttttctgcccaaaaagggaaaagtgatagaaatgggggtggcaagtggggtgagtggatgaaggtgggtattgggggtggctgtgaaagaaaataatggagaatcacttttctagacatctacctatacttaatctaagaaacaaagtaatctactgtaaagtactctgccccttgaaagaagtattaaaaagagtgaggatggatttagaaaaaaacatgaatttagaaatattcaaaatggtttttgtggcagattcaatattatgaattcacagatatttaaagaatgagaaacatagtaattagtagaaatgccagaaacagttcctggttcctcttgtgtttgacactaagaaaatagcaagagtgtgaaatctcagatacttatgaaatctcacagatgtaaggactcaagtgtagaagaaaatatccccttcttacaaaaagaaatgtcaatttatggagtttgtgggaaatagggcaagaattcttatgcttatgagagccaagtagtcagtggaagagagtagagctcaaaactggattatcaccttagcaacttagaatagtttgaaatagaaaaaaagtatttaatttggatctggatctgttaagatatgcacagtctattttttgtatagtattggaaaataaaaatgctataatttgggtatgggttcttttgtatacattacctgcccattgaggaaaggggcaagtccattatgcaacttctctccaaacccttcatattctggatatgatacttaaagagccatgagcagctacattctgcctatcagaaggcatttattaaatgactgcttgctgaagatgtgtccaaagagatcctacattaaggtcatttgtcagaatgatgtttgtgtttgtttagagttggctgacctccaactcctggggtcaaggaatcctactgccttagcttcccaaatagctaggactataggcatgcacccggccatgtgttttatttatagctcttaaagcccagatgaagaaatcacatttttgcccatagtgaagaaacatttggccattgattagtccttattttcagtgactgtcctgttttcattagattagagagaccctgtgtgggccacagttaatataaaccattatcacttttaagtaaacctgcacatcttagatttcataatttccttattgttctgactcaaaatgaactaagagcttttcactttttgtttgtaagttctcagagagtcgggtctgcaagtgcttttgcctgccaggattttgtactcaaataaatgctatttggcaacta

SEQ ID NO: 68277 - DNA, 1321 bp, Homo sapiens
tagaaacggtgggatagtcttagcgtatgcggtgaaatgctttttgtccatgtgccgttttaactgatatgcttgttagaactcagctaatggagctcaaagtatgagatacagaacttggtgacccatgtattgcataagctaaagcaacacagacactcctaggcaaagtttttgtttgtgaatagtttatgctgtacagcataaactattttagaaaaaaacatgaatttagaaatattcaaaatggtttttgtggcagattcaatattatgaattcacagatatttaaagaatgagaaacatagtaattagtagaaatgccagaaacagttcctggttcctcttgtgtttgacactaagaaaatagcaagagtgtgaaatctcagatacttatgaaatctcacagatgtaaggactcaagtgtagaagaaaatatccccttcttacaaaaagaaatgtcaatttatggagtttgtgggaaatagggcaagaattcttatgcttatgagagccaagtagtcagtggaagagagtagagctcaaaactggattatcaccttagcaacttagaatagtttgaaatagaaaaaaagtatttaatttggatctggatctgttaagatatgcacagtctattttttgtatagtattggaaaataaaaatgctataatttgggtatgggttcttttgtatacattacctgcccattgaggaaaggggcaagtccattatgcaacttctctccaaacccttcatattctggatatgatacttaaagagccatgagcagctacattctgcctatcagaaggcatttattaaatgactgcttgctgaagatgtgtccaaagagatcctacattaaggtcatttgtcagaatgatgtttgtgtttgtttagagttggctgacctccaactcctggggtcaaggaatcctactgccttagcttcccaaatagctaggactataggcatgcacccggccatgtgttttatttatagctcttaaagcccagatgaagaaatcacatttttgcccatagtgaagaaacatttggccattgattagtccttattttcagtgactgtcctgttttcattagattagagagaccctgtgtgggccacagttaatataaaccattatcacttttaagtaaacctgcacatcttagatttcataatttccttattgttctgactcaaaatgaactaagagcttttcactttttgtttgtaagttctcagagagtcgggtctgcaagtgcttttgcctgccaggattttgtactcaaataaatgctatttggcaacta

SEQ ID NO: 68278 - DNA, 1047 bp, Homo sapiens
aggtggttgggtgacgccccaggaaagcgctccaggccgagggcgggcggcgccgccgcgcccgacgcctctgggggtggggacttcgcgggagtcgccggcggaggcgaggaggagctctgcgcggcgcggcgggcgatccgagccgggacgggctgcaggcgggggtgctgcagaggacacgaggcggcgggctggagacatggaccgcggcgagcaaggtctgctgagaacagacccagtccctgaggaaggagaagatgttgctgccacgatcagtgccacagagaccctctcggaagaggagcaggaagagctaagaagagaacttgcaaaggtagaagaagaaatccagactctgtctcaagtgttagcagcaaaagagaagcatctagcagagatcaagcggaaacttggaatcaattctctacaggaactaaaacagaacattgccaaagggtggcaagacgtgacagcaacatctgcttacaagaagacatctgaaaccttatcccaggctggacagaaggcctcagctgctttttcgtctgttggctcagtcatcaccaaaaagctggaagatgtaaaaaactccccaacttttaaatcatttgaagaaaaggtcgaaaacttaaaggctcacccttggcaggtgtgggatctgggccagcagcacaagatgagcacagcctactgggcagagtgggcagaatgagcccagcaggcatgagcaaaactccagcagaggcgctgcaggccatggaagtttccagctggtgaagcgacatcctaagaactttgtgacactatcctttcttcttggtttgcacacatggttgaggcatgaatttctagtaaactcatggtcacctccacctagccgtcaatagctactattcattaagtgcccaggcatcttacactcatcacctttaactctttactcaggcatgtggcagtgtcaccattttatagataagaccaaagccagtagctgtaaagtattaggcttgaacttagcagtagaatgaaactattttctgttca

SEQ ID NO: 68279 - DNA, 1288 bp, Homo sapiens
tgtttgcctgaactgtttgtacctctgggccatattgcagaaccctgcccttctttgttgactgaggaaagctcgctccctgcccaggtttttcattgttgatcgaaattaacaccaggtggtgaatagagcccctcctaaggttgctcaggataaatcatttattaaataggtctgcttatcaggaggggcgtgaaggctcccaaaaggaaatgctggcacctgggcccagaagccagggcctctaactcctggggttgatttcttcagtgaagttgcaccctacaaagggaatatggccaaagcggcactcaactgaaggctgatatcaggcgattagacagccatgcattctgcgtttgtctggaatggattgtagagagatggacttatatgaggactaccagtccccgtttgattttgatgcaggagtgaacaaaagctatctctacttgtctcctagtggaaattcatctccacccggatcacctactcttcagaaatttggtctgctgagaacagacccagtccctgaggaaggagaagatgttgctgccacgatcagtgccacagagaccctctcggaagaggagcaggaagagctaagaagagaacttgcaaagaaactccccaacttttaaatcatttgaagaaaaggtcgaaaacttaaagtctaaagtagggggaaccaagcctgctggtggtgattttggagaagtcttgaattcggctgcaaatgctagtgccaccaccacggagcctcttccagaaaagacacaggagagcctgcccacccttcctccattctgagcacataaaaaccccacactcagccagactcaacactcatcaggacaacctgcctgcagaaaggaccactttgggtctcctgagtgctgttctgtcattcaataacgctcctctctgccttgctcaccctacggttgtccatgtgacttcattcttcctggacacaggacaagaactcaggacctgctgaacagcgggagcaaaaggaactgtaacatgttcctggctggcttgccaagctggggcggtgacacgctcccagactgcaggagagaagagtggtgacccttctggggacccagaccttgggattccctgagccagagctgctataacattatagccttcccacctttcaccggcaccagacagctgccccacatgacaggaggcagcagcagagccaggccagctgaggagccatgggctggagtggggtggtgggactgaaagagctgtaacacaaacgggctgaaac

SEQ ID NO: 68280 - DNA, 1187 bp, Homo sapiens
aggtggttgggtgacgccccaggaaagcgctccaggccgagggcgggcggcgccgccgcgcccgacgcctctgggggtggggacttcgcgggagtcgccggcggaggcgaggaggagctctgcgcggcgcggcgggcgatccgagccgggacgggctgcaggcgggggtgctgcagaggacacgaggcggcgggctggagacatggaccgcggcgagcaaggtctgctgagaacagacccagtccctgaggaaggagaagatgttgctgccacgatcagtgccacagagaccctctcggaagaggagcaggaagagctaagaagagaacttgcaaaggtagaagaagaaatccagactctgtctcaagtgttagcagcaaaagagaagcatctagcagagatcaagcggaaacttggaatcaattctctacaggaactaaaacagaacattgccaaagggtggcaagacgtgacagcaacatctgcttacaagaagacatctgaaaccttatcccaggctggacagaaggcctcagctgctttttcgtctgttggctcagtcatcaccaaaaagctggaagatgtaaaaaactccccaacttttaaatcatttgaagaaaaggtcgaaaacttaaagtctaaagtagggggaaccaagcctgctggtggtgattttggagaagtcttgaattcggctgcaaatgctagtgccaccaccacggagcctcttccagaaaagacacaggagagcctgtgagattcctacctttgttctgctacccactgccagatgctgcaagcgaggtccaagcacatcttgtcaacatgcattgccatgaatttctaccagatgtgcttttatttagctttacatattcctttgaccaaatagtttgtgggttaaacaaaatgaaaatatcttcacctctattcttgggaaacaccctttagtgtacatttatgttcctttatttaggaaacaccattataaaaacacttatagtaaatggggacattcactataatgatctaagaagctacagattgtcatagttgttttcctgctttacaaaattgctccagatctggaatgccagtttgacctttgtcttctataatatttcctttttttcccctctttgaatctctgtatatttgattcttaactaaaattgttctcttaaata

SEQ ID NO: 68281 - DNA, 3229 bp, Homo sapiens
aggtggttgggtgacgccccaggaaagcgctccaggccgagggcgggcggcgccgccgcgcccgacgcctctgggggtggggacttcgcgggagtcgccggcggaggcgaggaggagctctgcgcggcgcggcgggcgatccgagccgggacgggctgcaggcgggggtgctgcagaggacacgaggcggcgggctggagacatggaccgcggcgagcaaggtctgctgagaacagacccagtccctgaggaaggagaagatgttgctgccacgatcagtgccacagagaccctctcggaagaggagcaggaagagctaagaagagaacttgcaaaggtagaagaagaaatccagactctgtctcaagtgttagcagcaaaagagaagcatctagcagagatcaagcggaaacttggaatcaattctctacaggaactaaaacagaacattgccaaagggtggcaagacgtgacagcaacatctgcttacaagaagacatctgaaaccttatcccaggctggacagaaggcctcagctgctttttcgtctgttggctcagtcatcaccaaaaagctggaagatgtaaaaaactccccaacttttaaatcatttgaagaaaaggtcgaaaacttaaagtctaaagtagggggaaccaagcctgctggtggtgattttggagaagtcttgaattcggctgcaaatgctagtgccaccaccacggagcctcttccagaaaagacacaggagagcctgtgagattcctacctttgttctgctacccactgccagatgctgcaagcgaggtccaagcacatcttgtcaacatgcattgccatgaatttctaccagatgtgcttttatttagctttacatattcctttgaccaaatagtttgtgggttaaacaaaatgaaaatatcttcacctctattcttgggaaacaccctttagtgtacatttatgttcctttatttaggaaacaccattataaaaacacttatagtaaatggggacattcactataatgatctaagaagctacagattgtcatagttgttttcctgctttacaaaattgctccagatctggaatgccagtttgacctttgtcttctataatatttcctttttttcccctctttgaatctctgtatatttgattcttaactaaaattgttctcttaaatattctgaatcctggtaattaaaagtttgggtgtattttctttacctccaaggaaagaactactagctacaaaaaatattttggaataagcattgttttggtataaggtacatattttggttgaagacaccagactgaagtaaacagctgtgcatccaatttattatagttttgtaagtaacaatatgtaatcaaacttctaggtgacttgagagtggaacctcctatatcattatttagcaccgtttgtgacagtaaccatttcagtgtattgtttattataccacttatatcaacttatttttcaccaggttaaaattttaatttctacaaaataacattctgaatcaagcacactgtatgttcagtaggttgaactatgaacactgtcatcaatgttcagttcaaaagcctgaaagtttagatctagaagctggtaaaaatgacaatatcaatcacattaggggaaccattgttgtcttcacttaatccatttagcactatttaaaataagcacaccaagttatatgactaatataacttgaaaattttttatactgaggggttggtgataactcttgaggatgtaatgcattaataaaaatcaactcatcattttctacttgttttcaatgtgttggaaactgtaaaatgatactgtagaacctgtctcctactttgaaaactgaatgtcagggctgagtgaatcaaagtgtctagacatatttgcatagaggccaaggtattctattctaataactgcttactcaacactaccaccttttccttatactgtatatgattatggcctacaatgttgtatttgttatttattaaattgtgattgttttattattgtttatgccaaatgttaactgccaagcttggagtgacctaaagcattttttaaaagcatggctagatttacttcagtataaattatcttatgaaaaccaaattttaaaagccacaggtgttgattgttataaaataacatgctgccattcttgattgctagagtttttgttagtactttggatgcaattaaaactatgtgctatcacatgtgaaaagcttaataaattccatctatcaggaaaaaaaaaaaaaaacaaaaaaaaaaaaaaaaaaaaaaaaaaaaaaaaaaaaaaaagaaaaaaaaaaacaaaaaaaaacaaaaaaaaaaaaaaaagagaggggggcgggccagcaaaaaaaatctttcccgacggggggggcgacacaaaacaggccaccccccccaagttatttgagagaaaaggaggggcgcacccaaagggggagggggattctaaataacaaggcagggcgggggcggggataaaaaaacacaggcagagagaggagaacaaagcgcagtgactgggcgaacactatcgtagaagaaacaccaaccctctgggggcagggcacacacattaagaggacaacccactctacaccagacgaatactatgacccgcaggaagcgaacaactaaaaacaatagacagcgtgagacttgaggagggaaaccaacaacacaacaactatagtttcggtaggagagataaaaaacaactgctacgaccgaacgcatatagtagaacaaaaaatactcacacgagccgagcagaaggaagaagcgagaagaaggaaggaaggacaggacaaggaggaaagagagtacagagaacaggggagtgagcagagaagaagaagagagagagaagagcaacagaagagagaagaagaaggaaacccgacaaagaagagaacacacaaagaaagacaagatacaacaaaacacgagacaagaaagaagacatacaaaacaacaggaagaaatcagagaaaaaagaaagaaaaaagaaataaggtaaaaagaaagagagaaagaaaaaggaaagacaagatacaacacggtagagagagagacgacagaacagcagagagaagcaaagaaacataacacagagagaacagacacgagtaacgagcgaaagaaagaggagcgagagatcagacaacaaaataagataat

SEQ ID NO: 68282 - DNA, 4125 bp, Homo sapiens
aggtggttgggtgacgccccaggaaagcgctccaggccgagggcgggcggcgccgccgcgcccgacgcctctgggggtggggacttcgcgggagtcgccggcggaggcgaggaggagctctgcgcggcgcggcgggcgatccgagccgggacgggctgcaggcgggggtgctgcagaggacacgaggcggcgggctggagacatggaccgcggcgagcaaggtctgctgagaacagacccagtccctgaggaaggagaagatgttgctgccacgatcagtgccacagagaccctctcggaagaggagcaggaagagctaagaagagaacttgcaaaggtagaagaagaaatccagactctgtctcaagtgttagcagcaaaagagaagcatctagcagagatcaagcggaaacttggaatcaattctctacaggaactaaaacagaacattgccaaagggtggcaagacgtgacagcaacatctgcttacaagaagacatctgaaaccttatcccaggctggacagaaggcctcagctgctttttcgtctgttggctcagtcatcaccaaaaagctggaagatgtaaaaaactccccaacttttaaatcatttgaagaaaaggtcgaaaacttaaagtctaaagtagggggaaccaagcctgctggtggtgattttggagaagtcttgaattcggctgcaaatgctagtgccaccaccacggagcctcttccagaaaagacacaggagagcctgtgagattcctacctttgttctgctacccactgccagatgctgcaagcgaggtccaagcacatcttgtcaacatgcattgccatgaatttctaccagatgtgcttttatttagctttacatattcctttgaccaaatagtttgtgggttaaacaaaatgaaaatatcttcacctctattcttgggaaacaccctttagtgtacatttatgttcctttatttaggaaacaccattataaaaacacttatagtaaatggggacattcactataatgatctaagaagctacagattgtcatagttgttttcctgctttacaaaattgctccagatctggaatgccagtttgacctttgtcttctataatatttcctttttttcccctctttgaatctctgtatatttgattcttaactaaaattgttctcttaaatattctgaatcctggtaattaaaagtttgggtgtattttctttacctccaaggaaagaactactagctacaaaaaatattttggaataagcattgttttggtataaggtacatattttggttgaagacaccagactgaagtaaacagctgtgcatccaatttattatagttttgtaagtaacaatatgtaatcaaacttctaggtgacttgagagtggaacctcctatatcattatttagcaccgtttgtgacagtaaccatttcagtgtattgtttattataccacttatatcaacttatttttcaccaggttaaaattttaatttctacaaaataacattctgaatcaagcacactgtatgttcagtaggttgaactatgaacactgtcatcaatgttcagttcaaaagcctgaaagtttagatctagaagctggtaaaaatgacaatatcaatcacattaggggaaccattgttgtcttcacttaatccatttagcactatttaaaataagcacaccaagttatatgactaatataacttgaaaattttttatactgaggggttggtgataactcttgaggatgtaatgcattaataaaaatcaactcatcattttctacttgttttcaatgtgttggaaactgtaaaatgatactgtagaacctgtctcctactttgaaaactgaatgtcagggctgagtgaatcaaagtgtctagacatatttgcatagaggccaaggtattctattctaataactgcttactcaacactaccaccttttccttatactgtatatgattatggcctacaatgttgtatttgttatttattaaattgtgattgttttattattgtttatgccaaatgttaactgccaagcttggagtgacctaaagcattttttaaaagcatggctagatttacttcagtataaattatcttatgaaaaccaaattttaaaagccacaggtgttgattgttataaaataacatgctgccattcttgattgctagagtttttgttagtactttggatgcaattaaaactatgtgctatcacatgtgaaaagcttaataaattccatctatcagtagtataggtctcaatatttattatgagaccagtggtctggaaacagcttgttgtaccgaatcaactggagtctatgcttaaaaaaaaaaaatttttttttaaccatccttaaattattgcttaatggtatcatattaacatattctaaataagggctttaaggcacaggctgttgaagcattttctcagaggagtggatctgtagaagtctgtctttctatagaaatattgtgcttactcaagtgttaaattattttttctatgaactagtctacttcttaaaattcaaacatattcttttgatcacattgtttcttgagcatcctgccctgctactaacttttcaacaaggcaaaatggagtaaagtggcaatttctttagatgagtgaaataccctcaagtctcttttctgcccaaaaagggaaaagtgatagaaatgggggtggcaagtggggtgagtggatgaaggtgggtattgggggtggctgtgaaagaaaataatggagaatcacttttctagacatctacctatacttaatctaagaaacaaagtaatctactgtaaagtactctgccccttgaaagaagtattaaaaagagtgaggatggatttagaaaaaaacatgaatttagaaatattcaaaatggtttttgtggcagattcaatattatgaattcacagatatttaaagaatgagaaacatagtaattagtagaaatgccagaaacagttcctggttcctcttgtgtttgacactaagaaaatagcaagagtgtgaaatctcagatacttatgaaatctcacagatgtaaggactcaagtgtagaagaaaatatccccttcttacaaaaagaaatgtcaatttatggagtttgtgggaaatagggcaagaattcttatgcttatgagagccaagtagtcagtggaagagagtagagctcaaaactggattatcaccttagcaacttagaatagtttgaaatagaaaaaaagtatttaatttggatctggatctgttaagatatgcacagtctattttttgtatagtattggaaaataaaaatgctataatttgggtatgggttcttttgtatacattacctgcccattgaggaaaggggcaagtccattatgcaacttctctccaaacccttcatattctggatatgatacttaaagagccatgagcagctacattctgcctatcagaaggcatttattaaatgactgcttgctgaagatgtgtccaaagagatcctacattaaggtcatttgtcagaatgatgtttgtgtttgtttagagttggctgacctccaactcctggggtcaaggaatcctactgccttagcttcccaaatagctaggactataggcatgcacccggccatgtgttttatttatagctcttaaagcccagatgaagaaatcacatttttgcccatagtgaagaaacatttggccattgattagtccttattttcagtgactgtcctgttttcattagattagagagaccctgtgtgggccacagttaatataaaccattatcacttttaagtaaacctgcacatcttagatttcataatttccttattgttctgactcaaaatgaactaagagcttttcactttttgtttgtaagttctcagagagtcgggtctgcaagtgcttttgcctgccaggattttgtactcaaataaatgctatttggcaactaaaattcttgccagctctcatgtaattttgatgttactgaggttggttggtagtttattttattaattttgtggttcttctatcatatagaaaaagccaaatacagttttgtttgaatatttgt

SEQ ID NO: 68283 - DNA, 4071 bp, Homo sapiens
aggtggttgggtgacgccccaggaaagcgctccaggccgagggcgggcggcgccgccgcgcccgacgcctctgggggtggggacttcgcgggagtcgccggcggaggcgaggaggagctctgcgcggcgcggcgggcgatccgagccgggacgggctgcaggcgggggtgctgcagaggacacgaggcggcgggctggagacatggaccgcggcgagcaaggtctgctgagaacagacccagtccctgaggaaggagaagatgttgctgccacgatcagtgccacagagaccctctcggaagaggagcaggaagagctaagaagagaacttgcaaaggtagaagaagaaatccagactctgtctcaagtgttagcagcaaaagagaagcatctagcagagatcaagcggaaacttggaatcaattctctacaggaactaaaacagaacattgccaaagggtggcaagacgtgacagcaacatctgcttacaagaagacatctgaaaccttatcccaggctggacagaaggcctcagctgctttttcgtctgttggctcagtcatcaccaaaaagctggaagatgtaaaattgcaagccttttcacattcctttagtatacgttccattcagcattcaattagcatgcctgctatgagaaactccccaacttttaaatcatttgaagaaaaggtcgaaaacttaaagtctaaagtagggggaaccaagcctgctggtggtgattttggagaagtcttgaattcggctgcaaatgctagtgccaccaccacggagcctcttccagaaaagacacaggagagcctgtgagattcctacctttgttctgctacccactgccagatgctgcaagcgaggtccaagcacatcttgtcaacatgcattgccatgaatttctaccagatgtgcttttatttagctttacatattcctttgaccaaatagtttgtgggttaaacaaaatgaaaatatcttcacctctattcttgggaaacaccctttagtgtacatttatgttcctttatttaggaaacaccattataaaaacacttatagtaaatggggacattcactataatgatctaagaagctacagattgtcatagttgttttcctgctttacaaaattgctccagatctggaatgccagtttgacctttgtcttctataatatttcctttttttcccctctttgaatctctgtatatttgattcttaactaaaattgttctcttaaatattctgaatcctggtaattaaaagtttgggtgtattttctttacctccaaggaaagaactactagctacaaaaaatattttggaataagcattgttttggtataaggtacatattttggttgaagacaccagactgaagtaaacagctgtgcatccaatttattatagttttgtaagtaacaatatgtaatcaaacttctaggtgacttgagagtggaacctcctatatcattatttagcaccgtttgtgacagtaaccatttcagtgtattgtttattataccacttatatcaacttatttttcaccaggttaaaattttaatttctacaaaataacattctgaatcaagcacactgtatgttcagtaggttgaactatgaacactgtcatcaatgttcagttcaaaagcctgaaagtttagatctagaagctggtaaaaatgacaatatcaatcacattaggggaaccattgttgtcttcacttaatccatttagcactatttaaaataagcacaccaagttatatgactaatataacttgaaaattttttatactgaggggttggtgataactcttgaggatgtaatgcattaataaaaatcaactcatcattttctacttgttttcaatgtgttggaaactgtaaaatgatactgtagaacctgtctcctactttgaaaactgaatgtcagggctgagtgaatcaaagtgtctagacatatttgcatagaggccaaggtattctattctaataactgcttactcaacactaccaccttttccttatactgtatatgattatggcctacaatgttgtatttgttatttattaaattgtgattgttttattattgtttatgccaaatgttaactgccaagcttggagtgacctaaagcattttttaaaagcatggctagatttacttcagtataaattatcttatgaaaaccaaattttaaaagccacaggtgttgattgttataaaataacatgctgccattcttgattgctagagtttttgttagtactttggatgcaattaaaactatgtgctatcacatgtgaaaagcttaataaattccatctatcagtagtataggtctcaatatttattatgagaccagtggtctggaaacagcttgttgtaccgaatcaactggagtctatgcttaaaaaaaaaaaatttttttttaaccatccttaaattattgcttaatggtatcatattaacatattctaaataagggctttaaggcacaggctgttgaagcattttctcagaggagtggatctgtagaagtctgtctttctatagaaatattgtgcttactcaagtgttaaattattttttctatgaactagtctacttcttaaaattcaaacatattcttttgatcacattgtttcttgagcatcctgccctgctactaacttttcaacaaggcaaaatggagtaaagtggcaatttctttagatgagtgaaataccctcaagtctcttttctgcccaaaaagggaaaagtgatagaaatgggggtggcaagtggggtgagtggatgaaggtgggtattgggggtggctgtgaaagaaaataatggagaatcacttttctagacatctacctatacttaatctaagaaacaaagtaatctactgtaaagtactctgccccttgaaagaagtattaaaaagagtgaggatggatttagaaaaaaacatgaatttagaaatattcaaaatggtttttgtggcagattcaatattatgaattcacagatatttaaagaatgagaaacatagtaattagtagaaatgccagaaacagttcctggttcctcttgtgtttgacactaagaaaatagcaagagtgtgaaatctcagatacttatgaaatctcacagatgtaaggactcaagtgtagaagaaaatatccccttcttacaaaaagaaatgtcaatttatggagtttgtgggaaatagggcaagaattcttatgcttatgagagccaagtagtcagtggaagagagtagagctcaaaactggattatcaccttagcaacttagaatagtttgaaatagaaaaaaagtatttaatttggatctggatctgttaagatatgcacagtctattttttgtatagtattggaaaataaaaatgctataatttgggtatgggttcttttgtatacattacctgcccattgaggaaaggggcaagtccattatgcaacttctctccaaacccttcatattctggatatgatacttaaagagccatgagcagctacattctgcctatcagaaggcatttattaaatgactgcttgctgaagatgtgtccaaagagatcctacattaaggtcatttgtcagaatgatgtttgtgtttgtttagagttggctgacctccaactcctggggtcaaggaatcctactgccttagcttcccaaatagctaggactataggcatgcacccggccatgtgttttatttatagctcttaaagcccagatgaagaaatcacatttttgcccatagtgaagaaacatttggccattgattagtccttattttcagtgactgtcctgttttcattagattagagagaccctgtgtgggccacagttaatataaaccattatcacttttaagtaaacctgcacatcttagatttcataatttccttattgttctgactcaaaatgaactaagagcttttcactttttgtttgtaagttctcagagagtcgggtctgcaagtgcttttgcctgccaggattttgtactcaaataaatgctatttggcaacta

SEQ ID NO: 68284 - DNA, 4072 bp, Homo sapiens
aggtggttgggtgacgccccaggaaagcgctccaggccgagggcgggcggcgccgccgcgcccgacgcctctgggggtggggacttcgcgggagtcgccggcggaggcgaggaggagctctgcgcggcgcggcgggcgatccgagccgggacgggctgcaggcgggggtgctgcagaggacacgaggcggcgggctggagacatggaccgcggcgagcaaggtctgctgagaacagacccagtccctgaggaaggagaagatgttgctgccacgatcagtgccacagagaccctctcggaagaggagcaggaagagctaagaagagaacttgcaaaggtagaagaagaaatccagactctgtctcaagtgttagcagcaaaagagaagcatctagcagagatcaagcggaaacttggaatcaattctctacaggaactaaaacagaacattgccaaagggtggcaagacgtgacagcaacatctgcgaggagcaagcttctagcagcagaaaccgaactgctctgtcttctgtattgagagccatctgcagagctgttacaagaagacatctgaaaccttatcccaggctggacagaaggcctcagctgctttttcgtctgttggctcagtcatcaccaaaaagctggaagatgtaaaaaactccccaacttttaaatcatttgaagaaaaggtcgaaaacttaaagtctaaagtagggggaaccaagcctgctggtggtgattttggagaagtcttgaattcggctgcaaatgctagtgccaccaccacggagcctcttccagaaaagacacaggagagcctgtgagattcctacctttgttctgctacccactgccagatgctgcaagcgaggtccaagcacatcttgtcaacatgcattgccatgaatttctaccagatgtgcttttatttagctttacatattcctttgaccaaatagtttgtgggttaaacaaaatgaaaatatcttcacctctattcttgggaaacaccctttagtgtacatttatgttcctttatttaggaaacaccattataaaaacacttatagtaaatggggacattcactataatgatctaagaagctacagattgtcatagttgttttcctgctttacaaaattgctccagatctggaatgccagtttgacctttgtcttctataatatttcctttttttcccctctttgaatctctgtatatttgattcttaactaaaattgttctcttaaatattctgaatcctggtaattaaaagtttgggtgtattttctttacctccaaggaaagaactactagctacaaaaaatattttggaataagcattgttttggtataaggtacatattttggttgaagacaccagactgaagtaaacagctgtgcatccaatttattatagttttgtaagtaacaatatgtaatcaaacttctaggtgacttgagagtggaacctcctatatcattatttagcaccgtttgtgacagtaaccatttcagtgtattgtttattataccacttatatcaacttatttttcaccaggttaaaattttaatttctacaaaataacattctgaatcaagcacactgtatgttcagtaggttgaactatgaacactgtcatcaatgttcagttcaaaagcctgaaagtttagatctagaagctggtaaaaatgacaatatcaatcacattaggggaaccattgttgtcttcacttaatccatttagcactatttaaaataagcacaccaagttatatgactaatataacttgaaaattttttatactgaggggttggtgataactcttgaggatgtaatgcattaataaaaatcaactcatcattttctacttgttttcaatgtgttggaaactgtaaaatgatactgtagaacctgtctcctactttgaaaactgaatgtcagggctgagtgaatcaaagtgtctagacatatttgcatagaggccaaggtattctattctaataactgcttactcaacactaccaccttttccttatactgtatatgattatggcctacaatgttgtatttgttatttattaaattgtgattgttttattattgtttatgccaaatgttaactgccaagcttggagtgacctaaagcattttttaaaagcatggctagatttacttcagtataaattatcttatgaaaaccaaattttaaaagccacaggtgttgattgttataaaataacatgctgccattcttgattgctagagtttttgttagtactttggatgcaattaaaactatgtgctatcacatgtgaaaagcttaataaattccatctatcagtagtataggtctcaatatttattatgagaccagtggtctggaaacagcttgttgtaccgaatcaactggagtctatgcttaaaaaaaaaaaatttttttttaaccatccttaaattattgcttaatggtatcatattaacatattctaaataagggctttaaggcacaggctgttgaagcattttctcagaggagtggatctgtagaagtctgtctttctatagaaatattgtgcttactcaagtgttaaattattttttctatgaactagtctacttcttaaaattcaaacatattcttttgatcacattgtttcttgagcatcctgccctgctactaacttttcaacaaggcaaaatggagtaaagtggcaatttctttagatgagtgaaataccctcaagtctcttttctgcccaaaaagggaaaagtgatagaaatgggggtggcaagtggggtgagtggatgaaggtgggtattgggggtggctgtgaaagaaaataatggagaatcacttttctagacatctacctatacttaatctaagaaacaaagtaatctactgtaaagtactctgccccttgaaagaagtattaaaaagagtgaggatggatttagaaaaaaacatgaatttagaaatattcaaaatggtttttgtggcagattcaatattatgaattcacagatatttaaagaatgagaaacatagtaattagtagaaatgccagaaacagttcctggttcctcttgtgtttgacactaagaaaatagcaagagtgtgaaatctcagatacttatgaaatctcacagatgtaaggactcaagtgtagaagaaaatatccccttcttacaaaaagaaatgtcaatttatggagtttgtgggaaatagggcaagaattcttatgcttatgagagccaagtagtcagtggaagagagtagagctcaaaactggattatcaccttagcaacttagaatagtttgaaatagaaaaaaagtatttaatttggatctggatctgttaagatatgcacagtctattttttgtatagtattggaaaataaaaatgctataatttgggtatgggttcttttgtatacattacctgcccattgaggaaaggggcaagtccattatgcaacttctctccaaacccttcatattctggatatgatacttaaagagccatgagcagctacattctgcctatcagaaggcatttattaaatgactgcttgctgaagatgtgtccaaagagatcctacattaaggtcatttgtcagaatgatgtttgtgtttgtttagagttggctgacctccaactcctggggtcaaggaatcctactgccttagcttcccaaatagctaggactataggcatgcacccggccatgtgttttatttatagctcttaaagcccagatgaagaaatcacatttttgcccatagtgaagaaacatttggccattgattagtccttattttcagtgactgtcctgttttcattagattagagagaccctgtgtgggccacagttaatataaaccattatcacttttaagtaaacctgcacatcttagatttcataatttccttattgttctgactcaaaatgaactaagagcttttcactttttgtttgtaagttctcagagagtcgggtctgcaagtgcttttgcctgccaggattttgtactcaaataaatgctatttggcaacta

SEQ ID NO: 68285 - DNA, 2017 bp, Homo sapiens
  misc_feature (1841)..(1842): n is a, c, g, or t
  misc_feature (1844)..(1844): n is a, c, g, or t
  misc_feature (1850)..(1850): n is a, c, g, or t
aggtggttgggtgacgccccaggaaagcgctccaggccgagggcgggcggcgccgccgcgcccgacgcctctgggggtggggacttcgcgggagtcgccggcggaggcgaggaggagctctgcgcggcgcggcgggcgatccgagccgggacgggctgcaggcgggggtgctgcagaggacacgaggcggcgggctggagacatggaccgcggcgagcaaggtctgctgagaacagacccagtccctgaggaaggagaagatgttgctgccacgatcagtgccacagagaccctctcggaagaggagcaggaagagctaagaagagaacttgcaaaggtagaagaagaaatccagactctgtctcaagtgttagcagcaaaagagaagcatctagcagagatcaagcggaaacttggaatcaattctctacaggaactaaaacagaacattgccaaagggtggcaagacgtgacagcaacatctgcttacaagaagacatctgaaaccttatcccaggctggacagaaggcctcagctgctttttcgtctgttggctcagtcatcaccaaaaagctggaagatgtaaaaaactccccaacttttaaatcatttgaagaaaaggtcgaaaacttaaagtctaaagtagggggaaccaagcctgctggtggtgattttggagaagtcttgaattcggctgcaaatgctagtgccaccaccacggagcctcttccagaaaagacacaggagagcctgtgagattcctacctttgttctgctacccactgccagatgctgcaagcgaggtccaagcacatcttgtcaacatgcattgccatgaatttctaccagatgtgcttttatttagctttacatattcctttgaccaaatagtttgtgggttaaacaaaatgaaaatatcttcacctctattcttgggaaacaccctttagtgtacatttatgttcctttatttaggaaacaccattataaaaacacttatagtaaatggggacattcactataatgatctaagaagctacagattgtcatagttgttttcctgctttacaaaattgctccagatctggaatgccagtttgacctttgtcttctataatatttcctttttttcccctctttgaatctctgtatatttgattcttaactaaaattgttctcttaaatattctgaatcctggtaattaaaagtttgggtgtattttctttacctccaaggaaagaactactagctacaaaaaatattttggaataagcattgttttggtataaggtacatattttggttgaagacaccagactgaagtaaacagctgtgcatccaatttattatagttttgtaagtaacaatatgtaatcaaacttctaggtgacttgagagtggaacctcctatatcattatttagcaccgtttgtgacagtaaccatttcagtgtattgtttattataccacttatatcaacttatttttcaccaggttaaaattttaatttctacaaaataacattctgaatcaagcacactgtatgttcagtaggttgaactatgaacactgtcatcaatgttcagttcaaaagcctgaaagtttagatctagaagctggtaaaaatgacaatatcaatcacattaggggaaccattgttgtcttcacttaatccatttagcactatttaaaataagcacaccaagttatatgactaatataacttgaaaattttttatactgaggggttggtgataactcttgaggatgtaatgcattaataaaaatcaactcatcattttctacttgttttcaatgtgttggaaactgtaatgtttnngnaactgntctaattgaaatgatgccgggggtgatgaaggtaatttggtgaggaggttcatttataaggtttaaacacttttatgttgttgggagggtggttcaaggggggtggaagaggaggggggaaaggatataaaaacggggggggtggttgacaaaaaaaatagaacgca

SEQ ID NO: 68286 - DNA, 1434 bp, Homo sapiens
aggtggttgggtgacgccccaggaaagcgctccaggccgagggcgggcggcgccgccgcgcccgacgcctctgggggtggggacttcgcgggagtcgccggcggaggcgaggaggagctctgcgcggcgcggcgggcgatccgagccgggacgggctgcaggcgggggtgctgcagaggacacgaggcggcgggctggagacatggaccgcggcgagcaaggtctgctgagaacagacccagtccctgaggaaggagaagatgttgctgccacgatcagtgccacagagaccctctcggaagaggagcaggaagagctaagaagagaacttgcaaaggtagaagaagaaatccagactctgtctcaagtgttagcagcaaaagagaagcatctagcagagatcaagcggaaacttggaatcaattctctacaggaactaaaacagaacattgccaaagggtggcaagacgtgacagcaacatctgcttacaagaagacatctgaaaccttatcccaggctggacagaaggcctcagctgctttttcgtctgttggctcagtcatcaccaaaaagctggaagatgtaaaaaactccccaacttttaaatcatttgaagaaaaggtcgaaaacttaaagtctaaagtagggggaaccaagcctgctggtggtgattttggagaagtcttgaattcggctgcaaatgctagtgccaccaccacggagcctcttccagaaaagacacaggagagcctgtgagattcctacctttgttctgctacccactgccagatgctgcaagcgaggtccaagcacatcttgtcaacatgcattgccatgaatttctaccagatgtgcttttatttagctttacatattcctttgaccaaatagtttgtgggttaaacaaaatgaaaatatcttcacctctattcttgggaaacaccctttagtgtacatttatgttcctttatttaggaaacaccattataaaaacacttatagtaaatggggacattcactataatgatctaagaagctacagattgtcatagttgttttcctgctttacaaaattgctccagatctggaatgccagtttgacctttgtcttctataatatttcctttttttcccctctttgaatctctgtatatttgattcttaactaaaattgttctcttaaatattctgaatcctggtaattaaaagtttgggtgtattttctttacctccaaggaaagaactactagctacaaaaaatattttggaataagcattgttttggtataaggtacatattttggttgaagacaccagactgaagtaaacagctgtgcatccaatttattatagttttgtaagtaacaatatggtatctgtacacgtaacccattcaggggtatgggtattattccaactttattaactttttg

SEQ ID NO: 68287 - DNA, 1322 bp, Homo sapiens
aggtggttgggtgacgccccaggaaagcgctccaggccgagggcgggcggcgccgccgcgcccgacgcctctgggggtggggacttcgcgggagtcgccggcggaggcgaggaggagctctgcgcggcgcggcgggcgatccgagccgggacgggctgcaggcgggggtgctgcagaggacacgaggcggcgggctggagacatggaccgcggcgagcaaggtctgctgagaacagacccagtccctgaggaaggagaagatgttgctgccacgatcagtgccacagagaccctctcggaagaggagcaggaagagctaagaagagaacttgcaaaggtagaagaagaaatccagactctgtctcaagtgttagcagcaaaagagaagcatctagcagagatcaagcggaaacttggaatcaattctctacaggaactaaaacagaacattgccaaagggtggcaagacgtgacagcaacatctgcttacaagaagacatctgaaaccttatcccaggctggacagaaggcctcagctgctttttcgtctgttggctcagtcatcaccaaaaagctggaagatgtaaaattgcaagccttttcacattcctttagtatacgttccattcagcattcaattagcatgcctgctatgagaaactccccaacttttaaatcatttgaagaaaaggtcgaaaacttaaagtctaaagtagggggaaccaagcctgctggtggtgattttggagaagtcttgaattcggctgcaaatgctagtgccaccaccacggagcctcttccagaaaagacacaggagagcctgcccacccttcctccattctgagcacataaaaaccccacactcagccagactcaacactcatcaggacaacctgcctgcagaaaggaccactttgggtctcctgagtgctgttctgtcattcaataacgctcctctctgccttgctcaccctacggttgtccatgtgacttcattcttcctggacacaggacaagaactcaggacctgctgaacagcgggagcaaaaggaactgtaacatgttcctggctggcttgccaagctggggcggtgacacgctcccagactgcaggagagaagagtggtgacccttctggggacccagaccttgggattccctgagccagagctgctataacattatagccttcccacctttcaccggcaccagacagctgccccacatgacaggaggcagcagcagagccaggccagctgaggagccatgggctggagtggggtggtgggactgaaagagctgtaacacaaacgggctgaaac

SEQ ID NO: 68288 - DNA, 655 bp, Homo sapiens
aggtggttgggtgacgccccaggaaagcgctccaggccgagggcgggcggcgccgccgcgcccgacgcctctgggggtggggacttcgcgggagtcgccggcggaggcgaggaggagctctgcgcggcgcggcgggcgatccgagccgggacgggctgcaggcgggggtgctgcagaggacacgaggcggcgggctggagacatggaccgcggcgagcaaggtctgctgagaacagacccagtccctgaggaaggagaagatgttgctgccacgatcagtgccacagagaccctctcggaagaggagcaggaagagctaagaagagaacttgcaaaggtagaagaagaaatccagactctgtctcaagtgttagcagcaaaagagaagcatctagcagagatcaagcggaaacttggaatcaattctctacaggaactaaaacagaacattgccaaagggtggcaagacgtgacagcaacatctgcttacaagaagacatctgaaaccttatcccaggctggacagaaggcctcagctgctttttcgtctgttggctcagtcatcaccaaaaagctggaagatgtaaagtatgtcctcatttttccttgctcattaagtagctgacgcaaattaaaatgttattgttgttgcatc

SEQ ID NO: 68289 - DNA, 890 bp, Homo sapiens
tgggtccagtgtttgttcctaggtgtctgctgcgataaaatgaggttgtctgtagtatttaaggagaaaagagataagttattacttaataatctcacatactgaatactagtcaaacaagtttttaaatgtttctttgggtcttcatttgatgcattgactttaatttccctatacaggaaatgattggaatagaattaaaaggagtccaacattcccagctccccagttctaagaaacttttgtcaaacccaataggtttgggacacttctgtttagaattgaaagctgccagctaacagtaattcttccatagttgacttgaacttctgatgcttttattgcccagttttctctggtgggtccagtgttttgttcctaggtgtctgctgcgataaaatgaggttgtctgtagtatttaaggagaaaagagataagttttttttaattaagcaattccatttgattgaaaaaaatcaacaaaaaataaacaccgtttactcttaaaaaaaaaacaaaaaaaacaaacaacaaaacagagacccgaccaaggaaaaaaaacagaacgacaacccacaagagggggggcgcacagcataaaaaaacacccccgcgggggcgggccaaccaaacgaaagggcgccgaccccatatagtgtagaagacgaggggcgcaccacaagggagcgaccaaataaacaggcaggcgggcggccggcaataataaccgccggagcctggagaaacagaacacgacgccgagctcagcaggagaggcacccatcgaggggggacacgctgggcagcaccatgacagaaagagccggggtaaccaaggctgtcaatgagaacccgccactgtgcggacgaaaacgcccgagattcggaca

SEQ ID NO: 68290 - DNA, 824 bp, Homo sapiens
  misc_feature (679)..(679): n is a, c, g, or t
agttcggcatagaatttgggccaataaagggtgaatacaatgccacagagagcacagagccatgaaccctgttctttacctgaagcaccaagtaaaaaaaatcataaaaagaggctccccacttattgcagcactggcggcccaaaataatgataaaactgtgaagctgtggaaagtcagcgagcgtgataagaggccagaaggctacaatctgaaagatgaggagggccggctccgggatcctgccaccatcacaaccctgcgggagcctgacctgagacccatggacctaaggggcggcgcccccccacaaaaagtattcgccaacacaaaagagtaaaacgtccgcctccaaagctcggtagcagcgcactctgaagcctacgtggcccgttgacgaacctgaaggatagaccaagggaactccgaaataagcccagagagaggcgacagagatgtcacctaaaaagcagtcccgaagtcgagggagctaagccaccgcgggcataaaacgggtgaacacgggcccggaaaggagatacgacgaacgaaaaaggaaaggcaccagagtgaccacggtaacaaggagagagaacgcccgactccgggcatgacgatgccaaaacgcacaccaagcgggaatagtgtcgagcagtgtcgcgggttaggagaagtctgncacgagatgtagcagctgtcagtagaagggcagccttgaaagtcacggacatagaaggagcacagaagacgacgcaaaggaaatgggaagagcagaacaacgaatagagcacagccagagaccaagtagagggaaatcaatgccg

SEQ ID NO: 68291 - DNA, 3469 bp, Homo sapiens
cgctgccggagccgccctcccgtgggaccagcaccctcattccggccagcaagcctgaatcctgtccctgccatctcgccactgcagctcgggtccagaaaggcaccattttgtcgcggctgcccgctctcccagggggaggagggatcttttttgcattttggagcggctgccaaggaggggaacctgttgggcatctccccagacccgcttgtgagcgcctccggggcgggcgggcgggaccagacccctcggggcacggcgtatcttggcacccggaggcagcggaggcaggcgcagcatcctcgctgggaactggagctggagtgagcgcaccgcgcgggaggagccgccgcagcctcgcagaacccgagtggaggaggtgacagctccattgccgggtttttattttttttctctccgcctccccgtctcctcctcaggctcggaccatggtgcagtcccactggctcccctgcccccctctcctgtgagactggctgcggggagggatcatggatacttgtctgccggcttctggttcccacgcaagtaagcctgctgtcaatggaggaggacattgatacccgcaaaatcaacaacagtttcctgcgcgaccacagctatgcgaccgaagctgacattatctctacggtagaattcaaccacacgggagaattactagcgacaggggacaaggggggtcgggttgtaatatttcaacgagagcaggagagtaaaaatcaggttcatcgtaggggtgaatacaatgtttacagcacattccagagccatgaacccgagttcgattacctgaagagtttagaaatagaagaaaaaatcaataaaataagatggctcccccagcagaatgcagcttactttcttctgtctactaatgataaaactgtgaagctgtggaaagtcagcgagcgtgataagaggccagaaggctacaatctgaaagatgaggagggccggctccgggatcctgccaccatcacaaccctgcgggtgcctgtcctgagacccatggacctgatggtggaggccaccccacgaagagtatttgccaacgcacacacatatcacatcaactccatatctgtcaacagcgactatgaaacctacatgtccgctgatgacctgaggattaacctatggaactttgaaataaccaatcaaagttttaatattgtggacattaagccagccaacatggaggagctcacggaggtgatcacagcagccgagttccacccccatcattgcaacaccttcgtgtacagcagcagcaaagggacaatccggctgtgtgacatgcgggcatctgccctgtgtgacaggcacaccaaattttttgaagagccggaagatccaagcaacagatcatttttctctgaaattatctcttcgatttcggatgtgaagttcagccacagtgggaggtatatcatgaccagggactacttgaccgtcaaagtctgggatctcaacatggaaaaccgccccatcgagacttaccaggttcatgactacctccgcagcaagctgtgttccctctatgaaaatgactgcatttttgataaatttgagtgtgtgtggaatgggtcagacagtgtcatcatgacaggctcctacaacaacttcttcaggatgttcgacagaaacaccaagcgtgatgtgacccttgaggcttcgagggaaaacagcaagccccgggctatcctcaaaccccgaaaagtgtgtgtggggggcaagcggagaaaagacgagatcagtgtcgacagtctggactttagcaaaaagatcttgcatacagcttggcatccttcagaaaatattatagcagtggcggctacaaataacctatatatattccaggacaaggttaactaggtggacaagttattacttaataatctcacatactgaatactagtcaaacaagtttttaaatgtttctttgggtcttcatttgatgcattgactttaatttccctatacaggaaatgattggaatagaattaaaaggagtccaacattcccagctccccagttctaagaaacttttgtcaaacccaataggtttgggacacttctgtttagaattgaaagctgccagctaacagtaattcttccatagttgacttgaacttctgatgcttttattgcccagttttctctggtgggtccagtgttttgttcctaggtgtctgctgcgataaaatgaggttgtctgtagtatttaaggagaaaagagataagttttttttaattaagcaattccatttgattgaaaaaaatcaacaaaaaataaacaccgtttactcttagacaaattcttcttgttttgtgaaaaaccagaactagtcagtatctcctgcccctccaccatttttttttccattttccattttcctttgaacaatttcatttaagccagagatttattgcatgaagctgagaagaggatgcagaatgacaaggaaagggcacatcaaccctgctatgctctttttttgtaagctccatagaaacagcctgagaatttggctagggaacttgaatgcttcaggggacagaaagagagcactttcgacacagtgcttcccagagtgagcttggcagggccaggcggggccaaattccatctgctgccttgttactcttgctttttgtgctcttaaatggctccatataatcttctacttacatgttccttggcttttttctcttcaaccttttccagcttatttattccattgacttctaaaggccgagtcctgggtgcttattatctggtgttctaaatgaagcagtaagttggaagcagtgccaccacccctgagtccctgagaaaggctggtctgttctttttgggtgtttctcctaagcagcaccctcccctcctcctggttttggtaaccaaaagtaacaatccatcaacctccattgtacctagaacaaaaatagccaataaaaacgctgagttgtgaagtccaatcaggcacttctaactcaccccaagctcgccatctggaaaaacagaccagaaggcttctcttctacagaaatgaactgtggggaaatcaagcagctgtgacatgaagtgaatgaagtccacttgaagctgtggaagatggttcatccttttccccagttgaggatccagatttataacttctagaaagccatttccagaaggttctatgtggcacacccctaggaaaggcactaaatgcatgcaaaggatttataaacttaggaaagtagatgggtggagtccagaaaactggttctgggttaatatctctacatctgtcttgatgactcatttctcctaactcccatttagtgcagggtaaatggtttgagatgagagtttttcaatgaaagggaaattttctttcagtttacagatgtattagaagtcctgactttcaagtgtaatttgctttggaggagg

SEQ ID NO: 68292 - DNA, 2170 bp, Homo sapiens
agcgggcaagtccttcgtaaccactccaggacgctgccaggcctgagaagggacaaactccaattgctccagttcaaactggtcctggcctggtcaaacggaggagacagagcagtgattcacagcaggacgtggtacttgcagactgaccgtcctctcaggactcactagggtctcttctctgacgagatgatacctggaattgggacactcacccaggacacactatggtgcttcagccaagtgaaaggcactatcgagattggaaccacagaaggctcggaccatggtgcagtcccactggctcccctgcccccctctcctgtgagactggctgcggggagggatcatggatacttgtctgccggcttctggttcccacgcaagtaagcctgctgtcaatggaggaggacattgatacccgcaaaatcaacaacagtttcctgcgcgaccacagctatgcgaccgaagctgacattatctctacggtagaattcaaccacacgggagaattactagcgacaggggacaaggggggtcgggttgtaatatttcaacgagagcaggagagtaaaaatcaggttcatcgtaggggtgaatacaatgtttacagcacattccagagccatgaacccgagttcgattacctgaagagtttagaaatagaagaaaaaatcaataaaataagatggctcccccagcagaatgcagcttactttcttctgtctactaatgataaaactgtgaagctgtggaaagtcagcgagcgtgataagaggccagaaggctacaatctgaaagatgaggagggccggctccgggatcctgccaccatcacaaccctgcgggtgcctgtcctgagacccatggacctgatggtggaggccaccccacgaagagtatttgccaacgcacacacatatcacatcaactccatatctgtcaacagcgactatgaaacctacatgtccgctgatgacctgaggattaacctatggaactttgaaataaccaatcaaagttttaatattgtggacattaagccagccaacatggaggagctcacggaggtgatcacagcagccgagttccacccccatcattgcaacaccttcgtgtacagcagcagcaaagggacaatccggctgtgtgacatgcgggcatctgccctgtgtgacaggcacaccaaattttttgaagagccggaagatccaagcaacagatcatttttctctgaaattatctcttcgatttcggatgtgaagttcagccacagtgggaggtatatcatgaccagggactacttgaccgtcaaagtctgggatctcaacatggaaaaccgccccatcgagacttaccaggttcatgactacctccgcagcaagctgtgttccctctatgaaaatgactgcatttttgataaatttgagtgtgtgtggaatgggtcagacagtgtcatcatgacaggctcctacaacaacttcttcaggatgttcgacagaaacaccaagcgtgatgtgacccttgaggcttcgagggaaaacagcaagccccgggctatcctcaaaccccgaaaagtgtgtgtggggggcaagcggagaaaagacgagatcagtgtcgacagtctggactttagcaaaaagatcttgcatacagcttggcatccttcagaaaatattatagcagtggcggctacaaataacctatatatattccaggacaaggttaactaggtggacaagttattacttaataatctcacatactgaatactagtcaaacaagtttttaaatgtttctttgggtcttcatttgatgcattgactttaatttccctatacaggaaatgattggaatagaattaaaaggagtccaacattcccagctccccagttctaagaaacttttgtcaaacccaataggtttgggacacttctgtttagaattgaaagctgccagctaacagtaattcttccatagttgacttgaacttctgatgcttttattgcccagttttctctggtgggtccagtgttttgttcctaggtgtctgctgcgataaaatgaggttgtctgtagtatttaaggagaaaagagataagttttttttaattaagcaattccatttgattgaaaaaaatcaacaaaaaataaacaccgtttactctta

SEQ ID NO: 68293 - DNA, 2283 bp, Homo sapiens
ggacgcgtgggtcgacccacgcgatcagcaaatcctgttcagaggagcttcagccaatgaagaggctatatcccggcttgcttgggggcttctgagtttgagctgcatgcagaaatgtaaggcagtgcttcctggcgctgatggcaaaatgggacccatctccagttattcctcgggcaccccagctttgcaaatctgggaaagaacctacataaacatattggtgatgtagccagcttaaaaggccgagagaatccttatggattcaggagactgtttttttatttagatttttattttttatttggaagatgaaatgcttctctcgttacctgccttacatcttcagacctccgaacaccatcctttcttccagctgccacacagaaggctcggaccatggtgcagtcccactggctcccctgcccccctctcctgtgagactggctgcggggagggatcatggatacttgtctgccggcttctggttcccacgcaagtaagcctgctgtcaatggaggaggacattgatacccgcaaaatcaacaacagtttcctgcgcgaccacagctatgcgaccgaagctgacattatctctacggtagaattcaaccacacgggagaattactagcgacaggggacaaggggggtcgggttgtaatatttcaacgagagcaggagagtaaaaatcaggttcatcgtaggggtgaatacaatgtttacagcacattccagagccatgaacccgagttcgattacctgaagagtttagaaatagaagaaaaaatcaataaaataagatggctcccccagcagaatgcagcttactttcttctgtctactaatgataaaactgtgaagctgtggaaagtcagcgagcgtgataagaggccagaaggctacaatctgaaagatgaggagggccggctccgggatcctgccaccatcacaaccctgcgggtgcctgtcctgagacccatggacctgatggtggaggccaccccacgaagagtatttgccaacgcacacacatatcacatcaactccatatctgtcaacagcgactatgaaacctacatgtccgctgatgacctgaggattaacctatggaactttgaaataaccaatcaaagttttaatattgtggacattaagccagccaacatggaggagctcacggaggtgatcacagcagccgagttccacccccatcattgcaacaccttcgtgtacagcagcagcaaagggacaatccggctgtgtgacatgcgggcatctgccctgtgtgacaggcacaccaaattttttgaagagccggaagatccaagcaacagatcatttttctctgaaattatctcttcgatttcggatgtgaagttcagccacagtgggaggtatatcatgaccagggactacttgaccgtcaaagtctgggatctcaacatggaaaaccgccccatcgagacttaccaggttcatgactacctccgcagcaagctgtgttccctctatgaaaatgactgcatttttgataaatttgagtgtgtgtggaatgggtcagacagtgtcatcatgacaggctcctacaacaacttcttcaggatgttcgacagaaacaccaagcgtgatgtgacccttgaggcttcgagggaaaacagcaagccccgggctatcctcaaaccccgaaaagtgtgtgtggggggcaagcggagaaaagacgagatcagtgtcgacagtctggactttagcaaaaagatcttgcatacagcttggcatccttcagaaaatattatagcagtggcggctacaaataacctatatatattccaggacaaggttaactaggtggacaagttattacttaataatctcacatactgaatactagtcaaacaagtttttaaatgtttctttgggtcttcatttgatgcattgactttaatttccctatacaggaaatgattggaatagaattaaaaggagtccaacattcccagctccccagttctaagaaacttttgtcaaacccaataggtttgggacacttctgtttagaattgaaagctgccagctaacagtaattcttccatagttgacttgaacttctgatgcttttattgcccagttttctctggtgggtccagtgttttgttcctaggtgtctgctgcgataaaatgaggttgtctgtagtatttaaggagaaaagagataagttttttttaattaagcaattccatttgattgaaaaaaatcaacaaaaaataaacaccgtttactctta

SEQ ID NO: 68294 - DNA, 1996 bp, Homo sapiens
agcgggcaagtccttcgtaaccactccaggacgctgccaggcctgagaagggacaaactccaattgctccagttcaaactggtcctggcctggtcaaacggaggagacagagcagtgattcacagcaggacgtggaattgggacactcacccaggacacactatggtgcttcagccaagtgaaaggcactatcgagattggaaccacagaaggagccaagggagaacccaagacagagaatagtggcccaataatgaagcatgaattatccagatgaaaacacctatggaaataaagctgacattatctctacggtagaattcaaccacacgggagaattactagcgacaggggacaaggggggtcgggttgtaatatttcaacgagagcaggagagtaaaaatcaggttcatcgtaggggtgaatacaatgtttacagcacattccagagccatgaacccgagttcgattacctgaagagtttagaaatagaagaaaaaatcaataaaataagatggctcccccagcagaatgcagcttactttcttctgtctactaatgataaaactgtgaagctgtggaaagtcagcgagcgtgataagaggccagaaggctacaatctgaaagatgaggagggccggctccgggatcctgccaccatcacaaccctgcgggtgcctgtcctgagacccatggacctgatggtggaggccaccccacgaagagtatttgccaacgcacacacatatcacatcaactccatatctgtcaacagcgactatgaaacctacatgtccgctgatgacctgaggattaacctatggaactttgaaataaccaatcaaagttttaatattgtggacattaagccagccaacatggaggagctcacggaggtgatcacagcagccgagttccacccccatcattgcaacaccttcgtgtacagcagcagcaaagggacaatccggctgtgtgacatgcgggcatctgccctgtgtgacaggcacaccaaattttttgaagagccggaagatccaagcaacagatcatttttctctgaaattatctcttcgatttcggatgtgaagttcagccacagtgggaggtatatcatgaccagggactacttgaccgtcaaagtctgggatctcaacatggaaaaccgccccatcgagacttaccaggttcatgactacctccgcagcaagctgtgttccctctatgaaaatgactgcatttttgataaatttgagtgtgtgtggaatgggtcagacagtgtcatcatgacaggctcctacaacaacttcttcaggatgttcgacagaaacaccaagcgtgatgtgacccttgaggcttcgagggaaaacagcaagccccgggctatcctcaaaccccgaaaagtgtgtgtggggggcaagcggagaaaagacgagatcagtgtcgacagtctggactttagcaaaaagatcttgcatacagcttggcatccttcagaaaatattatagcagtggcggctacaaataacctatatatattccaggacaaggttaactaggtggacaagttattacttaataatctcacatactgaatactagtcaaacaagtttttaaatgtttctttgggtcttcatttgatgcattgactttaatttccctatacaggaaatgattggaatagaattaaaaggagtccaacattcccagctccccagttctaagaaacttttgtcaaacccaataggtttgggacacttctgtttagaattgaaagctgccagctaacagtaattcttccatagttgacttgaacttctgatgcttttattgcccagttttctctggtgggtccagtgttttgttcctaggtgtctgctgcgataaaatgaggttgtctgtagtatttaaggagaaaagagataagttttttttaattaagcaattccatttgattgaaaaaaatcaacaaaaaataaacaccgtttactctta

SEQ ID NO: 68295 - DNA, 1991 bp, Homo sapiens
tgtggagtctaggatgttgaagagagctgggaggagatgccaagaacactaggctgcttcctaccatctagcttacagtccaacatgtgagtaacaccaatacaaatgaaaagccatcaaatgtgtccaatagtgaatatcatcccggcagtctctgagctaggagggagagtcctggagaggtgtttattttctgatataaaaaaggagccaagggagaacccaagacagagaatagtggcccaataatgaagcatgaattatccagatgaaaacacctatggaaataaagctgacattatctctacggtagaattcaaccacacgggagaattactagcgacaggggacaaggggggtcgggttgtaatatttcaacgagagcaggagagtaaaaatcaggttcatcgtaggggtgaatacaatgtttacagcacattccagagccatgaacccgagttcgattacctgaagagtttagaaatagaagaaaaaatcaataaaataagatggctcccccagcagaatgcagcttactttcttctgtctactaatgataaaactgtgaagctgtggaaagtcagcgagcgtgataagaggccagaaggctacaatctgaaagatgaggagggccggctccgggatcctgccaccatcacaaccctgcgggtgcctgtcctgagacccatggacctgatggtggaggccaccccacgaagagtatttgccaacgcacacacatatcacatcaactccatatctgtcaacagcgactatgaaacctacatgtccgctgatgacctgaggattaacctatggaactttgaaataaccaatcaaagttttaatattgtggacattaagccagccaacatggaggagctcacggaggtgatcacagcagccgagttccacccccatcattgcaacaccttcgtgtacagcagcagcaaagggacaatccggctgtgtgacatgcgggcatctgccctgtgtgacaggcacaccaaattttttgaagagccggaagatccaagcaacagatcatttttctctgaaattatctcttcgatttcggatgtgaagttcagccacagtgggaggtatatcatgaccagggactacttgaccgtcaaagtctgggatctcaacatggaaaaccgccccatcgagacttaccaggttcatgactacctccgcagcaagctgtgttccctctatgaaaatgactgcatttttgataaatttgagtgtgtgtggaatgggtcagacagtgtcatcatgacaggctcctacaacaacttcttcaggatgttcgacagaaacaccaagcgtgatgtgacccttgaggcttcgagggaaaacagcaagccccgggctatcctcaaaccccgaaaagtgtgtgtggggggcaagcggagaaaagacgagatcagtgtcgacagtctggactttagcaaaaagatcttgcatacagcttggcatccttcagaaaatattatagcagtggcggctacaaataacctatatatattccaggacaaggttaactaggtggacaagttattacttaataatctcacatactgaatactagtcaaacaagtttttaaatgtttctttgggtcttcatttgatgcattgactttaatttccctatacaggaaatgattggaatagaattaaaaggagtccaacattcccagctccccagttctaagaaacttttgtcaaacccaataggtttgggacacttctgtttagaattgaaagctgccagctaacagtaattcttccatagttgacttgaacttctgatgcttttattgcccagttttctctggtgggtccagtgttttgttcctaggtgtctgctgcgataaaatgaggttgtctgtagtatttaaggagaaaagagataagttttttttaattaagcaattccatttgattgaaaaaaatcaacaaaaaataaacaccgtttactctta

SEQ ID NO: 68296 - DNA, 780 bp, Homo sapiens
cgctgccggagccgccctcccgtgggaccagcaccctcattccggccagcaagcctgaatcctgtccctgccatctcgccactgcagctcgggtccagaaaggcaccattttgtcgcggctgcccgctctcccagggggaggagggatcttttttgcattttggagcggctgccaaggaggggaacctgttgggcatctccccagacccgcttgtgagcgcctccggggcgggcgggcgggaccagacccctcggggcacggcgtatttggcatccttcagaaaatattatagcagtggcggctacaaataacctatatatattccaggacaaggttaactaggtggacaagttattacttaataatctcacatactgaatactagtcaaacaagtttttaaatgtttctttgggtcttcatttgatgcattgactttaatttccctatacaggaaatgattggaatagaattaaaaggagtccaacattcccagctccccagttctaagaaacttttgtcaaacccaataggtttgggacacttctgtttagaattgaaagctgccagctaacagtaattcttccatagttgacttgaacttctgatgcttttattgcccagttttctctggtgggtccagtgttttgttcctaggtgtctgctgcgataaaatgaggttgtctgtagtatttaaggagaaaagagataagttttttttaattaagcaattccatttgattgaaaaaaatcaacaaaaaataaacaccgtttactctta

SEQ ID NO: 68297 - DNA, 1981 bp, Homo sapiens
aatgcaccagccgcctcgcagcagcagcagcagcagcagcagcagcagcagcagcagcagctgcgagtgcgcgcgtgtgggtgtgagggctcggaccatggtgcagtcccactggctcccctgcccccctctcctgtgagactggctgcggggagggatcatggatacttgtctgccggcttctggttcccacgcaagtaagcctgctgtcaatggaggaggacattgatacccgcaaaatcaacaacagtttcctgcgcgaccacagctatgcgaccgaagctgacattatctctacggtagaattcaaccacacgggagaattactagcgacaggggacaaggggggtcgggttgtaatatttcaacgagagcaggagagtaaaaatcaggttcatcgtaggggtgaatacaatgtttacagcacattccagagccatgaacccgagttcgattacctgaagagtttagaaatagaagaaaaaatcaataaaataagatggctcccccagcagaatgcagcttactttcttctgtctactaatgataaaactgtgaagctgtggaaagtcagcgagcgtgataagaggccagaaggctacaatctgaaagatgaggagggccggctccgggatcctgccaccatcacaaccctgcgggtgcctgtcctgagacccatggacctgatggtggaggccaccccacgaagagtatttgccaacgcacacacatatcacatcaactccatatctgtcaacagcgactatgaaacctacatgtccgctgatgacctgaggattaacctatggaactttgaaataaccaatcaaagttttaatattgtggacattaagccagccaacatggaggagctcacggaggtgatcacagcagccgagttccacccccatcattgcaacaccttcgtgtacagcagcagcaaagggacaatccggctgtgtgacatgcgggcatctgccctgtgtgacaggcacaccaaattttttgaagagccggaagatccaagcaacagatcatttttctctgaaattatctcttcgatttcggatgtgaagttcagccacagtgggaggtatatcatgaccagggactacttgaccgtcaaagtctgggatctcaacatggaaaaccgccccatcgagacttaccaggttcatgactacctccgcagcaagctgtgttccctctatgaaaatgactgcatttttgataaatttgagtgtgtgtggaatgggtcagacagtgtcatcatgacaggctcctacaacaacttcttcaggatgttcgacagaaacaccaagcgtgatgtgacccttgaggcttcgagggaaaacagcaagccccgggctatcctcaaaccccgaaaagtgtgtgtggggggcaagcggagaaaagacgagatcagtgtcgacagtctggactttagcaaaaagatcttgcatacagcttggcatccttcagaaaatattatagcagtggcggctacaaataacctatatatattccaggacaaggttaactaggtggacaagttattacttaataatctcacatactgaatactagtcaaacaagtttttaaatgtttctttgggtcttcatttgatgcattgactttaatttccctatacaggaaatgattggaatagaattaaaaggagtccaacattcccagctccccagttctaagaaacttttgtcaaacccaataggtttgggacacttctgtttagaattgaaagctgccagctaacagtaattcttccatagttgacttgaacttctgatgcttttattgcccagttttctctggtgggtccagtgttttgttcctaggtgtctgctgcgataaaatgaggttgtctgtagtatttaaggagaaaagagataagttttttttaattaagcaattccatttgattgaaaaaaatcaacaaaaaataaacaccgtttactctta

SEQ ID NO: 68298 - DNA, 1942 bp, Homo sapiens
cgctgccggagccgccctcccgtgggaccagcaccctcattccggccaggctcggaccatggtgcagtcccactggctcccctgcccccctctcctgtgagactggctgcggggagggatcatggatacttgtctgccggcttctggttcccacgcaagtaagcctgctgtcaatggaggaggacattgatacccgcaaaatcaacaacagtttcctgcgcgaccacagctatgcgaccgaagctgacattatctctacggtagaattcaaccacacgggagaattactagcgacaggggacaaggggggtcgggttgtaatatttcaacgagagcaggagagtaaaaatcaggttcatcgtaggggtgaatacaatgtttacagcacattccagagccatgaacccgagttcgattacctgaagagtttagaaatagaagaaaaaatcaataaaataagatggctcccccagcagaatgcagcttactttcttctgtctactaatgataaaactgtgaagctgtggaaagtcagcgagcgtgataagaggccagaaggctacaatctgaaagatgaggagggccggctccgggatcctgccaccatcacaaccctgcgggtgcctgtcctgagacccatggacctgatggtggaggccaccccacgaagagtatttgccaacgcacacacatatcacatcaactccatatctgtcaacagcgactatgaaacctacatgtccgctgatgacctgaggattaacctatggaactttgaaataaccaatcaaagttttaatattgtggacattaagccagccaacatggaggagctcacggaggtgatcacagcagccgagttccacccccatcattgcaacaccttcgtgtacagcagcagcaaagggacaatccggctgtgtgacatgcgggcatctgccctgtgtgacaggcacaccaaattttttgaagagccggaagatccaagcaacagatcatttttctctgaaattatctcttcgatttcggatgtgaagttcagccacagtgggaggtatatcatgaccagggactacttgaccgtcaaagtctgggatctcaacatggaaaaccgccccatcgagacttaccaggttcatgactacctccgcagcaagctgtgttccctctatgaaaatgactgcatttttgataaatttgagtgtgtgtggaatgggtcagacagtgtcatcatgacaggctcctacaacaacttcttcaggatgttcgacagaaacaccaagcgtgatgtgacccttgaggcttcgagggaaaacagcaagccccgggctatcctcaaaccccgaaaagtgtgtgtggggggcaagcggagaaaagacgagatcagtgtcgacagtctggactttagcaaaaagatcttgcatacagcttggcatccttcagaaaatattatagcagtggcggctacaaataacctatatatattccaggacaaggttaactaggtggacaagttattacttaataatctcacatactgaatactagtcaaacaagtttttaaatgtttctttgggtcttcatttgatgcattgactttaatttccctatacaggaaatgattggaatagaattaaaaggagtccaacattcccagctccccagttctaagaaacttttgtcaaacccaataggtttgggacacttctgtttagaattgaaagctgccagctaacagtaattcttccatagttgacttgaacttctgatgcttttattgcccagttttctctggtgggtccagtgttttgttcctaggtgtctgctgcgataaaatgaggttgtctgtagtatttaaggagaaaagagataagttttttttaattaagcaattccatttgattgaaaaaaatcaacaaaaaataaacaccgtttactctta

SEQ ID NO: 68299 - DNA, 2089 bp, Homo sapiens
ggacgcgtgggtcgacccacgcgatcagcaaatcctgttcagaggagcttcagccaatgaagaggctatatcccggcttgcttgggggcttctgagtttgagctgcatgcagaaatgtaaggcagtgcttcctggcgctgatggcaaaatgggacccatctccagttattcctcgggcaccccagctttgcaaatctgggaaagaacctacataaacatattggtgatgtagccagcttaaaaggccgagagaatccttatggattcaggagactgtttttttatttagatttttattttttatttggaagatgaaatgcttctctcgttacctgccttacatcttcagacctccgaacaccatcctttcttccagctgccacacagaagctgacattatctctacggtagaattcaaccacacgggagaattactagcgacaggggacaaggggggtcgggttgtaatatttcaacgagagcaggagagtaaaaatcaggttcatcgtaggggtgaatacaatgtttacagcacattccagagccatgaacccgagttcgattacctgaagagtttagaaatagaagaaaaaatcaataaaataagatggctcccccagcagaatgcagcttactttcttctgtctactaatgataaaactgtgaagctgtggaaagtcagcgagcgtgataagaggccagaaggctacaatctgaaagatgaggagggccggctccgggatcctgccaccatcacaaccctgcgggtgcctgtcctgagacccatggacctgatggtggaggccaccccacgaagagtatttgccaacgcacacacatatcacatcaactccatatctgtcaacagcgactatgaaacctacatgtccgctgatgacctgaggattaacctatggaactttgaaataaccaatcaaagttttaatattgtggacattaagccagccaacatggaggagctcacggaggtgatcacagcagccgagttccacccccatcattgcaacaccttcgtgtacagcagcagcaaagggacaatccggctgtgtgacatgcgggcatctgccctgtgtgacaggcacaccaaattttttgaagagccggaagatccaagcaacagatcatttttctctgaaattatctcttcgatttcggatgtgaagttcagccacagtgggaggtatatcatgaccagggactacttgaccgtcaaagtctgggatctcaacatggaaaaccgccccatcgagacttaccaggttcatgactacctccgcagcaagctgtgttccctctatgaaaatgactgcatttttgataaatttgagtgtgtgtggaatgggtcagacagtgtcatcatgacaggctcctacaacaacttcttcaggatgttcgacagaaacaccaagcgtgatgtgacccttgaggcttcgagggaaaacagcaagccccgggctatcctcaaaccccgaaaagtgtgtgtggggggcaagcggagaaaagacgagatcagtgtcgacagtctggactttagcaaaaagatcttgcatacagcttggcatccttcagaaaatattatagcagtggcggctacaaataacctatatatattccaggacaaggttaactaggtggacaagttattacttaataatctcacatactgaatactagtcaaacaagtttttaaatgtttctttgggtcttcatttgatgcattgactttaatttccctatacaggaaatgattggaatagaattaaaaggagtccaacattcccagctccccagttctaagaaacttttgtcaaacccaataggtttgggacacttctgtttagaattgaaagctgccagctaacagtaattcttccatagttgacttgaacttctgatgcttttattgcccagttttctctggtgggtccagtgttttgttcctaggtgtctgctgcgataaaatgaggttgtctgtagtatttaaggagaaaagagataagttttttttaattaagcaattccatttgattgaaaaaaatcaacaaaaaataaacaccgtttactctta

SEQ ID NO: 68300 - DNA, 1983 bp, Homo sapiens
agcgggcaagtccttcgtaaccactccaggacgctgccaggcctgagaagggacaaactccaattgctccagttcaaactggtcctggcctggtcaaacggaggagacagagcagtgattcacagcaggacgtggaattgggacactcacccaggacacactatggtgcttcagccaagtgaaaggcactatcgagattggaaccacagaagatgtgccttgcttccccttcgccttctgccatgattgtaagtttcctgagacctccccagccatgcagaactctgacattatctctacggtagaattcaaccacacgggagaattactagcgacaggggacaaggggggtcgggttgtaatatttcaacgagagcaggagagtaaaaatcaggttcatcgtaggggtgaatacaatgtttacagcacattccagagccatgaacccgagttcgattacctgaagagtttagaaatagaagaaaaaatcaataaaataagatggctcccccagcagaatgcagcttactttcttctgtctactaatgataaaactgtgaagctgtggaaagtcagcgagcgtgataagaggccagaaggctacaatctgaaagatgaggagggccggctccgggatcctgccaccatcacaaccctgcgggtgcctgtcctgagacccatggacctgatggtggaggccaccccacgaagagtatttgccaacgcacacacatatcacatcaactccatatctgtcaacagcgactatgaaacctacatgtccgctgatgacctgaggattaacctatggaactttgaaataaccaatcaaagttttaatattgtggacattaagccagccaacatggaggagctcacggaggtgatcacagcagccgagttccacccccatcattgcaacaccttcgtgtacagcagcagcaaagggacaatccggctgtgtgacatgcgggcatctgccctgtgtgacaggcacaccaaattttttgaagagccggaagatccaagcaacagatcatttttctctgaaattatctcttcgatttcggatgtgaagttcagccacagtgggaggtatatcatgaccagggactacttgaccgtcaaagtctgggatctcaacatggaaaaccgccccatcgagacttaccaggttcatgactacctccgcagcaagctgtgttccctctatgaaaatgactgcatttttgataaatttgagtgtgtgtggaatgggtcagacagtgtcatcatgacaggctcctacaacaacttcttcaggatgttcgacagaaacaccaagcgtgatgtgacccttgaggcttcgagggaaaacagcaagccccgggctatcctcaaaccccgaaaagtgtgtgtggggggcaagcggagaaaagacgagatcagtgtcgacagtctggactttagcaaaaagatcttgcatacagcttggcatccttcagaaaatattatagcagtggcggctacaaataacctatatatattccaggacaaggttaactaggtggacaagttattacttaataatctcacatactgaatactagtcaaacaagtttttaaatgtttctttgggtcttcatttgatgcattgactttaatttccctatacaggaaatgattggaatagaattaaaaggagtccaacattcccagctccccagttctaagaaacttttgtcaaacccaataggtttgggacacttctgtttagaattgaaagctgccagctaacagtaattcttccatagttgacttgaacttctgatgcttttattgcccagttttctctggtgggtccagtgttttgttcctaggtgtctgctgcgataaaatgaggttgtctgtagtatttaaggagaaaagagataagttttttttaattaagcaattccatttgattgaaaaaaatcaacaaaaaataaacaccgtttactctta

SEQ ID NO: 68301 - DNA, 1207 bp, Homo sapiens
gagggagagcaaattcgcgcacctgatgtctgcttaagctacctgctagactgagactttctgcgaagccggcgtgtctgcgagcagcactcgctaaggctctgcgtttaacagacactacctttgggaaggcgcttatcacaaaaagtccctgcccttctcgcgggctcggggcgcaaacctgacaaatcgggcagccttcttgagagtgcagaaatgctctgcgtacccagcaaatacattctctccttcccaccactctgtgcaaaccctcacgccgcggctttgtgtctgtactttagccaaaacgcagaagcttatggccaccctccactcctcacccctcatccctcaccacctgcctttcaattctcggaacgagcgacgtgacacaagaggtcccaagggagcaaacctgaaagccagagcctcctgaatacacaaactgccggtgggccagatgacattagacactcctgagatacgagaagcatcacttccttcagacagagtcggtgagactatgatgtaatgagagttctccctgtgttcctcaggaaggcagcttgtgcctttctacttgaggcatcatctttgatggctaaagaattctgcagcttggccagcgcggtggcttacgcctgtaatcccaacactttgggaggccgaagcgagaggatcacttgaggtcaggaattcgagaccagcctggacaacataatgagaaatcgtctctacaaaaaaaaaaaaaaaaaaaaaaaaaaaaccacctaaaaattagctggatttggtggcgcatgtctgtagtcccagctacttgggaggctgaggtgggagaatcgcttgagcgtgggagatcacggctgcagtgatcaagccactccactccagcctgggcgacagagcaagcccctgtctcaataataataacaattttgcagcctgattgttaacgaatgttactagttacaaacttgtaataatgtggtgaagataatacctagttaatgtctgctggggtggggcaataagcttctatgtgctttacatgcataacctaaatatctcccccaaaatcctctaaaatagctatcattttctccgtttttacaaatgagcaaattttaaagcttaaaccttagagaaacttttctaagttcatatacttgggaaataaaggcaacaatttcattggaacataggtctg

SEQ ID NO: 68302 - DNA, 893 bp, Homo sapiens
agcagaccctaagggcccaggccgggccggacgccaaggcgaggcccgggacgcccttggagaacgagcgacgtgacacaagaggtcccaagggagcaaacctgaaagccagagcctcctgaatacacaaactgccggtgggccagatgacattagacactcctgagatacgagaagcatcacttccttcagacagagtcggtgagactatgatgtaatgagagttctccctgtgttcctcaggaaggcagcttgtgcctttctacttgaggcatcatctttgatggctaaagaattctgcagcttggccagcgcggtggcttacgcctgtaatcccaacactttgggaggccgaagcgagaggatcacttgaggtcaggaattcgagaccagcctggacaacataatgagaaatcgtctctacaaaaaaaaaaaaaaaaaaaaaaaaaaaaccacctaaaaattagctggatttggtggcgcatgtctgtagtcccagctacttgggaggctgaggtgggagaatcgcttgagcgtgggagatcacggctgcagtgatcaagccactccactccagcctgggcgacagagcaagcccctgtctcaataataataacaattttgcagcctgattgttaacgaatgttactagttacaaacttgtaataatgtggtgaagataatacctagttaatgtctgctggggtggggcaataagcttctatgtgctttacatgcataacctaaatatctcccccaaaatcctctaaaatagctatcattttctccgtttttacaaatgagcaaattttaaagcttaaaccttagagaaacttttctaagttcatatacttgggaaataaaggcaacaatttcattggaacataggtctg

SEQ ID NO: 68303 - DNA, 897 bp, Homo sapiens
ggcgtgctcccaggcttagaaacaaacgagcgacgtgacacaagaggtcccaagggagcaaacctgaaagccagagcctcctgaatacacaaactgccggtgggccagatgacattagacactcctgagatacgagaagcatcacttccttcagacagagtcgggtcttgctctctcacccaggctggagtagagtgacaatgaccactgcagcctccacctcctaggctcaagtgatcctcctgcttcagcacccccacaccaggcaacataacaagacccccatctctacaaaaaattaaaaaagaattatcaggtcagatcctggcagcagctgcagcggctctccttgccatctccttttcacttctggaaacatgggctcccatgtggctgtctttgatgatgtcatcaaggtgttcagtgacatgaaagtgtgcaagtcttcaacactagaaaaggtgaagaagcgcaagaagttgctgctcttctgcctgagtgagtacaagaagtacatcatccttgcggaggccaagaagatcctggtaagtaatgtggaccaaaccattgatgatccctatgccacttttgtcaagatgctgacagtaaggactgccgctacgccccttatgacgccaccaaggacagcaagaagaaggacctggtgtttatcttctgggcctctgagtctgcatccattaagagcaaaatgatctatgccagctccaaagacgtcatcaagaagcagctaggggtcagcactgtcgtcttcttggagggcaaactttgtgatcccctccagcgcccttcctggagaatctactagtcccagacctgccctcagggattgcaggctgcccccttcctgccagactggagggcctgggggaatcccag

SEQ ID NO: 68304 - DNA, 299 bp, Homo sapiens
  misc_feature (135)..(135): n is a, c, g, or t
  misc_feature (223)..(223): n is a, c, g, or t
  misc_feature (242)..(242): n is a, c, g, or t
  misc_feature (249)..(249): n is a, c, g, or t
  misc_feature (271)..(271): n is a, c, g, or t
  misc_feature (273)..(273): n is a, c, g, or t
aaggagacaaagagtagatatggtatcttggggacaaatggcacatgaaagcagatttggtgcttctttggtaaatggtttgataaccaatccctaggagataaagttaatgtgtcttttttttttttttttaancgaaggtcccttactggtcctgcttccatgagtagccgtgaccaggggaaaagggagagtttttttttttttttttttgagaaagagnctcactctgtcgcccaggntggagtntagtggcatgatctcggctcantncagcctctgcctcccaggttcaagcg

SEQ ID NO: 68305 - DNA, 5255 bp, Homo sapiens
  misc_feature (1896)..(1896): n is a, c, g, or t
gagcggagtgcggtccgcagcagccgcagctcgggggcggtgcctgccttgcagcctcccctcggcgatcgcgcagccccatctttgtccggcctccgcgctttgttctcggcgcccgggccttggccagcctggccagccgccgagcagcccccacgccgcgctggcgtcgtcctcgcctccctcgccgccgccccccgcgcgctggccgggccttgccccccatggtgtcccggccagagcccgagggcgaggccatggacgccgagctggcggtagcgccgccgggctgctcgcacctgggcagcttcaaggtggacaactggaagcagaacctgcgggccatctaccagtgcttcgtgtggagcggcacggctgaggcccgcaagcgcaaggccaagtcctgtatctgccatgtctgtggcgtccacctcaacaggctgcattcctgcctctactgtgtcttcttcggctgtttcacaaagaagcatattcacgagcatgcgaaggcgaagcggcacaacctggccattgatctgatgtatggaggcatctactgttttctgtgccaggactacatctatgacaaagacatggaaataatcgccaaggaggagcagcgaaaagcttggaaaatgcaaggcgttggagagaagttttcaacttgggaaccaaccaaacgggagcttgaactgctgaagcacaacccgaaaaggagaaagatcacctcgaactgcaccataggtctgcgtgggctgatcaaccttgggaacacatgcttcatgaactgcatcgtgcaggccctgacccacacgccacttctgcgggacttcttcctgtctgacaggcaccgctgtgagatgcagagccccagctcctgtctggtctgtgagatgtcctcactgtttcaggagttttactctggacaccggtcccctcacatcccgtataagttgctgcacctggtgtggacccacgcgaggcacctagcaggctacgagcagcaggacgcccacgagttcctcatcgcggccctggacgtgctccaccgacactgcaaaggtgatgacaatgggaagaaggccaacaaccccaaccactgcaactgcatcatagaccagatcttcacaggcgggttgcagtcagacgtcacctgccaagtctgccatggagtctccaccaccatcgaccccttctgggacatcagcttggatctccccggctcttccaccccattctggcccctgagcccagggagcgagggcaacgtggtaaacggggaaagccacgtgtcgggaaccaccacgctcacggactgcctgcgacgattcaccagaccagagcacttgggcagcagcgccaagatcaagtgcagcggttgccatagctaccaggagtccacaaagcagctcactatgaagaaactgcccatcgtagcctgttttcatctcaaacgatttgaacactcagccaagctgcggcggaagatcaccacgtatgtgtccttccccctggagctggacatgacccctttcatggcctccagcaaagagagcaggatgaatggacagtaccagcagcccacggacagtctcaacaatgacaacaagtattccctgtttgctgttgttaaccatcaagggaccttggagagtggccactacaccagctttatccggcagcacaaagaccagtggttcaagtgtgacgatgccatcatcaccaaggccagcatcaaggacgtcctggacagcgaagggtacttgctgttctatcacaaacagttcctggaatacgagtagccttatctgcagctggtcagaaaaacaaaggcaatgcattggcaagcctcacaaagtgatcctccctggccccccccctcccccaagcctcccnccgcctccccggcctggtgacaccacctcccatgcagatgtggcccctctgcacctgggacccatcgggtcgggatggaccacacggacggggaggctcctggagctgctttgaagatggatgagatgaggggtgtgctctgggtgggaggagcagcgtacacccgtcaccagaacatctcttgtgtcatgacatgggggtgcaacgggggcctcacagcacagagtgaccgctgcctggcgttccccagcactcggtgtggaaaggcccctacctgctgtaagattatgggtccatgaaagcagtaagctggacacagaggtgtagtgtgcgggacagagggccttgcagatgcctttctgttggtgttttagtgttaaaatacggagagtatggaactcttcacctccattttctcagcggctgtgaagcagcctcctagcttcggaagtacggacactacgtcgcgttttcaagcgtgtctgttctgcaggtaacagcatcaagctgcacgtggaagcatctcgcggttttctagaaacaggcattttcttatccctctcccgctcctttttccacaaaggtgaatttcataaatgtaatactagtaaagtgaatgaattactgagtttatacagaaatttaggtaacttctcctttagtctcaagagcgagtcttgctttttaatgggtgccgtttatgttgctgcccgccctgtgtgcctggctcctctgggtgccttggtgtctgctggtggctggcagtgggcgcagcggaggagagttgtgctgcagctcatacggtgtgtctgtcatctcagtctggagtaaatgcagtgtctgccggtgtctgatgggttctgtccctcgtattttctttgccttctatcccattgcctggctaccgctgcctggcagccaagggtgttggtcgcgaagctggagtggcctctggtggagcctgcatcttgtctcgtctgcctctgctttacatttggtgtactttcgggcgtggtggcagtaaaatgacaccgtgattgagcttgtcagcagagctgaaagagaaagtagaaggatgtgcattgtttcttgtaagatatcttgcatgtatctgtgtattcaaattcaaacagagatggtttgtccatttgtccactgagaaattataaactagggacaagggggaggaaaagtactgaaatacagtttatgaagcaagtgtgtctcgggctgtgcttgtcccaggagccccagcagcatctgaactgaggcttcttcagtcctgcaggaacaggatcatctgtctcagcggtgggcagatgttttcatagacagccagggagtaaacactgttggctctgtgggctgtatggtctctgccataaatagtacagagatgtggctgtgtctagtacaacttttagacacagaaatctgaatgacatatattgttctgtgtcaagaaacttagattttttttttaactatttaaaaacgtgaaacctattcttagctcacaggccatggagaagctggtggggaccagacccagctccttagctggctgggctggggagggggcagtgacagtggcagctgctactcactgctcagtgtggaaaacacaggacttggcaatcacagcccgcagaaccatcatgtgtggcagaagcctgagggatgcggtttcttgcccacgtgctctgttcattttctgttgtttttctgcacttaaagaattcacatggaagcatgttttataaaatgaattaccagagaaacagagatgggccgagattctcagaaatggtcccatgtgaccaagttctgctgtttgggtgacagtgctttgaagatctcctttgaggatgtgcagtcttttttttttttttttttgagatggagtttgttgcccaggctggagtgagtggcacagtctcggctcactgcaacctccacctcctgggttcaagcagttctcgtgccgcagcctcccaagtagctgggactacaggcatgcgccaccacgccaggctaatttttgtatttttagtagagatggggtttcaccatgtctcaaactcctgacctcaggcgatccacccacctcagcgtcccaaagtgctgggattataggcgtgagccaccgcacctggcctatgagtggtcttttaattaggaacaaatctaatggaaaggagagttgactgaagttggcccacaggattgtgagctgggcagtgccttcatgaaggcttgccaccttgggacgccccagtttactggggtgtcttgcggagtgcagaaggctttctggcagctgcctgggtttggccagaccctgcctcccctcccgccggccaacccctagtccccttcctgtctccacttgcattcaggggtggctgctgttctgagaacattagaactgggaagagagatggagtcacatggatttttggtgggcattattctgaactttcgtatccaagttagtcccccttattccactgtggcattgccgttctaagcagttacctgatgcctgctgctgaagagctgctcacaggaggcggcggcggccctggcactgccccttgcattaggtcttgtgtttgatgtgttcttgtgaatttactttgtcagaacaaaatatttacgcgttgggttcaggaatttcttttagctccccatctggctgtgaaattcaggaaacctcccgttgcctagtaatcaccccatgtaggtgtacattgtgacaaagtgcatctgaccactaaggggcccccttggtgaccccagcacattcacagcagtgttaaaatggcctgcattttggagatgctggctggcctttcagtgcctcccaggaagacacatggcctttccctcttcagatgcctgaagggagtgctttgaggcaggtgatgtgctgggagtgtgggcggcctccctctggccccggggccctctgtggaccttggctccctccgtggacctgggcttcgtggtgagcactgcagcctccctgggcattccctccagcgccagcaccactgcaacatatagacctgagtgctattgtattttggcttggtgtgtatgctcttcattgtgtaaaattgctgttcttttgacaatttaagtgattgttttgtttactgtaagtttgaaaataaaaatgaagaaaaaaattccaatgactgtgctgtggttggagactttatttaccaagatgtttactcttcctttccccttccattttgaggagctgtgtcactcctcctcccccccagtgctttgtagtctctcctatgtcataataaagctacattttctctgagaaaaaaaaacagttt

SEQ ID NO: 68306 - DNA, 1082 bp, Homo sapiens
cggctaggtagcgaggctgggtgttggcccatgagtttatcctcctcccaagtccctcagtgactgtgatggtctccagactgggaagtccttgcttgaggagcgcccctcgccttccgagttcacacacacccctccccagggccaccttgggagccaggacacgttgggtgtgagcactgctgctcttgctcctgccccatcccacctgagtgtcactgtgacaaagggcacagcggggaagggatgtgggaacggcttccaccccgggttgcctctggagctgggtgggtgtcagtcctcacagccattgttttccctctgcttccagtggagtctccaccaccatcgaccccttctgggacatcagcttggatctccccggctcttccaccccattctggcccctgagcccagggagcgagggcaacgtggtaaacggggaaagccacgtgtcgggaaccaccacgctcacggactgcctgcgacgattcaccagaccagagcacttgggcagcagcgccaagatcaagtgcagcggttgccatagctaccaggagtccacaaagcagctcactatgaagaaactgcccatcgtagcctgttttcatctcaaacgatttgaacactcagccaagctgcggcggaagatcaccacgtatgtgtccttccccctggagctggacatgacccctttcatggcctccaggtatgtggggttgtaggcccgttctgtgtcctgaggggctgtgatcctatcaggacaggaatccagctcggagctcctattaagatgactgttggccgggtgcagtggctcccgcctgtaatcccagcacttcaggaggtcgaagcgggcagatcatgaggtcaacagattgagaccatcatggccaacatggtgaaaccccgtctctactaaaaatacaaaaattagctgggtgtggtggcaggcacctgtagtcccagctatttgggaggctgaggcaggagaatcgcttgaacccgggaggtggaggttgcagtgagccaagatcgcgccactgcactccagcctggtgacagaacgagactacgtctaa

SEQ ID NO: 68307 - DNA, 993 bp, Homo sapiens
ggggaggggaggaaaccaaacgggcctaggagcgaggcctggggtggcgcagaaatttaggtaacttctcctttagtctcaagagcgagtcttgctttttaatgggtgccgtttatgttgctgcccgccctgtgtgcctggctcctctgggtgccttggtgtctgctggtggctggcagtgggcgcagcggaggagagttgtgctgcagctcatacggtgtgtctgtcatctcagtctggagtaaatgcagtgtctgccggtgtctgatgggttctgtccctcgtattttctttgccttctatcccattgcctggctaccgctgcctggcagccaagggtgttggtcgcgaagctggagtggcctctggtggagcctgcatcttgtctcgtctgcctctgctttacatttggtgtactttcgggcgtggtggcagtaaaatgacaccgtgattgagcttgtcagcagagctgaaagagaaagtagaaggatgtgcattgtttcttgtaagatatcttgcatgtatctgtgtattcaaattcaaacagagatggtttgtccatttgtccactgagaaattataaactagggacaagggggaggaaaagtactgaaatacagtttatgaagcaagtgtgtctcgggctgtgcttgtcccaggagccccagcagcatctgaactgaggcttcttcagtcctgcaggaacaggatcatctgtctcagcggtgggcagatgttttcatagacagccagggagtaaacactgttggctctgtgggctgtatggtctctgccataaatagtacagagatgtggctgtgtctagtacaacttttagacacagaaatctgaatgacatatattgttctgtgtcaagaaacttagatttttttactatttaaaaagttgaccaatttcacccactgggaggtcagcgcaaaggctaacccgggggcttagaccagaacccagctcaccgcgaaaggacctcaa

SEQ ID NO: 68308 - DNA, 960 bp, Homo sapiens
tgaagatgtcgagctccacaggctgcgtgcgatcatacgattctctgttacatgttctttgtttcatttcaccaccctttaaacatggaaaacgcccattcctagcttgctggctggaatgggtgactcctgatctaggcaaaggactgtcttctgtctggtgaaaggaacaatttgttcatttttgctgccatgggccacggatctttgttttgttttctgtgctttgctgggtttgctgtaagattactttttgtacccttggtgttaccactgaacagtcccatcatttgaagacttgaaccctgtaaatgaggacttgggtggattgccactgtgtttttgaatctgtaattctagatgtagctacaaggcagttcaataaaatacaaaagagataacacagacacctgtcatcagaagaaggccctgaagcttccagtgacatttctgatcttctttcctcttccctctgtccccttcctatttctgcagcgatttgaacactcagccaagctgcggcggaagatcaccacgtatgtgtccttccccctggagctggacatgacccctttcatggcctccaggtatgtggggttgtaggcccgttctgtgtcctgaggggctgtgatcctatcaggacaggaatccagctcggagctcctattaagatgactgttggccgggtgcagtggctcccgcctgtaatcccagcacttcaggaggtcgaagcgggcagatcatgaggtcaacagattgagaccatcatggccaacatggtgaaaccccgtctctactaaaaatacaaaaattagctgggtgtggtggcaggcacctgtagtcccagctatttgggaggctgaggcaggagaatcgcttgaacccgggaggtggaggttgcagtgagccaagatcgcgccactgcactccagcctggtgacagaacgagactacgtctaa

SEQ ID NO: 68309 - DNA, 375 bp, Homo sapiens
tcggtacccttgaaatgggcacagaaatttaggtaacttctcctttagtctcaagagcgagtcttgctttttaatgggtgccgtttatgttgctgcccgccctgtgtgcctggctcctctgggtgccttggtgtctgctggtggctggcagtgggcgcagcggaggagagttgtgctgcagctcatacggtgtgtctgtcatctcagtctggagtaaatgcagtgtctgccggtgtctgatgggttctgtccctcgtattttctttgccttctatcccaaggatacatgcactcctcaatcagttctcagatgattctgcctctaagagcagcagaaactacaggtaatcatctccgggcttactgatttcgtga

SEQ ID NO: 68310 - DNA, 408 bp, Homo sapiens
cgtacccagaagactgaagactgcatagccgttaacactgatacgatggccgacaaccccaaccactgcaactgcatcatagaccagatcttcacaggcgggttgcagtcagacgtcacctgccaagtctgccagtaagtgagaggctgcgtgctcggcaatatcaaaccctctggggccgtactgacatcctcccagtctccagagctgtgtgtgctctgagaggtctttaaggaggctacgagataaatgattaatagacgccatgagagcgaaggttgtggggtgggggtgcttcctcttggggaggtcgtagggcaggtgtcccctcgggatgcgagcccttcgtgttgaggtcttggctgttgtctacagccagcagtgtgttcttggaagcttcccctacca

SEQ ID NO: 68311 - DNA, 313 bp, Homo sapiens
tcttgcatctcccttaccgctcctgtcttttttgaacgcctgtagattcaccagaccagagcacttgggcagcagcgccaagatcaagtgcagcggttgccatagctaccaggagtccacaaagcagctcactatgaagaaactgcccatcgtagcctgttttcatctcaaagtaagttttccagaaagccaactctaatggcagacttagtttttagtccacagtacggtcctcagccttttggtttgctgtgcagttacattttttataattgcagcaagcaggaagaacaccgaggaagggagggtgtga

SEQ ID NO: 68312 - DNA, 4920 bp, Homo sapiens
  misc_feature (1561)..(1561): n is a, c, g, or t
tgccctgctgcctggggagcctgggacttcggtgggcggtcccgggcgttcctgcgcgaggccaagtcctgtatctgccatgtctgtggcgtccacctcaacaggctgcattcctgcctctactgtgtcttcttcggctgtttcacaaagaagcatattcacgagcatgcgaaggcgaagcggcacaacctggccattgatctgatgtatggaggcatctactgttttctgtgccaggactacatctatgacaaagacatggaaataatcgccaaggaggagcagcgaaaagcttggaaaatgcaaggcgttggagagaagttttcaacttgggaaccaaccaaacgggagcttgaactgctgaagcacaacccgaaaaggagaaagatcacctcgaactgcaccataggtctgcgtgggctgatcaaccttgggaacacatgcttcatgaactgcatcgtgcaggccctgacccacacgccacttctgcgggacttcttcctgtctgacaggcaccgctgtgagatgcagagccccagctcctgtctggtctgtgagatgtcctcactgtttcaggagttttactctggacaccggtcccctcacatcccgtataagttgctgcacctggtgtggacccacgcgaggcacctagcaggctacgagcagcaggacgcccacgagttcctcatcgcggccctggacgtgctccaccgacactgcaaaggtgatgacaatgggaagaaggccaacaaccccaaccactgcaactgcatcatagaccagatcttcacaggcgggttgcagtcagacgtcacctgccaagtctgccatggagtctccaccaccatcgaccccttctgggacatcagcttggatctccccggctcttccaccccattctggcccctgagcccagggagcgagggcaacgtggtaaacggggaaagccacgtgtcgggaaccaccacgctcacggactgcctgcgacgattcaccagaccagagcacttgggcagcagcgccaagatcaagtgcagcggttgccatagctaccaggagtccacaaagcagctcactatgaagaaactgcccatcgtagcctgttttcatctcaaacgatttgaacactcagccaagctgcggcggaagatcaccacgtatgtgtccttccccctggagctggacatgacccctttcatggcctccagcaaagagagcaggatgaatggacagtaccagcagcccacggacagtctcaacaatgacaacaagtattccctgtttgctgttgttaaccatcaagggaccttggagagtggccactacaccagctttatccggcagcacaaagaccagtggttcaagtgtgacgatgccatcatcaccaaggccagcatcaaggacgtcctggacagcgaagggtacttgctgttctatcacaaacagttcctggaatacgagtagccttatctgcagctggtcagaaaaacaaaggcaatgcattggcaagcctcacaaagtgatcctccctggccccccccctcccccaagcctcccnccgcctccccggcctggtgacaccacctcccatgcagatgtggcccctctgcacctgggacccatcgggtcgggatggaccacacggacggggaggctcctggagctgctttgaagatggatgagatgaggggtgtgctctgggtgggaggagcagcgtacacccgtcaccagaacatctcttgtgtcatgacatgggggtgcaacgggggcctcacagcacagagtgaccgctgcctggcgttccccagcactcggtgtggaaaggcccctacctgctgtaagattatgggtccatgaaagcagtaagctggacacagaggtgtagtgtgcgggacagagggccttgcagatgcctttctgttggtgttttagtgttaaaatacggagagtatggaactcttcacctccattttctcagcggctgtgaagcagcctcctagcttcggaagtacggacactacgtcgcgttttcaagcgtgtctgttctgcaggtaacagcatcaagctgcacgtggaagcatctcgcggttttctagaaacaggcattttcttatccctctcccgctcctttttccacaaaggtgaatttcataaatgtaatactagtaaagtgaatgaattactgagtttatacagaaatttaggtaacttctcctttagtctcaagagcgagtcttgctttttaatgggtgccgtttatgttgctgcccgccctgtgtgcctggctcctctgggtgccttggtgtctgctggtggctggcagtgggcgcagcggaggagagttgtgctgcagctcatacggtgtgtctgtcatctcagtctggagtaaatgcagtgtctgccggtgtctgatgggttctgtccctcgtattttctttgccttctatcccattgcctggctaccgctgcctggcagccaagggtgttggtcgcgaagctggagtggcctctggtggagcctgcatcttgtctcgtctgcctctgctttacatttggtgtactttcgggcgtggtggcagtaaaatgacaccgtgattgagcttgtcagcagagctgaaagagaaagtagaaggatgtgcattgtttcttgtaagatatcttgcatgtatctgtgtattcaaattcaaacagagatggtttgtccatttgtccactgagaaattataaactagggacaagggggaggaaaagtactgaaatacagtttatgaagcaagtgtgtctcgggctgtgcttgtcccaggagccccagcagcatctgaactgaggcttcttcagtcctgcaggaacaggatcatctgtctcagcggtgggcagatgttttcatagacagccagggagtaaacactgttggctctgtgggctgtatggtctctgccataaatagtacagagatgtggctgtgtctagtacaacttttagacacagaaatctgaatgacatatattgttctgtgtcaagaaacttagattttttttttaactatttaaaaacgtgaaacctattcttagctcacaggccatggagaagctggtggggaccagacccagctccttagctggctgggctggggagggggcagtgacagtggcagctgctactcactgctcagtgtggaaaacacaggacttggcaatcacagcccgcagaaccatcatgtgtggcagaagcctgagggatgcggtttcttgcccacgtgctctgttcattttctgttgtttttctgcacttaaagaattcacatggaagcatgttttataaaatgaattaccagagaaacagagatgggccgagattctcagaaatggtcccatgtgaccaagttctgctgtttgggtgacagtgctttgaagatctcctttgaggatgtgcagtcttttttttttttttttttgagatggagtttgttgcccaggctggagtgagtggcacagtctcggctcactgcaacctccacctcctgggttcaagcagttctcgtgccgcagcctcccaagtagctgggactacaggcatgcgccaccacgccaggctaatttttgtatttttagtagagatggggtttcaccatgtctcaaactcctgacctcaggcgatccacccacctcagcgtcccaaagtgctgggattataggcgtgagccaccgcacctggcctatgagtggtcttttaattaggaacaaatctaatggaaaggagagttgactgaagttggcccacaggattgtgagctgggcagtgccttcatgaaggcttgccaccttgggacgccccagtttactggggtgtcttgcggagtgcagaaggctttctggcagctgcctgggtttggccagaccctgcctcccctcccgccggccaacccctagtccccttcctgtctccacttgcattcaggggtggctgctgttctgagaacattagaactgggaagagagatggagtcacatggatttttggtgggcattattctgaactttcgtatccaagttagtcccccttattccactgtggcattgccgttctaagcagttacctgatgcctgctgctgaagagctgctcacaggaggcggcggcggccctggcactgccccttgcattaggtcttgtgtttgatgtgttcttgtgaatttactttgtcagaacaaaatatttacgcgttgggttcaggaatttcttttagctccccatctggctgtgaaattcaggaaacctcccgttgcctagtaatcaccccatgtaggtgtacattgtgacaaagtgcatctgaccactaaggggcccccttggtgaccccagcacattcacagcagtgttaaaatggcctgcattttggagatgctggctggcctttcagtgcctcccaggaagacacatggcctttccctcttcagatgcctgaagggagtgctttgaggcaggtgatgtgctgggagtgtgggcggcctccctctggccccggggccctctgtggaccttggctccctccgtggacctgggcttcgtggtgagcactgcagcctccctgggcattccctccagcgccagcaccactgcaacatatagacctgagtgctattgtattttggcttggtgtgtatgctcttcattgtgtaaaattgctgttcttttgacaatttaagtgattgttttgtttactgtaagtttgaaaataaaaatgaagaaaaaaattccaatgactgtgctgtggttggagactttatttaccaagatgtttactcttcctttccccttccattttgaggagctgtgtcactcctcctcccccccagtgctttgtagtctctcctatgtcataataaagctacattttctctgagaaaaaaaaacagttt

SEQ ID NO: 68313 - DNA, 4811 bp, Homo sapiens
  misc_feature (18)..(18): n is a, c, g, or t
  misc_feature (25)..(25): n is a, c, g, or t
  misc_feature (1452)..(1452): n is a, c, g, or t
tcagttctggataccccnggggtantggatatcgtcgaccaggcctcgcacgagcatgcgaacggcgaagcggctcaacctgtgccattgatctgatgtatggaggcatctactgttttctgtgccaggactacatctatgacaaagacatggaaataatcgccaaggaggagcagcgaaaagcttggaaaatgcaaggcgttggagagaagttttcaacttgggaaccaaccaaacgggagcttgaactgctgaagcacaacccgaaaaggagaaagatcacctcgaactgcaccataggtctgcgtgggctgatcaaccttgggaacacatgcttcatgaactgcatcgtgcaggccctgacccacacgccacttctgcgggacttcttcctgtctgacaggcaccgctgtgagatgcagagccccagctcctgtctggtctgtgagatgtcctcactgtttcaggagttttactctggacaccggtcccctcacatcccgtataagttgctgcacctggtgtggacccacgcgaggcacctagcaggctacgagcagcaggacgcccacgagttcctcatcgcggccctggacgtgctccaccgacactgcaaaggtgatgacaatgggaagaaggccaacaaccccaaccactgcaactgcatcatagaccagatcttcacaggcgggttgcagtcagacgtcacctgccaagtctgccatggagtctccaccaccatcgaccccttctgggacatcagcttggatctccccggctcttccaccccattctggcccctgagcccagggagcgagggcaacgtggtaaacggggaaagccacgtgtcgggaaccaccacgctcacggactgcctgcgacgattcaccagaccagagcacttgggcagcagcgccaagatcaagtgcagcggttgccatagctaccaggagtccacaaagcagctcactatgaagaaactgcccatcgtagcctgttttcatctcaaacgatttgaacactcagccaagctgcggcggaagatcaccacgtatgtgtccttccccctggagctggacatgacccctttcatggcctccagcaaagagagcaggatgaatggacagtaccagcagcccacggacagtctcaacaatgacaacaagtattccctgtttgctgttgttaaccatcaagggaccttggagagtggccactacaccagctttatccggcagcacaaagaccagtggttcaagtgtgacgatgccatcatcaccaaggccagcatcaaggacgtcctggacagcgaagggtacttgctgttctatcacaaacagttcctggaatacgagtagccttatctgcagctggtcagaaaaacaaaggcaatgcattggcaagcctcacaaagtgatcctccctggccccccccctcccccaagcctcccnccgcctccccggcctggtgacaccacctcccatgcagatgtggcccctctgcacctgggacccatcgggtcgggatggaccacacggacggggaggctcctggagctgctttgaagatggatgagatgaggggtgtgctctgggtgggaggagcagcgtacacccgtcaccagaacatctcttgtgtcatgacatgggggtgcaacgggggcctcacagcacagagtgaccgctgcctggcgttccccagcactcggtgtggaaaggcccctacctgctgtaagattatgggtccatgaaagcagtaagctggacacagaggtgtagtgtgcgggacagagggccttgcagatgcctttctgttggtgttttagtgttaaaatacggagagtatggaactcttcacctccattttctcagcggctgtgaagcagcctcctagcttcggaagtacggacactacgtcgcgttttcaagcgtgtctgttctgcaggtaacagcatcaagctgcacgtggaagcatctcgcggttttctagaaacaggcattttcttatccctctcccgctcctttttccacaaaggtgaatttcataaatgtaatactagtaaagtgaatgaattactgagtttatacagaaatttaggtaacttctcctttagtctcaagagcgagtcttgctttttaatgggtgccgtttatgttgctgcccgccctgtgtgcctggctcctctgggtgccttggtgtctgctggtggctggcagtgggcgcagcggaggagagttgtgctgcagctcatacggtgtgtctgtcatctcagtctggagtaaatgcagtgtctgccggtgtctgatgggttctgtccctcgtattttctttgccttctatcccattgcctggctaccgctgcctggcagccaagggtgttggtcgcgaagctggagtggcctctggtggagcctgcatcttgtctcgtctgcctctgctttacatttggtgtactttcgggcgtggtggcagtaaaatgacaccgtgattgagcttgtcagcagagctgaaagagaaagtagaaggatgtgcattgtttcttgtaagatatcttgcatgtatctgtgtattcaaattcaaacagagatggtttgtccatttgtccactgagaaattataaactagggacaagggggaggaaaagtactgaaatacagtttatgaagcaagtgtgtctcgggctgtgcttgtcccaggagccccagcagcatctgaactgaggcttcttcagtcctgcaggaacaggatcatctgtctcagcggtgggcagatgttttcatagacagccagggagtaaacactgttggctctgtgggctgtatggtctctgccataaatagtacagagatgtggctgtgtctagtacaacttttagacacagaaatctgaatgacatatattgttctgtgtcaagaaacttagattttttttttaactatttaaaaacgtgaaacctattcttagctcacaggccatggagaagctggtggggaccagacccagctccttagctggctgggctggggagggggcagtgacagtggcagctgctactcactgctcagtgtggaaaacacaggacttggcaatcacagcccgcagaaccatcatgtgtggcagaagcctgagggatgcggtttcttgcccacgtgctctgttcattttctgttgtttttctgcacttaaagaattcacatggaagcatgttttataaaatgaattaccagagaaacagagatgggccgagattctcagaaatggtcccatgtgaccaagttctgctgtttgggtgacagtgctttgaagatctcctttgaggatgtgcagtcttttttttttttttttttgagatggagtttgttgcccaggctggagtgagtggcacagtctcggctcactgcaacctccacctcctgggttcaagcagttctcgtgccgcagcctcccaagtagctgggactacaggcatgcgccaccacgccaggctaatttttgtatttttagtagagatggggtttcaccatgtctcaaactcctgacctcaggcgatccacccacctcagcgtcccaaagtgctgggattataggcgtgagccaccgcacctggcctatgagtggtcttttaattaggaacaaatctaatggaaaggagagttgactgaagttggcccacaggattgtgagctgggcagtgccttcatgaaggcttgccaccttgggacgccccagtttactggggtgtcttgcggagtgcagaaggctttctggcagctgcctgggtttggccagaccctgcctcccctcccgccggccaacccctagtccccttcctgtctccacttgcattcaggggtggctgctgttctgagaacattagaactgggaagagagatggagtcacatggatttttggtgggcattattctgaactttcgtatccaagttagtcccccttattccactgtggcattgccgttctaagcagttacctgatgcctgctgctgaagagctgctcacaggaggcggcggcggccctggcactgccccttgcattaggtcttgtgtttgatgtgttcttgtgaatttactttgtcagaacaaaatatttacgcgttgggttcaggaatttcttttagctccccatctggctgtgaaattcaggaaacctcccgttgcctagtaatcaccccatgtaggtgtacattgtgacaaagtgcatctgaccactaaggggcccccttggtgaccccagcacattcacagcagtgttaaaatggcctgcattttggagatgctggctggcctttcagtgcctcccaggaagacacatggcctttccctcttcagatgcctgaagggagtgctttgaggcaggtgatgtgctgggagtgtgggcggcctccctctggccccggggccctctgtggaccttggctccctccgtggacctgggcttcgtggtgagcactgcagcctccctgggcattccctccagcgccagcaccactgcaacatatagacctgagtgctattgtattttggcttggtgtgtatgctcttcattgtgtaaaattgctgttcttttgacaatttaagtgattgttttgtttactgtaagtttgaaaataaaaatgaagaaaaaaattccaatgactgtgctgtggttggagactttatttaccaagatgtttactcttcctttccccttccattttgaggagctgtgtcactcctcctcccccccagtgctttgtagtctctcctatgtcataataaagctacattttctctgagaaaaaaaaacagttt

SEQ ID NO: 68314 - DNA, 4775 bp, Homo sapiens
  misc_feature (28)..(28): n is a, c, g, or t
  misc_feature (33)..(33): n is a, c, g, or t
  misc_feature (1416)..(1416): n is a, c, g, or t
gtatataggcggtacctcagggtgcganggcgnagcggcacaatctggccattgatctgatgtatggaggcatctactgttttctgtgccaggactacatctatgacaaagacatggaaataatcgccaaggaggagcagcgaaaagcttggaaaatgcaaggcgttggagagaagttttcaacttgggaaccaaccaaacgggagcttgaactgctgaagcacaacccgaaaaggagaaagatcacctcgaactgcaccataggtctgcgtgggctgatcaaccttgggaacacatgcttcatgaactgcatcgtgcaggccctgacccacacgccacttctgcgggacttcttcctgtctgacaggcaccgctgtgagatgcagagccccagctcctgtctggtctgtgagatgtcctcactgtttcaggagttttactctggacaccggtcccctcacatcccgtataagttgctgcacctggtgtggacccacgcgaggcacctagcaggctacgagcagcaggacgcccacgagttcctcatcgcggccctggacgtgctccaccgacactgcaaaggtgatgacaatgggaagaaggccaacaaccccaaccactgcaactgcatcatagaccagatcttcacaggcgggttgcagtcagacgtcacctgccaagtctgccatggagtctccaccaccatcgaccccttctgggacatcagcttggatctccccggctcttccaccccattctggcccctgagcccagggagcgagggcaacgtggtaaacggggaaagccacgtgtcgggaaccaccacgctcacggactgcctgcgacgattcaccagaccagagcacttgggcagcagcgccaagatcaagtgcagcggttgccatagctaccaggagtccacaaagcagctcactatgaagaaactgcccatcgtagcctgttttcatctcaaacgatttgaacactcagccaagctgcggcggaagatcaccacgtatgtgtccttccccctggagctggacatgacccctttcatggcctccagcaaagagagcaggatgaatggacagtaccagcagcccacggacagtctcaacaatgacaacaagtattccctgtttgctgttgttaaccatcaagggaccttggagagtggccactacaccagctttatccggcagcacaaagaccagtggttcaagtgtgacgatgccatcatcaccaaggccagcatcaaggacgtcctggacagcgaagggtacttgctgttctatcacaaacagttcctggaatacgagtagccttatctgcagctggtcagaaaaacaaaggcaatgcattggcaagcctcacaaagtgatcctccctggccccccccctcccccaagcctcccnccgcctccccggcctggtgacaccacctcccatgcagatgtggcccctctgcacctgggacccatcgggtcgggatggaccacacggacggggaggctcctggagctgctttgaagatggatgagatgaggggtgtgctctgggtgggaggagcagcgtacacccgtcaccagaacatctcttgtgtcatgacatgggggtgcaacgggggcctcacagcacagagtgaccgctgcctggcgttccccagcactcggtgtggaaaggcccctacctgctgtaagattatgggtccatgaaagcagtaagctggacacagaggtgtagtgtgcgggacagagggccttgcagatgcctttctgttggtgttttagtgttaaaatacggagagtatggaactcttcacctccattttctcagcggctgtgaagcagcctcctagcttcggaagtacggacactacgtcgcgttttcaagcgtgtctgttctgcaggtaacagcatcaagctgcacgtggaagcatctcgcggttttctagaaacaggcattttcttatccctctcccgctcctttttccacaaaggtgaatttcataaatgtaatactagtaaagtgaatgaattactgagtttatacagaaatttaggtaacttctcctttagtctcaagagcgagtcttgctttttaatgggtgccgtttatgttgctgcccgccctgtgtgcctggctcctctgggtgccttggtgtctgctggtggctggcagtgggcgcagcggaggagagttgtgctgcagctcatacggtgtgtctgtcatctcagtctggagtaaatgcagtgtctgccggtgtctgatgggttctgtccctcgtattttctttgccttctatcccattgcctggctaccgctgcctggcagccaagggtgttggtcgcgaagctggagtggcctctggtggagcctgcatcttgtctcgtctgcctctgctttacatttggtgtactttcgggcgtggtggcagtaaaatgacaccgtgattgagcttgtcagcagagctgaaagagaaagtagaaggatgtgcattgtttcttgtaagatatcttgcatgtatctgtgtattcaaattcaaacagagatggtttgtccatttgtccactgagaaattataaactagggacaagggggaggaaaagtactgaaatacagtttatgaagcaagtgtgtctcgggctgtgcttgtcccaggagccccagcagcatctgaactgaggcttcttcagtcctgcaggaacaggatcatctgtctcagcggtgggcagatgttttcatagacagccagggagtaaacactgttggctctgtgggctgtatggtctctgccataaatagtacagagatgtggctgtgtctagtacaacttttagacacagaaatctgaatgacatatattgttctgtgtcaagaaacttagattttttttttaactatttaaaaacgtgaaacctattcttagctcacaggccatggagaagctggtggggaccagacccagctccttagctggctgggctggggagggggcagtgacagtggcagctgctactcactgctcagtgtggaaaacacaggacttggcaatcacagcccgcagaaccatcatgtgtggcagaagcctgagggatgcggtttcttgcccacgtgctctgttcattttctgttgtttttctgcacttaaagaattcacatggaagcatgttttataaaatgaattaccagagaaacagagatgggccgagattctcagaaatggtcccatgtgaccaagttctgctgtttgggtgacagtgctttgaagatctcctttgaggatgtgcagtcttttttttttttttttttgagatggagtttgttgcccaggctggagtgagtggcacagtctcggctcactgcaacctccacctcctgggttcaagcagttctcgtgccgcagcctcccaagtagctgggactacaggcatgcgccaccacgccaggctaatttttgtatttttagtagagatggggtttcaccatgtctcaaactcctgacctcaggcgatccacccacctcagcgtcccaaagtgctgggattataggcgtgagccaccgcacctggcctatgagtggtcttttaattaggaacaaatctaatggaaaggagagttgactgaagttggcccacaggattgtgagctgggcagtgccttcatgaaggcttgccaccttgggacgccccagtttactggggtgtcttgcggagtgcagaaggctttctggcagctgcctgggtttggccagaccctgcctcccctcccgccggccaacccctagtccccttcctgtctccacttgcattcaggggtggctgctgttctgagaacattagaactgggaagagagatggagtcacatggatttttggtgggcattattctgaactttcgtatccaagttagtcccccttattccactgtggcattgccgttctaagcagttacctgatgcctgctgctgaagagctgctcacaggaggcggcggcggccctggcactgccccttgcattaggtcttgtgtttgatgtgttcttgtgaatttactttgtcagaacaaaatatttacgcgttgggttcaggaatttcttttagctccccatctggctgtgaaattcaggaaacctcccgttgcctagtaatcaccccatgtaggtgtacattgtgacaaagtgcatctgaccactaaggggcccccttggtgaccccagcacattcacagcagtgttaaaatggcctgcattttggagatgctggctggcctttcagtgcctcccaggaagacacatggcctttccctcttcagatgcctgaagggagtgctttgaggcaggtgatgtgctgggagtgtgggcggcctccctctggccccggggccctctgtggaccttggctccctccgtggacctgggcttcgtggtgagcactgcagcctccctgggcattccctccagcgccagcaccactgcaacatatagacctgagtgctattgtattttggcttggtgtgtatgctcttcattgtgtaaaattgctgttcttttgacaatttaagtgattgttttgtttactgtaagtttgaaaataaaaatgaagaaaaaaattccaatgactgtgctgtggttggagactttatttaccaagatgtttactcttcctttccccttccattttgaggagctgtgtcactcctcctcccccccagtgctttgtagtctctcctatgtcataataaagctacattttctctgagaaaaaaaaacagttt

SEQ ID NO: 68315 - DNA, 4706 bp, Homo sapiens
  misc_feature (1347)..(1347): n is a, c, g, or t
gtggtggacattcttcaataccgttcatgtaaaagtggcataaaaactagcagaatgcgatatctcatcgttttctggcttgaatgaatgaataaaagaaaatgagtatgtagaggtagaggaagccactgggatccagcgacacctgtggttcagcacacaggtaactcctgctctctggtgatttgtgtccaggtctgcgtgggctgatcaaccttgggaacacatgcttcatgaactgcatcgtgcaggccctgacccacacgccacttctgcgggacttcttcctgtctgacaggcaccgctgtgagatgcagagccccagctcctgtctggtctgtgagatgtcctcactgtttcaggagttttactctggacaccggtcccctcacatcccgtataagttgctgcacctggtgtggacccacgcgaggcacctagcaggctacgagcagcaggacgcccacgagttcctcatcgcggccctggacgtgctccaccgacactgcaaaggtgatgacaatgggaagaaggccaacaaccccaaccactgcaactgcatcatagaccagatcttcacaggcgggttgcagtcagacgtcacctgccaagtctgccatggagtctccaccaccatcgaccccttctgggacatcagcttggatctccccggctcttccaccccattctggcccctgagcccagggagcgagggcaacgtggtaaacggggaaagccacgtgtcgggaaccaccacgctcacggactgcctgcgacgattcaccagaccagagcacttgggcagcagcgccaagatcaagtgcagcggttgccatagctaccaggagtccacaaagcagctcactatgaagaaactgcccatcgtagcctgttttcatctcaaacgatttgaacactcagccaagctgcggcggaagatcaccacgtatgtgtccttccccctggagctggacatgacccctttcatggcctccagcaaagagagcaggatgaatggacagtaccagcagcccacggacagtctcaacaatgacaacaagtattccctgtttgctgttgttaaccatcaagggaccttggagagtggccactacaccagctttatccggcagcacaaagaccagtggttcaagtgtgacgatgccatcatcaccaaggccagcatcaaggacgtcctggacagcgaagggtacttgctgttctatcacaaacagttcctggaatacgagtagccttatctgcagctggtcagaaaaacaaaggcaatgcattggcaagcctcacaaagtgatcctccctggccccccccctcccccaagcctcccnccgcctccccggcctggtgacaccacctcccatgcagatgtggcccctctgcacctgggacccatcgggtcgggatggaccacacggacggggaggctcctggagctgctttgaagatggatgagatgaggggtgtgctctgggtgggaggagcagcgtacacccgtcaccagaacatctcttgtgtcatgacatgggggtgcaacgggggcctcacagcacagagtgaccgctgcctggcgttccccagcactcggtgtggaaaggcccctacctgctgtaagattatgggtccatgaaagcagtaagctggacacagaggtgtagtgtgcgggacagagggccttgcagatgcctttctgttggtgttttagtgttaaaatacggagagtatggaactcttcacctccattttctcagcggctgtgaagcagcctcctagcttcggaagtacggacactacgtcgcgttttcaagcgtgtctgttctgcaggtaacagcatcaagctgcacgtggaagcatctcgcggttttctagaaacaggcattttcttatccctctcccgctcctttttccacaaaggtgaatttcataaatgtaatactagtaaagtgaatgaattactgagtttatacagaaatttaggtaacttctcctttagtctcaagagcgagtcttgctttttaatgggtgccgtttatgttgctgcccgccctgtgtgcctggctcctctgggtgccttggtgtctgctggtggctggcagtgggcgcagcggaggagagttgtgctgcagctcatacggtgtgtctgtcatctcagtctggagtaaatgcagtgtctgccggtgtctgatgggttctgtccctcgtattttctttgccttctatcccattgcctggctaccgctgcctggcagccaagggtgttggtcgcgaagctggagtggcctctggtggagcctgcatcttgtctcgtctgcctctgctttacatttggtgtactttcgggcgtggtggcagtaaaatgacaccgtgattgagcttgtcagcagagctgaaagagaaagtagaaggatgtgcattgtttcttgtaagatatcttgcatgtatctgtgtattcaaattcaaacagagatggtttgtccatttgtccactgagaaattataaactagggacaagggggaggaaaagtactgaaatacagtttatgaagcaagtgtgtctcgggctgtgcttgtcccaggagccccagcagcatctgaactgaggcttcttcagtcctgcaggaacaggatcatctgtctcagcggtgggcagatgttttcatagacagccagggagtaaacactgttggctctgtgggctgtatggtctctgccataaatagtacagagatgtggctgtgtctagtacaacttttagacacagaaatctgaatgacatatattgttctgtgtcaagaaacttagattttttttttaactatttaaaaacgtgaaacctattcttagctcacaggccatggagaagctggtggggaccagacccagctccttagctggctgggctggggagggggcagtgacagtggcagctgctactcactgctcagtgtggaaaacacaggacttggcaatcacagcccgcagaaccatcatgtgtggcagaagcctgagggatgcggtttcttgcccacgtgctctgttcattttctgttgtttttctgcacttaaagaattcacatggaagcatgttttataaaatgaattaccagagaaacagagatgggccgagattctcagaaatggtcccatgtgaccaagttctgctgtttgggtgacagtgctttgaagatctcctttgaggatgtgcagtcttttttttttttttttttgagatggagtttgttgcccaggctggagtgagtggcacagtctcggctcactgcaacctccacctcctgggttcaagcagttctcgtgccgcagcctcccaagtagctgggactacaggcatgcgccaccacgccaggctaatttttgtatttttagtagagatggggtttcaccatgtctcaaactcctgacctcaggcgatccacccacctcagcgtcccaaagtgctgggattataggcgtgagccaccgcacctggcctatgagtggtcttttaattaggaacaaatctaatggaaaggagagttgactgaagttggcccacaggattgtgagctgggcagtgccttcatgaaggcttgccaccttgggacgccccagtttactggggtgtcttgcggagtgcagaaggctttctggcagctgcctgggtttggccagaccctgcctcccctcccgccggccaacccctagtccccttcctgtctccacttgcattcaggggtggctgctgttctgagaacattagaactgggaagagagatggagtcacatggatttttggtgggcattattctgaactttcgtatccaagttagtcccccttattccactgtggcattgccgttctaagcagttacctgatgcctgctgctgaagagctgctcacaggaggcggcggcggccctggcactgccccttgcattaggtcttgtgtttgatgtgttcttgtgaatttactttgtcagaacaaaatatttacgcgttgggttcaggaatttcttttagctccccatctggctgtgaaattcaggaaacctcccgttgcctagtaatcaccccatgtaggtgtacattgtgacaaagtgcatctgaccactaaggggcccccttggtgaccccagcacattcacagcagtgttaaaatggcctgcattttggagatgctggctggcctttcagtgcctcccaggaagacacatggcctttccctcttcagatgcctgaagggagtgctttgaggcaggtgatgtgctgggagtgtgggcggcctccctctggccccggggccctctgtggaccttggctccctccgtggacctgggcttcgtggtgagcactgcagcctccctgggcattccctccagcgccagcaccactgcaacatatagacctgagtgctattgtattttggcttggtgtgtatgctcttcattgtgtaaaattgctgttcttttgacaatttaagtgattgttttgtttactgtaagtttgaaaataaaaatgaagaaaaaaattccaatgactgtgctgtggttggagactttatttaccaagatgtttactcttcctttccccttccattttgaggagctgtgtcactcctcctcccccccagtgctttgtagtctctcctatgtcataataaagctacattttctctgagaaaaaaaaacagttt

SEQ ID NO: 68316 - DNA, 4448 bp, Homo sapiens
  misc_feature (1)..(1): n is a, c, g, or t
  misc_feature (52)..(52): n is a, c, g, or t
  misc_feature (1089)..(1089): n is a, c, g, or t
ntggcgacacgtagcggaatcgggggtatgctgttcgaattcataagaacangggaggttagaagtagggtcttggtgacaaaatatgttgtgtagagttcaggagagagtgcgtcatatgttgttcctaggaagattgtagtggtgagggtgtttattataataatgtttgtgtattcggctatacgtgtccggccacgtggccggacacgtatttggggagacactaatcccagagccgtggtctgtctccaggtgatgacaatgggaagaaggccaacaaccccaaccactgcaactgcatcatagaccagatcttcacaggcgggttgcagtcagacgtcacctgccaagtctgccatggagtctccaccaccatcgaccccttctgggacatcagcttggatctccccggctcttccaccccattctggcccctgagcccagggagcgagggcaacgtggtaaacggggaaagccacgtgtcgggaaccaccacgctcacggactgcctgcgacgattcaccagaccagagcacttgggcagcagcgccaagatcaagtgcagcggttgccatagctaccaggagtccacaaagcagctcactatgaagaaactgcccatcgtagcctgttttcatctcaaacgatttgaacactcagccaagctgcggcggaagatcaccacgtatgtgtccttccccctggagctggacatgacccctttcatggcctccagcaaagagagcaggatgaatggacagtaccagcagcccacggacagtctcaacaatgacaacaagtattccctgtttgctgttgttaaccatcaagggaccttggagagtggccactacaccagctttatccggcagcacaaagaccagtggttcaagtgtgacgatgccatcatcaccaaggccagcatcaaggacgtcctggacagcgaagggtacttgctgttctatcacaaacagttcctggaatacgagtagccttatctgcagctggtcagaaaaacaaaggcaatgcattggcaagcctcacaaagtgatcctccctggccccccccctcccccaagcctcccnccgcctccccggcctggtgacaccacctcccatgcagatgtggcccctctgcacctgggacccatcgggtcgggatggaccacacggacggggaggctcctggagctgctttgaagatggatgagatgaggggtgtgctctgggtgggaggagcagcgtacacccgtcaccagaacatctcttgtgtcatgacatgggggtgcaacgggggcctcacagcacagagtgaccgctgcctggcgttccccagcactcggtgtggaaaggcccctacctgctgtaagattatgggtccatgaaagcagtaagctggacacagaggtgtagtgtgcgggacagagggccttgcagatgcctttctgttggtgttttagtgttaaaatacggagagtatggaactcttcacctccattttctcagcggctgtgaagcagcctcctagcttcggaagtacggacactacgtcgcgttttcaagcgtgtctgttctgcaggtaacagcatcaagctgcacgtggaagcatctcgcggttttctagaaacaggcattttcttatccctctcccgctcctttttccacaaaggtgaatttcataaatgtaatactagtaaagtgaatgaattactgagtttatacagaaatttaggtaacttctcctttagtctcaagagcgagtcttgctttttaatgggtgccgtttatgttgctgcccgccctgtgtgcctggctcctctgggtgccttggtgtctgctggtggctggcagtgggcgcagcggaggagagttgtgctgcagctcatacggtgtgtctgtcatctcagtctggagtaaatgcagtgtctgccggtgtctgatgggttctgtccctcgtattttctttgccttctatcccattgcctggctaccgctgcctggcagccaagggtgttggtcgcgaagctggagtggcctctggtggagcctgcatcttgtctcgtctgcctctgctttacatttggtgtactttcgggcgtggtggcagtaaaatgacaccgtgattgagcttgtcagcagagctgaaagagaaagtagaaggatgtgcattgtttcttgtaagatatcttgcatgtatctgtgtattcaaattcaaacagagatggtttgtccatttgtccactgagaaattataaactagggacaagggggaggaaaagtactgaaatacagtttatgaagcaagtgtgtctcgggctgtgcttgtcccaggagccccagcagcatctgaactgaggcttcttcagtcctgcaggaacaggatcatctgtctcagcggtgggcagatgttttcatagacagccagggagtaaacactgttggctctgtgggctgtatggtctctgccataaatagtacagagatgtggctgtgtctagtacaacttttagacacagaaatctgaatgacatatattgttctgtgtcaagaaacttagattttttttttaactatttaaaaacgtgaaacctattcttagctcacaggccatggagaagctggtggggaccagacccagctccttagctggctgggctggggagggggcagtgacagtggcagctgctactcactgctcagtgtggaaaacacaggacttggcaatcacagcccgcagaaccatcatgtgtggcagaagcctgagggatgcggtttcttgcccacgtgctctgttcattttctgttgtttttctgcacttaaagaattcacatggaagcatgttttataaaatgaattaccagagaaacagagatgggccgagattctcagaaatggtcccatgtgaccaagttctgctgtttgggtgacagtgctttgaagatctcctttgaggatgtgcagtcttttttttttttttttttgagatggagtttgttgcccaggctggagtgagtggcacagtctcggctcactgcaacctccacctcctgggttcaagcagttctcgtgccgcagcctcccaagtagctgggactacaggcatgcgccaccacgccaggctaatttttgtatttttagtagagatggggtttcaccatgtctcaaactcctgacctcaggcgatccacccacctcagcgtcccaaagtgctgggattataggcgtgagccaccgcacctggcctatgagtggtcttttaattaggaacaaatctaatggaaaggagagttgactgaagttggcccacaggattgtgagctgggcagtgccttcatgaaggcttgccaccttgggacgccccagtttactggggtgtcttgcggagtgcagaaggctttctggcagctgcctgggtttggccagaccctgcctcccctcccgccggccaacccctagtccccttcctgtctccacttgcattcaggggtggctgctgttctgagaacattagaactgggaagagagatggagtcacatggatttttggtgggcattattctgaactttcgtatccaagttagtcccccttattccactgtggcattgccgttctaagcagttacctgatgcctgctgctgaagagctgctcacaggaggcggcggcggccctggcactgccccttgcattaggtcttgtgtttgatgtgttcttgtgaatttactttgtcagaacaaaatatttacgcgttgggttcaggaatttcttttagctccccatctggctgtgaaattcaggaaacctcccgttgcctagtaatcaccccatgtaggtgtacattgtgacaaagtgcatctgaccactaaggggcccccttggtgaccccagcacattcacagcagtgttaaaatggcctgcattttggagatgctggctggcctttcagtgcctcccaggaagacacatggcctttccctcttcagatgcctgaagggagtgctttgaggcaggtgatgtgctgggagtgtgggcggcctccctctggccccggggccctctgtggaccttggctccctccgtggacctgggcttcgtggtgagcactgcagcctccctgggcattccctccagcgccagcaccactgcaacatatagacctgagtgctattgtattttggcttggtgtgtatgctcttcattgtgtaaaattgctgttcttttgacaatttaagtgattgttttgtttactgtaagtttgaaaataaaaatgaagaaaaaaattccaatgactgtgctgtggttggagactttatttaccaagatgtttactcttcctttccccttccattttgaggagctgtgtcactcctcctcccccccagtgctttgtagtctctcctatgtcataataaagctacattttctctgagaaaaaaaaacagttt

SEQ ID NO: 68317 - DNA, 5001 bp, Homo sapiens
  misc_feature (1642)..(1642): n is a, c, g, or t
gagcggagtgcggtccgcagcagccgcagctcgggggcggtgcctgccttgcagcctcccctcggcgatcgcgcagccccatctttgtccggcctccgcgctttgttctcggcgcccgggccttggccagcctggccagccgccgagcagcccccacgccgcgctggcgtcgtcctcgcctccctcgccgccgccccccgcgcgctggccgggccttgccccccatggtgtcccggccagagcccgagggcgaggccatggacgccgagctggcggtagcgccgccgggctgctcgcacctgggcagcttcaaggtggacaactggaagcagaacctgcgggccatctaccagtgcttcgtgtggagcggcacggctgaggcccgcaagcgcaaggccaagtcctgtatctgccatgtctgtggcgtccacctcaacaggctgcattcctgcctctactgtgtcttcttcggctgtttcacaaagaagcatattcacgagcatgcgaaggcgaagcggcacaacctggccattgatctgatgtatggaggcatctactgttttctgtgccaggactacatctatgacaaagacatggaaataatcgccaaggaggagcagcgaaaagcttggaaaatgcaaggcgttggagagaagttttcaacttgggaaccaaccaaacgggagcttgaactgctgaagcacaacccgaaaaggagaaagatcacctcgaactgcaccataggtctgcgtgggctgatcaaccttgggaacacatgcttcatgaactgcatcgtgcaggccctgacccacacgccacttctgcgggacttcttcctgtctgacaggcaccgctgtgagatgcagagccccagctcctgtctggtctgtgagatgtcctcactgtttcaggagtggagtctccaccaccatcgaccccttctgggacatcagcttggatctccccggctcttccaccccattctggcccctgagcccagggagcgagggcaacgtggtaaacggggaaagccacgtgtcgggaaccaccacgctcacggactgcctgcgacgattcaccagaccagagcacttgggcagcagcgccaagatcaagtgcagcggttgccatagctaccaggagtccacaaagcagctcactatgaagaaactgcccatcgtagcctgttttcatctcaaacgatttgaacactcagccaagctgcggcggaagatcaccacgtatgtgtccttccccctggagctggacatgacccctttcatggcctccagcaaagagagcaggatgaatggacagtaccagcagcccacggacagtctcaacaatgacaacaagtattccctgtttgctgttgttaaccatcaagggaccttggagagtggccactacaccagctttatccggcagcacaaagaccagtggttcaagtgtgacgatgccatcatcaccaaggccagcatcaaggacgtcctggacagcgaagggtacttgctgttctatcacaaacagttcctggaatacgagtagccttatctgcagctggtcagaaaaacaaaggcaatgcattggcaagcctcacaaagtgatcctccctggccccccccctcccccaagcctcccnccgcctccccggcctggtgacaccacctcccatgcagatgtggcccctctgcacctgggacccatcgggtcgggatggaccacacggacggggaggctcctggagctgctttgaagatggatgagatgaggggtgtgctctgggtgggaggagcagcgtacacccgtcaccagaacatctcttgtgtcatgacatgggggtgcaacgggggcctcacagcacagagtgaccgctgcctggcgttccccagcactcggtgtggaaaggcccctacctgctgtaagattatgggtccatgaaagcagtaagctggacacagaggtgtagtgtgcgggacagagggccttgcagatgcctttctgttggtgttttagtgttaaaatacggagagtatggaactcttcacctccattttctcagcggctgtgaagcagcctcctagcttcggaagtacggacactacgtcgcgttttcaagcgtgtctgttctgcaggtaacagcatcaagctgcacgtggaagcatctcgcggttttctagaaacaggcattttcttatccctctcccgctcctttttccacaaaggtgaatttcataaatgtaatactagtaaagtgaatgaattactgagtttatacagaaatttaggtaacttctcctttagtctcaagagcgagtcttgctttttaatgggtgccgtttatgttgctgcccgccctgtgtgcctggctcctctgggtgccttggtgtctgctggtggctggcagtgggcgcagcggaggagagttgtgctgcagctcatacggtgtgtctgtcatctcagtctggagtaaatgcagtgtctgccggtgtctgatgggttctgtccctcgtattttctttgccttctatcccattgcctggctaccgctgcctggcagccaagggtgttggtcgcgaagctggagtggcctctggtggagcctgcatcttgtctcgtctgcctctgctttacatttggtgtactttcgggcgtggtggcagtaaaatgacaccgtgattgagcttgtcagcagagctgaaagagaaagtagaaggatgtgcattgtttcttgtaagatatcttgcatgtatctgtgtattcaaattcaaacagagatggtttgtccatttgtccactgagaaattataaactagggacaagggggaggaaaagtactgaaatacagtttatgaagcaagtgtgtctcgggctgtgcttgtcccaggagccccagcagcatctgaactgaggcttcttcagtcctgcaggaacaggatcatctgtctcagcggtgggcagatgttttcatagacagccagggagtaaacactgttggctctgtgggctgtatggtctctgccataaatagtacagagatgtggctgtgtctagtacaacttttagacacagaaatctgaatgacatatattgttctgtgtcaagaaacttagattttttttttaactatttaaaaacgtgaaacctattcttagctcacaggccatggagaagctggtggggaccagacccagctccttagctggctgggctggggagggggcagtgacagtggcagctgctactcactgctcagtgtggaaaacacaggacttggcaatcacagcccgcagaaccatcatgtgtggcagaagcctgagggatgcggtttcttgcccacgtgctctgttcattttctgttgtttttctgcacttaaagaattcacatggaagcatgttttataaaatgaattaccagagaaacagagatgggccgagattctcagaaatggtcccatgtgaccaagttctgctgtttgggtgacagtgctttgaagatctcctttgaggatgtgcagtcttttttttttttttttttgagatggagtttgttgcccaggctggagtgagtggcacagtctcggctcactgcaacctccacctcctgggttcaagcagttctcgtgccgcagcctcccaagtagctgggactacaggcatgcgccaccacgccaggctaatttttgtatttttagtagagatggggtttcaccatgtctcaaactcctgacctcaggcgatccacccacctcagcgtcccaaagtgctgggattataggcgtgagccaccgcacctggcctatgagtggtcttttaattaggaacaaatctaatggaaaggagagttgactgaagttggcccacaggattgtgagctgggcagtgccttcatgaaggcttgccaccttgggacgccccagtttactggggtgtcttgcggagtgcagaaggctttctggcagctgcctgggtttggccagaccctgcctcccctcccgccggccaacccctagtccccttcctgtctccacttgcattcaggggtggctgctgttctgagaacattagaactgggaagagagatggagtcacatggatttttggtgggcattattctgaactttcgtatccaagttagtcccccttattccactgtggcattgccgttctaagcagttacctgatgcctgctgctgaagagctgctcacaggaggcggcggcggccctggcactgccccttgcattaggtcttgtgtttgatgtgttcttgtgaatttactttgtcagaacaaaatatttacgcgttgggttcaggaatttcttttagctccccatctggctgtgaaattcaggaaacctcccgttgcctagtaatcaccccatgtaggtgtacattgtgacaaagtgcatctgaccactaaggggcccccttggtgaccccagcacattcacagcagtgttaaaatggcctgcattttggagatgctggctggcctttcagtgcctcccaggaagacacatggcctttccctcttcagatgcctgaagggagtgctttgaggcaggtgatgtgctgggagtgtgggcggcctccctctggccccggggccctctgtggaccttggctccctccgtggacctgggcttcgtggtgagcactgcagcctccctgggcattccctccagcgccagcaccactgcaacatatagacctgagtgctattgtattttggcttggtgtgtatgctcttcattgtgtaaaattgctgttcttttgacaatttaagtgattgttttgtttactgtaagtttgaaaataaaaatgaagaaaaaaattccaatgactgtgctgtggttggagactttatttaccaagatgtttactcttcctttccccttccattttgaggagctgtgtcactcctcctcccccccagtgctttgtagtctctcctatgtcataataaagctacattttctctgagaaaaaaaaacagttt

SEQ ID NO: 68318 - DNA, 5099 bp, Homo sapiens
  misc_feature (1896)..(1896): n is a, c, g, or t
gagcggagtgcggtccgcagcagccgcagctcgggggcggtgcctgccttgcagcctcccctcggcgatcgcgcagccccatctttgtccggcctccgcgctttgttctcggcgcccgggccttggccagcctggccagccgccgagcagcccccacgccgcgctggcgtcgtcctcgcctccctcgccgccgccccccgcgcgctggccgggccttgccccccatggtgtcccggccagagcccgagggcgaggccatggacgccgagctggcggtagcgccgccgggctgctcgcacctgggcagcttcaaggtggacaactggaagcagaacctgcgggccatctaccagtgcttcgtgtggagcggcacggctgaggcccgcaagcgcaaggccaagtcctgtatctgccatgtctgtggcgtccacctcaacaggctgcattcctgcctctactgtgtcttcttcggctgtttcacaaagaagcatattcacgagcatgcgaaggcgaagcggcacaacctggccattgatctgatgtatggaggcatctactgttttctgtgccaggactacatctatgacaaagacatggaaataatcgccaaggaggagcagcgaaaagcttggaaaatgcaaggcgttggagagaagttttcaacttgggaaccaaccaaacgggagcttgaactgctgaagcacaacccgaaaaggagaaagatcacctcgaactgcaccataggtctgcgtgggctgatcaaccttgggaacacatgcttcatgaactgcatcgtgcaggccctgacccacacgccacttctgcgggacttcttcctgtctgacaggcaccgctgtgagatgcagagccccagctcctgtctggtctgtgagatgtcctcactgtttcaggagttttactctggacaccggtcccctcacatcccgtataagttgctgcacctggtgtggacccacgcgaggcacctagcaggctacgagcagcaggacgcccacgagttcctcatcgcggccctggacgtgctccaccgacactgcaaaggtgatgacaatgggaagaaggccaacaaccccaaccactgcaactgcatcatagaccagatcttcacaggcgggttgcagtcagacgtcacctgccaagtctgccatggagtctccaccaccatcgaccccttctgggacatcagcttggatctccccggctcttccaccccattctggcccctgagcccagggagcgagggcaacgtggtaaacggggaaagccacgtgtcgggaaccaccacgctcacggactgcctgcgacgattcaccagaccagagcacttgggcagcagcgccaagatcaagtgcagcggttgccatagctaccaggagtccacaaagcagctcactatgaagaaactgcccatcgtagcctgttttcatctcaaacgatttgaacactcagccaagctgcggcggaagatcaccacgtatgtgtccttccccctggagctggacatgacccctttcatggcctccagcaaagagagcaggatgaatggacagtaccagcagcccacggacagtctcaacaatgacaacaagtattccctgtttgctgttgttaaccatcaagggaccttggagagtggccactacaccagctttatccggcagcacaaagaccagtggttcaagtgtgacgatgccatcatcaccaaggccagcatcaaggacgtcctggacagcgaagggtacttgctgttctatcacaaacagttcctggaatacgagtagccttatctgcagctggtcagaaaaacaaaggcaatgcattggcaagcctcacaaagtgatcctccctggccccccccctcccccaagcctcccnccgcctccccggcctggtgacaccacctcccatgcagatgtggcccctctgcacctgggacccatcgggtcgggatggaccacacggacggggaggctcctggagctgctttgaagatggatgagatgaggggtgtgctctgggtgggaggagcagcgtacacccgtcaccagaacatctcttgtgtcatgacatgggggtgcaacgggggcctcacagcacagagtgaccgctgcctggcgttccccagcactcggtgtggaaaggcccctacctgctgtaagattatgggtccatgaaagcagtaagctggacacagaggtgtagtgtgcgggacagagggccttgcagatgcctttctgttggtgttttagtgttaaaatacggagagtatggaactcttcacctccattttctcagcggctgtgaagcagcctcctagcttcggaagtacggacactacgtcgcgttttcaagcgtgtctgttctgcaggtaacagcatcaagctgcacgtggaagcatctcgcggttttctagaaacaggcattttcttatccctctcccgctcctttttccacaaaggtgaatttcataaatgtaatactagtaaagtgaatgaattactgagtttatacagaaatttaggtaacttctcctttagtctcaagagcgagtcttgctttttaatgggtgccgtttatgttgctgcccgccctgtgtgcctggctcctctgggtgccttggtgtctgctggtggctggcagtgggcgcagcggaggagagttgtgctgcagctcatacggtgtgtctgtcatctcagtctggagtaaatgcagtgtctgccggtgtctgatgggttctgtccctcgtattttctttgccttctatcccattgcctggctaccgctgcctggcagccaagggtgttggtcgcgaagctggagtggcctctggtggagcctgcatcttgtctcgtctgcctctgctttacatttggtgtactttcgggcgtggtggcagtaaaatgacaccgtgattgagcttgtcagcagagctgaaagagaaagtagaaggatgtgcattgtttcttgtaagatatcttgcatgtatctgtgtattcaaattcaaacagagatggtttgtccatttgtccactgagaaattataaactagggacaagggggaggaaaagtactgaaatacagtttatgaagcaagtgtgtctcgggctgtgcttgtcccaggagccccagcagcatctgaactgaggcttcttcagtcctgcaggaacaggatcatctgtctcagcggtgggcagatgttttcatagacagccagggagtaaacactgttggctctgtgggctgtatggtctctgccataaatagtacagagatgtggctgtgtctagtacaacttttagacacagaaatctgaatgacatatattgttctgtgtcaagaaacttagattttttttttaactatttaaaaacgtgaaacctattcttagctcacaggccatggagaagctggtggggaccagacccagctccttagctggctgggctggggagggggcagtgacagtggcagctgctactcactgctcagtgtggaaaacacaggacttggcaatcacagcccgcagaaccatcatgtgtggcagaagcctgagggatgcggtttcttgcccacgtgctctgttcattttctgttgtttttctgcacttaaagaattcacatggaagcatgttttataaaatgaattaccagagaaacagagatgggccgagattctcagaaatggtcccatgtgaccaagttctgctgtttgggtgacagtgctttgaagatctcctttgaggatgtgcagtcttttttttttttttttttgagatggagtttgttgcccaggctggagtgagtggcacagtctcggctcactgcaacctccacctcctgggttcaagcagttctcgtgccgcagcctcccaagtagctgggactacaggcatgcgccaccacgccaggctaatttttgtatttttagtagagatggggtttcaccatgtctcaaactcctgacctcaggcgatccacccacctcagcgtcccaaagtgctgggattataggcgtgagccaccgcacctggcctatgagtggtcttttaattaggaacaaatctaatggaaaggagagttgactgaagttggcccacaggattgtgagctgggcagtgccttcatgaaggcttgccaccttgggacgccccagtttactggggtgtcttgcggagtgcagaaggctttctggcagctgcctgggtttggccagaccctgcctcccctcccgccggccaacccctagtccccttcctgtctccacttgcattcaggggtggctgctgttctgagaacattagaactgggaagagagatggagtcacatggatttttggtgggcattattctgaactttcgtatccaagttagtcccccttattccactgtggcattgccgttctaagcagttacctgatgcctgctgctgaagagctgctcacaggaggcggcggcggccctggcactgccccttgcattaggtcttgtgtttgatgtgttcttgtgaatttactttgtcagaacaaaatatttacgcgttgggttcaggaatttcttttagctccccatctggctgtgaaattcaggaaacctcccgttgcctagtaatcaccccatgtaggtgtacattgtgacaaagtgcatctgaccactaaggggcccccttggtgaccccagcacattcacagcagtgttaaaatggcctgcattttggagatgctggctggcctttcagtgcctcccaggaagacacatggcctttccctcttcagatgcctgaagggagtgctttgaggcaggtgatgtgctgggagtgtgggcggcctccctctggccccggggccctctgtggaccttggctccctccgtggacctgggcttcgtggtgagcactgcagcctccctgggcattccctccagcgccagcaccactgcaacatatagacctgagtgctattgtattttggcttggtgtgtatgctcttcattgtgtaaaattgctgttcttttgacaatttaagtgattgttttgtttactgtaagtttgaaaataaaaatgaagaaaaaaattccaatga

SEQ ID NO: 68319 - DNA, 5083 bp, Homo sapiens
  misc_feature (1896)..(1896): n is a, c, g, or t
gagcggagtgcggtccgcagcagccgcagctcgggggcggtgcctgccttgcagcctcccctcggcgatcgcgcagccccatctttgtccggcctccgcgctttgttctcggcgcccgggccttggccagcctggccagccgccgagcagcccccacgccgcgctggcgtcgtcctcgcctccctcgccgccgccccccgcgcgctggccgggccttgccccccatggtgtcccggccagagcccgagggcgaggccatggacgccgagctggcggtagcgccgccgggctgctcgcacctgggcagcttcaaggtggacaactggaagcagaacctgcgggccatctaccagtgcttcgtgtggagcggcacggctgaggcccgcaagcgcaaggccaagtcctgtatctgccatgtctgtggcgtccacctcaacaggctgcattcctgcctctactgtgtcttcttcggctgtttcacaaagaagcatattcacgagcatgcgaaggcgaagcggcacaacctggccattgatctgatgtatggaggcatctactgttttctgtgccaggactacatctatgacaaagacatggaaataatcgccaaggaggagcagcgaaaagcttggaaaatgcaaggcgttggagagaagttttcaacttgggaaccaaccaaacgggagcttgaactgctgaagcacaacccgaaaaggagaaagatcacctcgaactgcaccataggtctgcgtgggctgatcaaccttgggaacacatgcttcatgaactgcatcgtgcaggccctgacccacacgccacttctgcgggacttcttcctgtctgacaggcaccgctgtgagatgcagagccccagctcctgtctggtctgtgagatgtcctcactgtttcaggagttttactctggacaccggtcccctcacatcccgtataagttgctgcacctggtgtggacccacgcgaggcacctagcaggctacgagcagcaggacgcccacgagttcctcatcgcggccctggacgtgctccaccgacactgcaaaggtgatgacaatgggaagaaggccaacaaccccaaccactgcaactgcatcatagaccagatcttcacaggcgggttgcagtcagacgtcacctgccaagtctgccatggagtctccaccaccatcgaccccttctgggacatcagcttggatctccccggctcttccaccccattctggcccctgagcccagggagcgagggcaacgtggtaaacggggaaagccacgtgtcgggaaccaccacgctcacggactgcctgcgacgattcaccagaccagagcacttgggcagcagcgccaagatcaagtgcagcggttgccatagctaccaggagtccacaaagcagctcactatgaagaaactgcccatcgtagcctgttttcatctcaaacgatttgaacactcagccaagctgcggcggaagatcaccacgtatgtgtccttccccctggagctggacatgacccctttcatggcctccagcaaagagagcaggatgaatggacagtaccagcagcccacggacagtctcaacaatgacaacaagtattccctgtttgctgttgttaaccatcaagggaccttggagagtggccactacaccagctttatccggcagcacaaagaccagtggttcaagtgtgacgatgccatcatcaccaaggccagcatcaaggacgtcctggacagcgaagggtacttgctgttctatcacaaacagttcctggaatacgagtagccttatctgcagctggtcagaaaaacaaaggcaatgcattggcaagcctcacaaagtgatcctccctggccccccccctcccccaagcctcccnccgcctccccggcctggtgacaccacctcccatgcagatgtggcccctctgcacctgggacccatcgggtcgggatggaccacacggacggggaggctcctggagctgctttgaagatggatgagatgaggggtgtgctctgggtgggaggagcagcgtacacccgtcaccagaacatctcttgtgtcatgacatgggggtgcaacgggggcctcacagcacagagtgaccgctgcctggcgttccccagcactcggtgtggaaaggcccctacctgctgtaagattatgggtccatgaaagcagtaagctggacacagaggtgtagtgtgcgggacagagggccttgcagatgcctttctgttggtgttttagtgttaaaatacggagagtatggaactcttcacctccattttctcagcggctgtgaagcagcctcctagcttcggaagtacggacactacgtcgcgttttcaagcgtgtctgttctgcaggtaacagcatcaagctgcacgtggaagcatctcgcggttttctagaaacaggcattttcttatccctctcccgctcctttttccacaaaggtgaatttcataaatgtaatactagtaaagtgaatgaattactgagtttatacagaaatttaggtaacttctcctttagtctcaagagcgagtcttgctttttaatgggtgccgtttatgttgctgcccgccctgtgtgcctggctcctctgggtgccttggtgtctgctggtggctggcagtgggcgcagcggaggagagttgtgctgcagctcatacggtgtgtctgtcatctcagtctggagtaaatgcagtgtctgccggtgtctgatgggttctgtccctcgtattttctttgccttctatccctgcctggcagccaagggtgttggtcgcgaagctggagtggcctctggtggagcctgcatcttgtctcgtctgcctctgctttacatttggtgtactttcgggcgtggtggcagtaaaatgacaccgtgattgagcttgtcagcagagctgaaagagaaagtagaaggatgtgcattgtttcttgtaagatatcttgcatgtatctgtgtattcaaattcaaacagagatggtttgtccatttgtccactgagaaattataaactagggacaagggggaggaaaagtactgaaatacagtttatgaagcaagtgtgtctcgggctgtgcttgtcccaggagccccagcagcatctgaactgaggcttcttcagtcctgcaggaacaggatcatctgtctcagcggtgggcagatgttttcatagacagccagggagtaaacactgttggctctgtgggctgtatggtctctgccataaatagtacagagatgtggctgtgtctagtacaacttttagacacagaaatctgaatgacatatattgttctgtgtcaagaaacttagattttttttttaactatttaaaaacgtgaaacctattcttagctcacaggccatggagaagctggtggggaccagacccagctccttagctggctgggctggggagggggcagtgacagtggcagctgctactcactgctcagtgtggaaaacacaggacttggcaatcacagcccgcagaaccatcatgtgtggcagaagcctgagggatgcggtttcttgcccacgtgctctgttcattttctgttgtttttctgcacttaaagaattcacatggaagcatgttttataaaatgaattaccagagaaacagagatgggccgagattctcagaaatggtcccatgtgaccaagttctgctgtttgggtgacagtgctttgaagatctcctttgaggatgtgcagtcttttttttttttttttttgagatggagtttgttgcccaggctggagtgagtggcacagtctcggctcactgcaacctccacctcctgggttcaagcagttctcgtgccgcagcctcccaagtagctgggactacaggcatgcgccaccacgccaggctaatttttgtatttttagtagagatggggtttcaccatgtctcaaactcctgacctcaggcgatccacccacctcagcgtcccaaagtgctgggattataggcgtgagccaccgcacctggcctatgagtggtcttttaattaggaacaaatctaatggaaaggagagttgactgaagttggcccacaggattgtgagctgggcagtgccttcatgaaggcttgccaccttgggacgccccagtttactggggtgtcttgcggagtgcagaaggctttctggcagctgcctgggtttggccagaccctgcctcccctcccgccggccaacccctagtccccttcctgtctccacttgcattcaggggtggctgctgttctgagaacattagaactgggaagagagatggagtcacatggatttttggtgggcattattctgaactttcgtatccaagttagtcccccttattccactgtggcattgccgttctaagcagttacctgatgcctgctgctgaagagctgctcacaggaggcggcggcggccctggcactgccccttgcattaggtcttgtgtttgatgtgttcttgtgaatttactttgtcagaacaaaatatttacgcgttgggttcaggaatttcttttagctccccatctggctgtgaaattcaggaaacctcccgttgcctagtaatcaccccatgtaggtgtacattgtgacaaagtgcatctgaccactaaggggcccccttggtgaccccagcacattcacagcagtgttaaaatggcctgcattttggagatgctggctggcctttcagtgcctcccaggaagacacatggcctttccctcttcagatgcctgaagggagtgctttgaggcaggtgatgtgctgggagtgtgggcggcctccctctggccccggggccctctgtggaccttggctccctccgtggacctgggcttcgtggtgagcactgcagcctccctgggcattccctccagcgccagcaccactgcaacatatagacctgagtgctattgtattttggcttggtgtgtatgctcttcattgtgtaaaattgctgttcttttgacaatttaagtgattgttttgtttactgtaagtttgaaaataaaaatgaagaaaaaaattccaatga

SEQ ID NO: 68320 - DNA, 3844 bp, Homo sapiens
  misc_feature (21)..(21): n is a, c, g, or t
  misc_feature (24)..(24): n is a, c, g, or t
  misc_feature (28)..(28): n is a, c, g, or t
  misc_feature (38)..(38): n is a, c, g, or t
  misc_feature (40)..(42): n is a, c, g, or t
  misc_feature (51)..(52): n is a, c, g, or t
  misc_feature (641)..(641): n is a, c, g, or t
tggtacaacgatgtttacgtngtngtcnctacgctgtngnnngctgatcannctcacggactgcctgcgacgattcaccagaccagagcacttgggcagcagcgccaagatcaagtgcagcggttgccatagctaccaggagtccacaaagcagctcactatgaagaaactgcccatcgtagcctgttttcatctcaaacgatttgaacactcagccaagctgcggcggaagatcaccacgtatgtgtccttccccctggagctggacatgacccctttcatggcctccagcaaagagagcaggatgaatggacagtaccagcagcccacggacagtctcaacaatgacaacaagtattccctgtttgctgttgttaaccatcaagggaccttggagagtggccactacaccagctttatccggcagcacaaagaccagtggttcaagtgtgacgatgccatcatcaccaaggccagcatcaaggacgtcctggacagcgaagggtacttgctgttctatcacaaacagttcctggaatacgagtagccttatctgcagctggtcagaaaaacaaaggcaatgcattggcaagcctcacaaagtgatcctccctggccccccccctcccccaagcctcccnccgcctccccggcctggtgacaccacctcccatgcagatgtggcccctctgcacctgggacccatcgggtcgggatggaccacacggacggggaggctcctggagctgctttgaagatggatgagatgaggggtgtgctctgggtgggaggagcagcgtacacccgtcaccagaacatctcttgtgtcatgacatgggggtgcaacgggggcctcacagcacagagtgaccgctgcctggcgttccccagcactcggtgtggaaaggcccctacctgctgtaagattatgggtccatgaaagcagtaagctggacacagaggtgtagtgtgcgggacagagggccttgcagatgcctttctgttggtgttttagtgttaaaatacggagagtatggaactcttcacctccattttctcagcggctgtgaagcagcctcctagcttcggaagtacggacactacgtcgcgttttcaagcgtgtctgttctgcaggtaacagcatcaagctgcacgtggaagcatctcgcggttttctagaaacaggcattttcttatccctctcccgctcctttttccacaaaggtgaatttcataaatgtaatactagtaaagtgaatgaattactgagtttatacagaaatttaggtaacttctcctttagtctcaagagcgagtcttgctttttaatgggtgccgtttatgttgctgcccgccctgtgtgcctggctcctctgggtgccttggtgtctgctggtggctggcagtgggcgcagcggaggagagttgtgctgcagctcatacggtgtgtctgtcatctcagtctggagtaaatgcagtgtctgccggtgtctgatgggttctgtccctcgtattttctttgccttctatcccattgcctggctaccgctgcctggcagccaagggtgttggtcgcgaagctggagtggcctctggtggagcctgcatcttgtctcgtctgcctctgctttacatttggtgtactttcgggcgtggtggcagtaaaatgacaccgtgattgagcttgtcagcagagctgaaagagaaagtagaaggatgtgcattgtttcttgtaagatatcttgcatgtatctgtgtattcaaattcaaacagagatggtttgtccatttgtccactgagaaattataaactagggacaagggggaggaaaagtactgaaatacagtttatgaagcaagtgtgtctcgggctgtgcttgtcccaggagccccagcagcatctgaactgaggcttcttcagtcctgcaggaacaggatcatctgtctcagcggtgggcagatgttttcatagacagccagggagtaaacactgttggctctgtgggctgtatggtctctgccataaatagtacagagatgtggctgtgtctagtacaacttttagacacagaaatctgaatgacatatattgttctgtgtcaagaaacttagattttttttttaactatttaaaaacgtgaaacctattcttagctcacaggccatggagaagctggtggggaccagacccagctccttagctggctgggctggggagggggcagtgacagtggcagctgctactcactgctcagtgtggaaaacacaggacttggcaatcacagcccgcagaaccatcatgtgtggcagaagcctgagggatgcggtttcttgcccacgtgctctgttcattttctgttgtttttctgcacttaaagaattcacatggaagcatgttttataaaatgaattaccagagaaacagagatgggccgagattctcagaaatggtcccatgtgaccaagttctgctgtttgggtgacagtgctttgaagatctcctttgaggatgtgcagtcttttttttttttttttttgagatggagtttgttgcccaggctggagtgagtggcacagtctcggctcactgcaacctccacctcctgggttcaagcagttctcgtgccgcagcctcccaagtagctgggactacaggcatgcgccaccacgccaggctaatttttgtatttttagtagagatggggtttcaccatgtctcaaactcctgacctcaggcgatccacccacctcagcgtcccaaagtgctgggattataggcgtgagccaccgcacctggcctatgagtggtcttttaattaggaacaaatctaatggaaaggagagttgactgaagttggcccacaggattgtgagctgggcagtgccttcatgaaggcttgccaccttgggacgccccagtttactggggtgtcttgcggagtgcagaaggctttctggcagctgcctgggtttggccagaccctgcctcccctcccgccggccaacccctagtccccttcctgtctccacttgcattcaggggtggctgctgttctgagaacattagaactgggaagagagatggagtcacatggatttttggtgggcattattctgaactttcgtatccaagttagtcccccttattccactgtggcattgccgttctaagcagttacctgatgcctgctgctgaagagctgctcacaggaggcggcggcggccctggcactgccccttgcattaggtcttgtgtttgatgtgttcttgtgaatttactttgtcagaacaaaatatttacgcgttgggttcaggaatttcttttagctccccatctggctgtgaaattcaggaaacctcccgttgcctagtaatcaccccatgtaggtgtacattgtgacaaagtgcatctgaccactaaggggcccccttggtgaccccagcacattcacagcagtgttaaaatggcctgcattttggagatgctggctggcctttcagtgcctcccaggaagacacatggcctttccctcttcagatgcctgaagggagtgctttgaggcaggtgatgtgctgggagtgtgggcggcctccctctggccccggggccctctgtggaccttggctccctccgtggacctgggcttcgtggtgagcactgcagcctccctgggcattccctccagcgccagcaccactgcaacatatagacctgagtgctattgtattttggcttggtgtgtatgctcttcattgtgtaaaattgctgttcttttgacaatttaagtgattgttttgtttactgtaagtttgaaaataaaaatgaagaaaaaaattccaatga

SEQ ID NO: 68321 - DNA, 3528 bp, Homo sapiens
  misc_feature (325)..(325): n is a, c, g, or t
gtggctgatctagaggatcccagtgatcatgacaacaagtattccctgtttgctgttgttaaccatcaagggaccttggagagtggccactacaccagctttatccggcagcacaaagaccagtggttcaagtgtgacgatgccatcatcaccaaggccagcatcaaggacgtcctggacagcgaagggtacttgctgttctatcacaaacagttcctggaatacgagtagccttatctgcagctggtcagaaaaacaaaggcaatgcattggcaagcctcacaaagtgatcctccctggccccccccctcccccaagcctcccnccgcctccccggcctggtgacaccacctcccatgcagatgtggcccctctgcacctgggacccatcgggtcgggatggaccacacggacggggaggctcctggagctgctttgaagatggatgagatgaggggtgtgctctgggtgggaggagcagcgtacacccgtcaccagaacatctcttgtgtcatgacatgggggtgcaacgggggcctcacagcacagagtgaccgctgcctggcgttccccagcactcggtgtggaaaggcccctacctgctgtaagattatgggtccatgaaagcagtaagctggacacagaggtgtagtgtgcgggacagagggccttgcagatgcctttctgttggtgttttagtgttaaaatacggagagtatggaactcttcacctccattttctcagcggctgtgaagcagcctcctagcttcggaagtacggacactacgtcgcgttttcaagcgtgtctgttctgcaggtaacagcatcaagctgcacgtggaagcatctcgcggttttctagaaacaggcattttcttatccctctcccgctcctttttccacaaaggtgaatttcataaatgtaatactagtaaagtgaatgaattactgagtttatacagaaatttaggtaacttctcctttagtctcaagagcgagtcttgctttttaatgggtgccgtttatgttgctgcccgccctgtgtgcctggctcctctgggtgccttggtgtctgctggtggctggcagtgggcgcagcggaggagagttgtgctgcagctcatacggtgtgtctgtcatctcagtctggagtaaatgcagtgtctgccggtgtctgatgggttctgtccctcgtattttctttgccttctatcccattgcctggctaccgctgcctggcagccaagggtgttggtcgcgaagctggagtggcctctggtggagcctgcatcttgtctcgtctgcctctgctttacatttggtgtactttcgggcgtggtggcagtaaaatgacaccgtgattgagcttgtcagcagagctgaaagagaaagtagaaggatgtgcattgtttcttgtaagatatcttgcatgtatctgtgtattcaaattcaaacagagatggtttgtccatttgtccactgagaaattataaactagggacaagggggaggaaaagtactgaaatacagtttatgaagcaagtgtgtctcgggctgtgcttgtcccaggagccccagcagcatctgaactgaggcttcttcagtcctgcaggaacaggatcatctgtctcagcggtgggcagatgttttcatagacagccagggagtaaacactgttggctctgtgggctgtatggtctctgccataaatagtacagagatgtggctgtgtctagtacaacttttagacacagaaatctgaatgacatatattgttctgtgtcaagaaacttagattttttttttaactatttaaaaacgtgaaacctattcttagctcacaggccatggagaagctggtggggaccagacccagctccttagctggctgggctggggagggggcagtgacagtggcagctgctactcactgctcagtgtggaaaacacaggacttggcaatcacagcccgcagaaccatcatgtgtggcagaagcctgagggatgcggtttcttgcccacgtgctctgttcattttctgttgtttttctgcacttaaagaattcacatggaagcatgttttataaaatgaattaccagagaaacagagatgggccgagattctcagaaatggtcccatgtgaccaagttctgctgtttgggtgacagtgctttgaagatctcctttgaggatgtgcagtcttttttttttttttttttgagatggagtttgttgcccaggctggagtgagtggcacagtctcggctcactgcaacctccacctcctgggttcaagcagttctcgtgccgcagcctcccaagtagctgggactacaggcatgcgccaccacgccaggctaatttttgtatttttagtagagatggggtttcaccatgtctcaaactcctgacctcaggcgatccacccacctcagcgtcccaaagtgctgggattataggcgtgagccaccgcacctggcctatgagtggtcttttaattaggaacaaatctaatggaaaggagagttgactgaagttggcccacaggattgtgagctgggcagtgccttcatgaaggcttgccaccttgggacgccccagtttactggggtgtcttgcggagtgcagaaggctttctggcagctgcctgggtttggccagaccctgcctcccctcccgccggccaacccctagtccccttcctgtctccacttgcattcaggggtggctgctgttctgagaacattagaactgggaagagagatggagtcacatggatttttggtgggcattattctgaactttcgtatccaagttagtcccccttattccactgtggcattgccgttctaagcagttacctgatgcctgctgctgaagagctgctcacaggaggcggcggcggccctggcactgccccttgcattaggtcttgtgtttgatgtgttcttgtgaatttactttgtcagaacaaaatatttacgcgttgggttcaggaatttcttttagctccccatctggctgtgaaattcaggaaacctcccgttgcctagtaatcaccccatgtaggtgtacattgtgacaaagtgcatctgaccactaaggggcccccttggtgaccccagcacattcacagcagtgttaaaatggcctgcattttggagatgctggctggcctttcagtgcctcccaggaagacacatggcctttccctcttcagatgcctgaagggagtgctttgaggcaggtgatgtgctgggagtgtgggcggcctccctctggccccggggccctctgtggaccttggctccctccgtggacctgggcttcgtggtgagcactgcagcctccctgggcattccctccagcgccagcaccactgcaacatatagacctgagtgctattgtattttggcttggtgtgtatgctcttcattgtgtaaaattgctgttcttttgacaatttaagtgattgttttgtttactgtaagtttgaaaataaaaatgaagaaaaaaattccaatga

SEQ ID NO: 68322 - DNA, 3311 bp, Homo sapiens
ggaggcgggtctgtaccagacggactatactgagagcctatgacaatagccgaaggccaagtcctgtatctgccatgtctgtggcgtccacctcaacaggctgcattcctgcctctactgtgtcttcttcggctgtttcacaaagaagcatattcacgagcatgcgaaggcgaagcggcacaacctggcacacggacggggaggctcctggagctgctttgaagatggatgagatgaggggtgtgctctgggtgggaggagcagcgtacacccgtcaccagaacatctcttgtgtcatgacatgggggtgcaacgggggcctcacagcacagagtgaccgctgcctggcgttccccagcactcggtgtggaaaggcccctacctgctgtaagattatgggtccatgaaagcagtaagctggacacagaggtgtagtgtgcgggacagagggccttgcagatgcctttctgttggtgttttagtgttaaaatacggagagtatggaactcttcacctccattttctcagcggctgtgaagcagcctcctagcttcggaagtacggacactacgtcgcgttttcaagcgtgtctgttctgcaggtaacagcatcaagctgcacgtggaagcatctcgcggttttctagaaacaggcattttcttatccctctcccgctcctttttccacaaaggtgaatttcataaatgtaatactagtaaagtgaatgaattactgagtttatacagaaatttaggtaacttctcctttagtctcaagagcgagtcttgctttttaatgggtgccgtttatgttgctgcccgccctgtgtgcctggctcctctgggtgccttggtgtctgctggtggctggcagtgggcgcagcggaggagagttgtgctgcagctcatacggtgtgtctgtcatctcagtctggagtaaatgcagtgtctgccggtgtctgatgggttctgtccctcgtattttctttgccttctatcccattgcctggctaccgctgcctggcagccaagggtgttggtcgcgaagctggagtggcctctggtggagcctgcatcttgtctcgtctgcctctgctttacatttggtgtactttcgggcgtggtggcagtaaaatgacaccgtgattgagcttgtcagcagagctgaaagagaaagtagaaggatgtgcattgtttcttgtaagatatcttgcatgtatctgtgtattcaaattcaaacagagatggtttgtccatttgtccactgagaaattataaactagggacaagggggaggaaaagtactgaaatacagtttatgaagcaagtgtgtctcgggctgtgcttgtcccaggagccccagcagcatctgaactgaggcttcttcagtcctgcaggaacaggatcatctgtctcagcggtgggcagatgttttcatagacagccagggagtaaacactgttggctctgtgggctgtatggtctctgccataaatagtacagagatgtggctgtgtctagtacaacttttagacacagaaatctgaatgacatatattgttctgtgtcaagaaacttagattttttttttaactatttaaaaacgtgaaacctattcttagctcacaggccatggagaagctggtggggaccagacccagctccttagctggctgggctggggagggggcagtgacagtggcagctgctactcactgctcagtgtggaaaacacaggacttggcaatcacagcccgcagaaccatcatgtgtggcagaagcctgagggatgcggtttcttgcccacgtgctctgttcattttctgttgtttttctgcacttaaagaattcacatggaagcatgttttataaaatgaattaccagagaaacagagatgggccgagattctcagaaatggtcccatgtgaccaagttctgctgtttgggtgacagtgctttgaagatctcctttgaggatgtgcagtcttttttttttttttttttgagatggagtttgttgcccaggctggagtgagtggcacagtctcggctcactgcaacctccacctcctgggttcaagcagttctcgtgccgcagcctcccaagtagctgggactacaggcatgcgccaccacgccaggctaatttttgtatttttagtagagatggggtttcaccatgtctcaaactcctgacctcaggcgatccacccacctcagcgtcccaaagtgctgggattataggcgtgagccaccgcacctggcctatgagtggtcttttaattaggaacaaatctaatggaaaggagagttgactgaagttggcccacaggattgtgagctgggcagtgccttcatgaaggcttgccaccttgggacgccccagtttactggggtgtcttgcggagtgcagaaggctttctggcagctgcctgggtttggccagaccctgcctcccctcccgccggccaacccctagtccccttcctgtctccacttgcattcaggggtggctgctgttctgagaacattagaactgggaagagagatggagtcacatggatttttggtgggcattattctgaactttcgtatccaagttagtcccccttattccactgtggcattgccgttctaagcagttacctgatgcctgctgctgaagagctgctcacaggaggcggcggcggccctggcactgccccttgcattaggtcttgtgtttgatgtgttcttgtgaatttactttgtcagaacaaaatatttacgcgttgggttcaggaatttcttttagctccccatctggctgtgaaattcaggaaacctcccgttgcctagtaatcaccccatgtaggtgtacattgtgacaaagtgcatctgaccactaaggggcccccttggtgaccccagcacattcacagcagtgttaaaatggcctgcattttggagatgctggctggcctttcagtgcctcccaggaagacacatggcctttccctcttcagatgcctgaagggagtgctttgaggcaggtgatgtgctgggagtgtgggcggcctccctctggccccggggccctctgtggaccttggctccctccgtggacctgggcttcgtggtgagcactgcagcctccctgggcattccctccagcgccagcaccactgcaacatatagacctgagtgctattgtattttggcttggtgtgtatgctcttcattgtgtaaaattgctgttcttttgacaatttaagtgattgttttgtttactgtaagtttgaaaataaaaatgaagaaaaaaattccaatga

SEQ ID NO: 68323 - DNA, 2700 bp, Homo sapiens
cacgaggaatttcagtaattcattcactttactagtattacatttatgaaattcacctttgtggaaaaaggagcgggagagggataagaaaatgcctgtttctagtaaagtgaatgaattactgagtttatacagaaatttaggtaacttctcctttagtctcaagagcgagtcttgctttttaatgggtgccgtttatgttgctgcccgccctgtgtgcctggctcctctgggtgccttggtgtctgctggtggctggcagtgggcgcagcggaggagagttgtgctgcagctcatacggtgtgtctgtcatctcagtctggagtaaatgcagtgtctgccggtgtctgatgggttctgtccctcgtattttctttgccttctatcccattgcctggctaccgctgcctggcagccaagggtgttggtcgcgaagctggagtggcctctggtggagcctgcatcttgtctcgtctgcctctgctttacatttggtgtactttcgggcgtggtggcagtaaaatgacaccgtgattgagcttgtcagcagagctgaaagagaaagtagaaggatgtgcattgtttcttgtaagatatcttgcatgtatctgtgtattcaaattcaaacagagatggtttgtccatttgtccactgagaaattataaactagggacaagggggaggaaaagtactgaaatacagtttatgaagcaagtgtgtctcgggctgtgcttgtcccaggagccccagcagcatctgaactgaggcttcttcagtcctgcaggaacaggatcatctgtctcagcggtgggcagatgttttcatagacagccagggagtaaacactgttggctctgtgggctgtatggtctctgccataaatagtacagagatgtggctgtgtctagtacaacttttagacacagaaatctgaatgacatatattgttctgtgtcaagaaacttagattttttttttaactatttaaaaacgtgaaacctattcttagctcacaggccatggagaagctggtggggaccagacccagctccttagctggctgggctggggagggggcagtgacagtggcagctgctactcactgctcagtgtggaaaacacaggacttggcaatcacagcccgcagaaccatcatgtgtggcagaagcctgagggatgcggtttcttgcccacgtgctctgttcattttctgttgtttttctgcacttaaagaattcacatggaagcatgttttataaaatgaattaccagagaaacagagatgggccgagattctcagaaatggtcccatgtgaccaagttctgctgtttgggtgacagtgctttgaagatctcctttgaggatgtgcagtcttttttttttttttttttgagatggagtttgttgcccaggctggagtgagtggcacagtctcggctcactgcaacctccacctcctgggttcaagcagttctcgtgccgcagcctcccaagtagctgggactacaggcatgcgccaccacgccaggctaatttttgtatttttagtagagatggggtttcaccatgtctcaaactcctgacctcaggcgatccacccacctcagcgtcccaaagtgctgggattataggcgtgagccaccgcacctggcctatgagtggtcttttaattaggaacaaatctaatggaaaggagagttgactgaagttggcccacaggattgtgagctgggcagtgccttcatgaaggcttgccaccttgggacgccccagtttactggggtgtcttgcggagtgcagaaggctttctggcagctgcctgggtttggccagaccctgcctcccctcccgccggccaacccctagtccccttcctgtctccacttgcattcaggggtggctgctgttctgagaacattagaactgggaagagagatggagtcacatggatttttggtgggcattattctgaactttcgtatccaagttagtcccccttattccactgtggcattgccgttctaagcagttacctgatgcctgctgctgaagagctgctcacaggaggcggcggcggccctggcactgccccttgcattaggtcttgtgtttgatgtgttcttgtgaatttactttgtcagaacaaaatatttacgcgttgggttcaggaatttcttttagctccccatctggctgtgaaattcaggaaacctcccgttgcctagtaatcaccccatgtaggtgtacattgtgacaaagtgcatctgaccactaaggggcccccttggtgaccccagcacattcacagcagtgttaaaatggcctgcattttggagatgctggctggcctttcagtgcctcccaggaagacacatggcctttccctcttcagatgcctgaagggagtgctttgaggcaggtgatgtgctgggagtgtgggcggcctccctctggccccggggccctctgtggaccttggctccctccgtggacctgggcttcgtggtgagcactgcagcctccctgggcattccctccagcgccagcaccactgcaacatatagacctgagtgctattgtattttggcttggtgtgtatgctcttcattgtgtaaaattgctgttcttttgacaatttaagtgattgttttgtttactgtaagtttgaaaataaaaatgaagaaaaaaattccaatga

SEQ ID NO: 68324 - DNA, 2617 bp, Homo sapiens
ggggaggggaggaaaccaaacgggcctaggagcgaggcctggggtggcgcagaaatttaggtaacttctcctttagtctcaagagcgagtcttgctttttaatgggtgccgtttatgttgctgcccgccctgtgtgcctggctcctctgggtgccttggtgtctgctggtggctggcagtgggcgcagcggaggagagttgtgctgcagctcatacggtgtgtctgtcatctcagtctggagtaaatgcagtgtctgccggtgtctgatgggttctgtccctcgtattttctttgccttctatcccattgcctggctaccgctgcctggcagccaagggtgttggtcgcgaagctggagtggcctctggtggagcctgcatcttgtctcgtctgcctctgctttacatttggtgtactttcgggcgtggtggcagtaaaatgacaccgtgattgagcttgtcagcagagctgaaagagaaagtagaaggatgtgcattgtttcttgtaagatatcttgcatgtatctgtgtattcaaattcaaacagagatggtttgtccatttgtccactgagaaattataaactagggacaagggggaggaaaagtactgaaatacagtttatgaagcaagtgtgtctcgggctgtgcttgtcccaggagccccagcagcatctgaactgaggcttcttcagtcctgcaggaacaggatcatctgtctcagcggtgggcagatgttttcatagacagccagggagtaaacactgttggctctgtgggctgtatggtctctgccataaatagtacagagatgtggctgtgtctagtacaacttttagacacagaaatctgaatgacatatattgttctgtgtcaagaaacttagattttttttttaactatttaaaaacgtgaaacctattcttagctcacaggccatggagaagctggtggggaccagacccagctccttagctggctgggctggggagggggcagtgacagtggcagctgctactcactgctcagtgtggaaaacacaggacttggcaatcacagcccgcagaaccatcatgtgtggcagaagcctgagggatgcggtttcttgcccacgtgctctgttcattttctgttgtttttctgcacttaaagaattcacatggaagcatgttttataaaatgaattaccagagaaacagagatgggccgagattctcagaaatggtcccatgtgaccaagttctgctgtttgggtgacagtgctttgaagatctcctttgaggatgtgcagtcttttttttttttttttttgagatggagtttgttgcccaggctggagtgagtggcacagtctcggctcactgcaacctccacctcctgggttcaagcagttctcgtgccgcagcctcccaagtagctgggactacaggcatgcgccaccacgccaggctaatttttgtatttttagtagagatggggtttcaccatgtctcaaactcctgacctcaggcgatccacccacctcagcgtcccaaagtgctgggattataggcgtgagccaccgcacctggcctatgagtggtcttttaattaggaacaaatctaatggaaaggagagttgactgaagttggcccacaggattgtgagctgggcagtgccttcatgaaggcttgccaccttgggacgccccagtttactggggtgtcttgcggagtgcagaaggctttctggcagctgcctgggtttggccagaccctgcctcccctcccgccggccaacccctagtccccttcctgtctccacttgcattcaggggtggctgctgttctgagaacattagaactgggaagagagatggagtcacatggatttttggtgggcattattctgaactttcgtatccaagttagtcccccttattccactgtggcattgccgttctaagcagttacctgatgcctgctgctgaagagctgctcacaggaggcggcggcggccctggcactgccccttgcattaggtcttgtgtttgatgtgttcttgtgaatttactttgtcagaacaaaatatttacgcgttgggttcaggaatttcttttagctccccatctggctgtgaaattcaggaaacctcccgttgcctagtaatcaccccatgtaggtgtacattgtgacaaagtgcatctgaccactaaggggcccccttggtgaccccagcacattcacagcagtgttaaaatggcctgcattttggagatgctggctggcctttcagtgcctcccaggaagacacatggcctttccctcttcagatgcctgaagggagtgctttgaggcaggtgatgtgctgggagtgtgggcggcctccctctggccccggggccctctgtggaccttggctccctccgtggacctgggcttcgtggtgagcactgcagcctccctgggcattccctccagcgccagcaccactgcaacatatagacctgagtgctattgtattttggcttggtgtgtatgctcttcattgtgtaaaattgctgttcttttgacaatttaagtgattgttttgtttactgtaagtttgaaaataaaaatgaagaaaaaaattccaatga

SEQ ID NO: 68325 - DNA, 5053 bp, Homo sapiens
  misc_feature (1896)..(1896): n is a, c, g, or t
gagcggagtgcggtccgcagcagccgcagctcgggggcggtgcctgccttgcagcctcccctcggcgatcgcgcagccccatctttgtccggcctccgcgctttgttctcggcgcccgggccttggccagcctggccagccgccgagcagcccccacgccgcgctggcgtcgtcctcgcctccctcgccgccgccccccgcgcgctggccgggccttgccccccatggtgtcccggccagagcccgagggcgaggccatggacgccgagctggcggtagcgccgccgggctgctcgcacctgggcagcttcaaggtggacaactggaagcagaacctgcgggccatctaccagtgcttcgtgtggagcggcacggctgaggcccgcaagcgcaaggccaagtcctgtatctgccatgtctgtggcgtccacctcaacaggctgcattcctgcctctactgtgtcttcttcggctgtttcacaaagaagcatattcacgagcatgcgaaggcgaagcggcacaacctggccattgatctgatgtatggaggcatctactgttttctgtgccaggactacatctatgacaaagacatggaaataatcgccaaggaggagcagcgaaaagcttggaaaatgcaaggcgttggagagaagttttcaacttgggaaccaaccaaacgggagcttgaactgctgaagcacaacccgaaaaggagaaagatcacctcgaactgcaccataggtctgcgtgggctgatcaaccttgggaacacatgcttcatgaactgcatcgtgcaggccctgacccacacgccacttctgcgggacttcttcctgtctgacaggcaccgctgtgagatgcagagccccagctcctgtctggtctgtgagatgtcctcactgtttcaggagttttactctggacaccggtcccctcacatcccgtataagttgctgcacctggtgtggacccacgcgaggcacctagcaggctacgagcagcaggacgcccacgagttcctcatcgcggccctggacgtgctccaccgacactgcaaaggtgatgacaatgggaagaaggccaacaaccccaaccactgcaactgcatcatagaccagatcttcacaggcgggttgcagtcagacgtcacctgccaagtctgccatggagtctccaccaccatcgaccccttctgggacatcagcttggatctccccggctcttccaccccattctggcccctgagcccagggagcgagggcaacgtggtaaacggggaaagccacgtgtcgggaaccaccacgctcacggactgcctgcgacgattcaccagaccagagcacttgggcagcagcgccaagatcaagtgcagcggttgccatagctaccaggagtccacaaagcagctcactatgaagaaactgcccatcgtagcctgttttcatctcaaacgatttgaacactcagccaagctgcggcggaagatcaccacgtatgtgtccttccccctggagctggacatgacccctttcatggcctccagcaaagagagcaggatgaatggacagtaccagcagcccacggacagtctcaacaatgacaacaagtattccctgtttgctgttgttaaccatcaagggaccttggagagtggccactacaccagctttatccggcagcacaaagaccagtggttcaagtgtgacgatgccatcatcaccaaggccagcatcaaggacgtcctggacagcgaagggtacttgctgttctatcacaaacagttcctggaatacgagtagccttatctgcagctggtcagaaaaacaaaggcaatgcattggcaagcctcacaaagtgatcctccctggccccccccctcccccaagcctcccnccgcctccccggcctggtgacaccacctcccatgcagatgtggcccctctgcacctgggacccatcgggtcgggatggaccacacggacggggaggctcctggagctgctttgaagatggatgagatgaggggtgtgctctgggtgggaggagcagcgtacacccgtcaccagaacatctcttgtgtcatgacatgggggtgcaacgggggcctcacagcacagagtgaccgctgcctggcgttccccagcactcggtgtggaaaggcccctacctgctgtaagattatgggtccatgaaagcagtaagctggacacagaggtgtagtgtgcgggacagagggccttgcagatgcctttctgttggtgttttagtgttaaaatacggagagtatggaactcttcacctccattttctcagcggctgtgaagcagcctcctagcttcggaagtacggacactacgtcgcgttttcaagcgtgtctgttctgcaggtaacagcatcaagctgcacgtggaagcatctcgcggttttctagaaacaggcattttcttatccctctcccgctcctttttccacaaaggtgaatttcataaatgtaatactagtaaagtgaatgaattactgagtttatacagaaatttaggtaacttctcctttagtctcaagagcgagtcttgctttttaatgggtgccgtttatgttgctgcccgccctgtgtgcctggctcctctgggtgccttggtgtctgctggtggctggcagtgggcgcagcggaggagagttgtgctgcagctcatacggtgtgtctgtcatctcagtctggagtaaatgcagtgtctgccggtgtctgatgggttctgtccctcgtattttctttgccttctatcccattgcctggctaccgctgcctggcagccaagggtgttggtcgcgaagctggagtggcctctggtggagcctgcatcttgtctcgtctgcctctgctttacatttggtgtactttcgggcgtggtggcagtaaaatgacaccgtgattgagcttgtcagcagagctgaaagagaaagtagaaggatgtgcattgtttcttgtaagatatcttgcatgtatctgtgtattcaaattcaaacagagatggtttgtccatttgtccactgagaaattataaactagggacaagggggaggaaaagtactgaaatacagtttatgaagcaagtgtgtctcgggctgtgcttgtcccaggagccccagcagcatctgaactgaggcttcttcagtcctgcaggaacaggatcatctgtctcagcggtgggcagatgttttcatagacagccagggagtaaacactgttggctctgtgggctgtatggtctctgccataaatagtacagagatgtggctgtgtctagtacaacttttagacacagaaatctgaatgacatatattgttctgtgtcaagaaacttagattttttttttaactatttaaaaacgtgaaacctattcttagctcacaggccatggagaagctggtggggaccagacccagctccttagctggctgggctggggagggggcagtgacagtggcagctgctactcactgctcagtgtggaaaacacaggacttggcaatcacagcccgcagaaccatcatgtgtggcagaagcctgagggatgcggtttcttgcccacgtgctctgttcattttctgttgtttttctgcacttaaagaattcacatggaagcatgttttataaaatgaattaccagagaaacagagatgggccgagattctcagaaatggtcccatgtgaccaagttctgctgtttgggtgacagtgctttgaagatctcctttgaggatgtgcagtcttttttttttttttttttgagatggagtttgttgcccaggctggagtgagtggcacagtctcggctcactgcaacctccacctcctgggttcaagcagttctcgtgccgcagcctcccaagtagctgggactacaggcatgcgccaccacgccaggctaatttttgtatttttagtagagatggggtttcaccatgtctcaaactcctgacctcaggcgatccacccacctcagcgtcccaaagtgctgggattataggcgtgagccaccgcacctggcctatgagtggtcttttaattaggaacaaatctaatggaaaggagagttgactgaagttggcccacaggattgtgagctgggcagtgccttcatgaaggcttgccaccttgggacgccccagtttactggggtgtcttgcggagtgcagaaggctttctggcagctgcctgggtttggccagaccctgcctcccctcccgccggccaacccctagtccccttcctgtctccacttgcattcaggggtggctgctgttctgagaacattattctgaactttcgtatccaagttagtcccccttattccactgtggcattgccgttctaagcagttacctgatgcctgctgctgaagagctgctcacaggaggcggcggcggccctggcactgccccttgcattaggtcttgtgtttgatgtgttcttgtgaatttactttgtcagaacaaaatatttacgcgttgggttcaggaatttcttttagctccccatctggctgtgaaattcaggaaacctcccgttgcctagtaatcaccccatgtaggtgtacattgtgacaaagtgcatctgaccactaaggggcccccttggtgaccccagcacattcacagcagtgttaaaatggcctgcattttggagatgctggctggcctttcagtgcctcccaggaagacacatggcctttccctcttcagatgcctgaagggagtgctttgaggcaggtgatgtgctgggagtgtgggcggcctccctctggccccggggccctctgtggaccttggctccctccgtggacctgggcttcgtggtgagcactgcagcctccctgggcattccctccagcgccagcaccactgcaacatatagacctgagtgctattgtattttggcttggtgtgtatgctcttcattgtgtaaaattgctgttcttttgacaatttaagtgattgttttgtttactgtaagtttgaaaataaaaatgaagaaaaaaattccaatga

SEQ ID NO: 68326 - DNA, 5053 bp, Homo sapiens
  misc_feature (1896)..(1896): n is a, c, g, or t
gagcggagtgcggtccgcagcagccgcagctcgggggcggtgcctgccttgcagcctcccctcggcgatcgcgcagccccatctttgtccggcctccgcgctttgttctcggcgcccgggccttggccagcctggccagccgccgagcagcccccacgccgcgctggcgtcgtcctcgcctccctcgccgccgccccccgcgcgctggccgggccttgccccccatggtgtcccggccagagcccgagggcgaggccatggacgccgagctggcggtagcgccgccgggctgctcgcacctgggcagcttcaaggtggacaactggaagcagaacctgcgggccatctaccagtgcttcgtgtggagcggcacggctgaggcccgcaagcgcaaggccaagtcctgtatctgccatgtctgtggcgtccacctcaacaggctgcattcctgcctctactgtgtcttcttcggctgtttcacaaagaagcatattcacgagcatgcgaaggcgaagcggcacaacctggccattgatctgatgtatggaggcatctactgttttctgtgccaggactacatctatgacaaagacatggaaataatcgccaaggaggagcagcgaaaagcttggaaaatgcaaggcgttggagagaagttttcaacttgggaaccaaccaaacgggagcttgaactgctgaagcacaacccgaaaaggagaaagatcacctcgaactgcaccataggtctgcgtgggctgatcaaccttgggaacacatgcttcatgaactgcatcgtgcaggccctgacccacacgccacttctgcgggacttcttcctgtctgacaggcaccgctgtgagatgcagagccccagctcctgtctggtctgtgagatgtcctcactgtttcaggagttttactctggacaccggtcccctcacatcccgtataagttgctgcacctggtgtggacccacgcgaggcacctagcaggctacgagcagcaggacgcccacgagttcctcatcgcggccctggacgtgctccaccgacactgcaaaggtgatgacaatgggaagaaggccaacaaccccaaccactgcaactgcatcatagaccagatcttcacaggcgggttgcagtcagacgtcacctgccaagtctgccatggagtctccaccaccatcgaccccttctgggacatcagcttggatctccccggctcttccaccccattctggcccctgagcccagggagcgagggcaacgtggtaaacggggaaagccacgtgtcgggaaccaccacgctcacggactgcctgcgacgattcaccagaccagagcacttgggcagcagcgccaagatcaagtgcagcggttgccatagctaccaggagtccacaaagcagctcactatgaagaaactgcccatcgtagcctgttttcatctcaaacgatttgaacactcagccaagctgcggcggaagatcaccacgtatgtgtccttccccctggagctggacatgacccctttcatggcctccagcaaagagagcaggatgaatggacagtaccagcagcccacggacagtctcaacaatgacaacaagtattccctgtttgctgttgttaaccatcaagggaccttggagagtggccactacaccagctttatccggcagcacaaagaccagtggttcaagtgtgacgatgccatcatcaccaaggccagcatcaaggacgtcctggacagcgaagggtacttgctgttctatcacaaacagttcctggaatacgagtagccttatctgcagctggtcagaaaaacaaaggcaatgcattggcaagcctcacaaagtgatcctccctggccccccccctcccccaagcctcccnccgcctccccggcctggtgacaccacctcccatgcagatgtggcccctctgcacctgggacccatcgggtcgggatggaccacacggacggggaggctcctggagctgctttgaagatggatgagatgaggggtgtgctctgggtgggaggagcagcgtacacccgtcaccagaacatctcttgtgtcatgacatgggggtgcaacgggggcctcacagcacagagtgaccgctgcctggcgttccccagcactcggtgtggaaaggcccctacctgctgtaagattatgggtccatgaaagcagtaagctggacacagaggtgtagtgtgcgggacagagggccttgcagatgcctttctgttggtgttttagtgttaaaatacggagagtatggaactcttcacctccattttctcagcggctgtgaagcagcctcctagcttcggaagtacggacactacgtcgcgttttcaagcgtgtctgttctgcaggtaacagcatcaagctgcacgtggaagcatctcgcggttttctagaaacaggcattttcttatccctctcccgctcctttttccacaaaggtgaatttcataaatgtaatactagtaaagtgaatgaattactgagtttatacagaaatttaggtaacttctcctttagtctcaagagcgagtcttgctttttaatgggtgccgtttatgttgctgcccgccctgtgtgcctggctcctctgggtgccttggtgtctgctggtggctggcagtgggcgcagcggaggagagttgtgctgcagctcatacggtgtgtctgtcatctcagtctggagtaaatgcagtgtctgccggtgtctgatgggttctgtccctcgtattttctttgccttctatcccattgcctggctaccgctgcctggcagccaagggtgttggtcgcgaagctggagtggcctctggtggagcctgcatcttgtctcgtctgcctctgctttacatttggtgtactttcgggcgtggtggcagtaaaatgacaccgtgattgagcttgtcagcagagctgaaagagaaagtagaaggatgtgcattgtttcttgtaagatatcttgcatgtatctgtgtattcaaattcaaacagagatggtttgtccatttgtccactgagaaattataaactagggacaagggggaggaaaagtactgaaatacagtttatgaagcaagtgtgtctcgggctgtgcttgtcccaggagccccagcagcatctgaactgaggcttcttcagtcctgcaggaacaggatcatctgtctcagcggtgggcagatgttttcatagacagccagggagtaaacactgttggctctgtgggctgtatggtctctgccataaatagtacagagatgtggctgtgtctagtacaacttttagacacagaaatctgaatgacatatattgttctgtgtcaagaaacttagattttttttttaactatttaaaaacgtgaaacctattcttagctcacaggccatggagaagctggtggggaccagacccagctccttagctggctgggctggggagggggcagtgacagtggcagctgctactcactgctcagtgtggaaaacacaggacttggcaatcacagcccgcagaaccatcatgtgtggcagaagcctgagggatgcggtttcttgcccacgtgctctgttcattttctgttgtttttctgcacttaaagaattcacatggaagcatgttttataaaatgaattaccagagaaacagagatgggccgagattctcagaaatggtcccatgtgaccaagttctgctgtttgggtgacagtgctttgaagatctcctttgaggatgtgcagtcttttttttttttttttttgagatggagtttgttgcccaggctggagtgagtggcacagtctcggctcactgcaacctccacctcctgggttcaagcagttctcgtgccgcagcctcccaagtagctgggactacaggcatgcgccaccacgccaggctaatttttgtatttttagtagagatggggtttcaccatgtctcaaactcctgacctcaggcgatccacccacctcagcgtcccaaagtgctgggattataggcgtgagccaccgcacctggcctatgagtggtcttttaattaggaacaaatctaatggaaaggagagttgactgaagttggcccacaggattgtgagctgggcagtgccttcatgaaggcttgccaccttgggacgccccagtttactggggtgtcttgcggagtgcagaaggctttctggcagctgcctgggtttggccagaccctgcctcccctcccgccggccaacccctagtccccttcctgtctccacttgcattcaggggtggctgctgttctgagaacattagaactgggaagagagatggagtcacatggatttttggtgggcattattctgaactttcgtatccaagttagtcccccttattccactgtggcattgccgttctaagcagttacctgatgcctgctgctgaagagctgctcacaggaggcggcggcggccctggcactgccccttgcattaggtcttgtgtttgatgtgttcttgtgaatttactttgtcagaacaaaatatttacgcgttgggttcaggaatttcttttagctccccatctggctgtgaaattcaggaaacctcccgttgcctagtaatcaccccatgtaggtgtacattgtgacaaagtgcatctgaccactaaggggcccccttggtgaccccagcacattcacagcagtgttaaaatggcctgcattttggagatgctggctggcctttcagtgcctcccaggaagacacatgatgtgctgggagtgtgggcggcctccctctggccccggggccctctgtggaccttggctccctccgtggacctgggcttcgtggtgagcactgcagcctccctgggcattccctccagcgccagcaccactgcaacatatagacctgagtgctattgtattttggcttggtgtgtatgctcttcattgtgtaaaattgctgttcttttgacaatttaagtgattgttttgtttactgtaagtttgaaaataaaaatgaagaaaaaaattccaatga

SEQ ID NO: 68327 - DNA, 4800 bp, Homo sapiens
  misc_feature (1896)..(1896): n is a, c, g, or t
gagcggagtgcggtccgcagcagccgcagctcgggggcggtgcctgccttgcagcctcccctcggcgatcgcgcagccccatctttgtccggcctccgcgctttgttctcggcgcccgggccttggccagcctggccagccgccgagcagcccccacgccgcgctggcgtcgtcctcgcctccctcgccgccgccccccgcgcgctggccgggccttgccccccatggtgtcccggccagagcccgagggcgaggccatggacgccgagctggcggtagcgccgccgggctgctcgcacctgggcagcttcaaggtggacaactggaagcagaacctgcgggccatctaccagtgcttcgtgtggagcggcacggctgaggcccgcaagcgcaaggccaagtcctgtatctgccatgtctgtggcgtccacctcaacaggctgcattcctgcctctactgtgtcttcttcggctgtttcacaaagaagcatattcacgagcatgcgaaggcgaagcggcacaacctggccattgatctgatgtatggaggcatctactgttttctgtgccaggactacatctatgacaaagacatggaaataatcgccaaggaggagcagcgaaaagcttggaaaatgcaaggcgttggagagaagttttcaacttgggaaccaaccaaacgggagcttgaactgctgaagcacaacccgaaaaggagaaagatcacctcgaactgcaccataggtctgcgtgggctgatcaaccttgggaacacatgcttcatgaactgcatcgtgcaggccctgacccacacgccacttctgcgggacttcttcctgtctgacaggcaccgctgtgagatgcagagccccagctcctgtctggtctgtgagatgtcctcactgtttcaggagttttactctggacaccggtcccctcacatcccgtataagttgctgcacctggtgtggacccacgcgaggcacctagcaggctacgagcagcaggacgcccacgagttcctcatcgcggccctggacgtgctccaccgacactgcaaaggtgatgacaatgggaagaaggccaacaaccccaaccactgcaactgcatcatagaccagatcttcacaggcgggttgcagtcagacgtcacctgccaagtctgccatggagtctccaccaccatcgaccccttctgggacatcagcttggatctccccggctcttccaccccattctggcccctgagcccagggagcgagggcaacgtggtaaacggggaaagccacgtgtcgggaaccaccacgctcacggactgcctgcgacgattcaccagaccagagcacttgggcagcagcgccaagatcaagtgcagcggttgccatagctaccaggagtccacaaagcagctcactatgaagaaactgcccatcgtagcctgttttcatctcaaacgatttgaacactcagccaagctgcggcggaagatcaccacgtatgtgtccttccccctggagctggacatgacccctttcatggcctccagcaaagagagcaggatgaatggacagtaccagcagcccacggacagtctcaacaatgacaacaagtattccctgtttgctgttgttaaccatcaagggaccttggagagtggccactacaccagctttatccggcagcacaaagaccagtggttcaagtgtgacgatgccatcatcaccaaggccagcatcaaggacgtcctggacagcgaagggtacttgctgttctatcacaaacagttcctggaatacgagtagccttatctgcagctggtcagaaaaacaaaggcaatgcattggcaagcctcacaaagtgatcctccctggccccccccctcccccaagcctcccnccgcctccccggcctggtgacaccacctcccatgcagatgtggcccctctgcacctgggacccatcgggtcgggatggaccacacggacggggaggctcctggagctgctttgaagatggatgagatgaggggtgtgctctgggtgggaggagcagcgtacacccgtcaccagaacatctcttgtgtcatgacatgggggtgcaacgggggcctcacagcacagagtgaccgctgcctggcgttccccagcactcggtgtggaaaggcccctacctgctgtaagattatgggtccatgaaagcagtaagctggacacagaggtgtagtgtgcgggacagagggccttgcagatgcctttctgttggtgttttagtgttaaaatacggagagtatggaactcttcacctccattttctcagcggctgtgaagcagcctcctagcttcggaagtacggacactacgtcgcgttttcaagcgtgtctgttctgcaggtaacagcatcaagctgcacgtggaagcatctcgcggttttctagaaacaggcattttcttatccctctcccgctcctttttccacaaaggtgaatttcataaatgtaatactagtaaagtgaatgaattactgagtttatacagaaatttaggtaacttctcctttagtctcaagagcgagtcttgctttttaatgggtgccgtttatgttgctgcccgccctgtgtgcctggctcctctgggtgccttggtgtctgctggtggctggcagtgggcgcagcggaggagagttgtgctgcagctcatacggtgtgtctgtcatctcagtctggagtaaatgcagtgtctgccggtgtctgatgggttctgtccctcgtattttctttgccttctatcccattgcctggctaccgctgcctggcagccaagggtgttggtcgcgaagctggagtggcctctggtggagcctgcatcttgtctcgtctgcctctgctttacatttggtgtactttcgggcgtggtggcagtaaaatgacaccgtgattgagcttgtcagcagagctgaaagagaaagtagaaggatgtgcattgtttcttgtaagatatcttgcatgtatctgtgtattcaaattcaaacagagatggtttgtccatttgtccactgagaaattataaactagggacaagggggaggaaaagtactgaaatacagtttatgaagcaagtgtgtctcgggctgtgcttgtcccaggagccccagcagcatctgaactgaggcttcttcagtcctgcaggaacaggatcatctgtctcagcggtgggcagatgttttcatagacagccagggagtaaacactgttggctctgtgggctgtatggtctctgccataaatagtacagagatgtggctgtgtctagtacaacttttagacacagaaatctgaatgacatatattgttctgtgtcaagaaacttagattttttttttaactatttaaaaacgtgaaacctattcttagctcacaggccatggagaagctggtggggaccagacccagctccttagctggctgggctggggagggggcagtgacagtggcagctgctactcactgctcagtgtggaaaacacaggacttggcaatcacagcccgcagaaccatcatgtgtggcagaagcctgagggatgcggtttcttgcccacgtgctctgttcattttctgttgtttttctgcacttaaagaattcacatggaagcatgttttataaaatgaattaccagagaaacagagatgggccgagattctcagaaatggtcccatgtgaccaagttctgctgtttgggtgacagtgctttgaagatctcctttgaggatgtgcagtcttttttttttttttttttgagatggagtttgttgcccaggctggagtgagtggcacagtctcggctcactgcaacctccacctcctgggttcaagcagttctcgtgccgcagcctcccaagtagctgggactacaggcatgcgccaccacgccaggctaatttttgtatttttagtagagatggggtttcaccatgtctcaaactcctgacctcaggcgatccacccacctcagcgtcccaaagtgctgggattataggcgtgagccaccgcacctggcctatgagtggtcttttaattaggaacaaatctaatggaaaggagagttgactgaagttggcccacaggattgtgagctgggcagtgccttcatgaaggcttgccaccttgggacgccccagtttactggggtgtcttgcggagtgcagaaggctttctggcagctgcctgggtttggccagaccctgcctcccctcccgccggccaacccctagtccccttcctgtctccacttgcattcaggggtggctgctgttctgagaacattagaactgggaagagagatggagtcacatggatttttggtgggcattattctgaactttcgtatccaagttagtcccccttattccactgtggcattgccgttctaagcagttacctgatgcctgctgctgaagagctgctcacaggaggcggcggcggccctggcactgccccttgcattaggtcttgtgtttgatgtgttcttgtgaatttactttgtcagaacaaaatatttacgcgttgggttcaggaatttcttttagctccccatctggctgtgaaattcaggaaacctcccgttgcctagtaatcaccccatgtaggtgtacattgtgacaaagtgcatctgaccactaaggggcccccttggtgaccccagcacattcacagcagtgttaaaatggcctgcattttggagatgctggctggcctttcagtgcctcccaggaagacacattcatcggacggggggaatcctcta

SEQ ID NO: 68328 - DNA, 1652 bp, Homo sapiens
cggacggcgtgggtcgcccacgcgttggggcagtgacagtggcagctgctactcactgctcagtgtggaaaacacaggacttggcaatcacagcccgcagaaccatcatgtgtggcagaagcctgagggatgcggtttcttgcccacgtgctctgttcattttctgttgtttttctgcacttaaagaattcacatggaagcatgttttataaaatgaattaccagagaaacagagatgggccgagattctcagaaatggtcccatgtgaccaagttctgctgtttgggtgacagtgctttgaagatctcctttgaggatgtgcagtcttttttttttttttttttgagatggagtttgttgcccaggctggagtgagtggcacagtctcggctcactgcaacctccacctcctgggttcaagcagttctcgtgccgcagcctcccaagtagctgggactacaggcatgcgccaccacgccaggctaatttttgtatttttagtagagatggggtttcaccatgtctcaaactcctgacctcaggcgatccacccacctcagcgtcccaaagtgctgggattataggcgtgagccaccgcacctggcctatgagtggtcttttaattaggaacaaatctaatggaaaggagagttgactgaagttggcccacaggattgtgagctgggcagtgccttcatgaaggcttgccaccttgggacgccccagtttactggggtgtcttgcggagtgcagaaggctttctggcagctgcctgggtttggccagaccctgcctcccctcccgccggccaacccctagtccccttcctgtctccacttgcattcaggggtggctgctgttctgagaacattagaactgggaagagagatggagtcacatggatttttggtgggcattattctgaactttcgtatccaagttagtcccccttattccactgtggcattgccgttctaagcagttacctgatgcctgctgctgaagagctgctcacaggaggcggcggcggccctggcactgccccttgcattaggtcttgtgtttgatgtgttcttgtgaatttactttgtcagaacaaaatatttacgcgttgggttcaggaatttcttttagctccccatctggctgtgaaattcaggaaacctcccgttgcctagtaatcaccccatgtaggtgtacattgtgacaaagtgcatctgaccactaaggggcccccttggtgaccccagcacattcacagcagtgttaaaatggcctgcattttggagatgctggctggcctttcagtgcctcccaggaagacacatggcctttccctcttcagatgcctgaagggagtgctttgaggcaggtgatgtgctgggagtgtgggcggcctccctctggccccggggccctctgtggaccttggctccctccgtggacctgggcttcgtggtgagcactgcagcctccctgggcattccctccagcgccagcaccactgcaacatatagacctgagtgctattgtattttggcttggtgtgtatgctcttcattgtgtaaaattgctgttcttttgacaatttaagtgattgttttgtttactgtaagtttgaaaataaaaatgaagaaaaaaattccaatga

SEQ ID NO: 68329 - DNA, 1466 bp, Homo sapiens
aaatcagctcggtaccaaaagccatttctgaattaccagagaaacagagatgggccgagattctcagaaatggtcccatgtgaccaagttctgctgtttgggtgacagtgctttgaagatctcctttgaggatgtgcagtcttttttttttttttttttgagatggagtttgttgcccaggctggagtgagtggcacagtctcggctcactgcaacctccacctcctgggttcaagcagttctcgtgccgcagcctcccaagtagctgggactacaggcatgcgccaccacgccaggctaatttttgtatttttagtagagatggggtttcaccatgtctcaaactcctgacctcaggcgatccacccacctcagcgtcccaaagtgctgggattataggcgtgagccaccgcacctggcctatgagtggtcttttaattaggaacaaatctaatggaaaggagagttgactgaagttggcccacaggattgtgagctgggcagtgccttcatgaaggcttgccaccttgggacgccccagtttactggggtgtcttgcggagtgcagaaggctttctggcagctgcctgggtttggccagaccctgcctcccctcccgccggccaacccctagtccccttcctgtctccacttgcattcaggggtggctgctgttctgagaacattagaactgggaagagagatggagtcacatggatttttggtgggcattattctgaactttcgtatccaagttagtcccccttattccactgtggcattgccgttctaagcagttacctgatgcctgctgctgaagagctgctcacaggaggcggcggcggccctggcactgccccttgcattaggtcttgtgtttgatgtgttcttgtgaatttactttgtcagaacaaaatatttacgcgttgggttcaggaatttcttttagctccccatctggctgtgaaattcaggaaacctcccgttgcctagtaatcaccccatgtaggtgtacattgtgacaaagtgcatctgaccactaaggggcccccttggtgaccccagcacattcacagcagtgttaaaatggcctgcattttggagatgctggctggcctttcagtgcctcccaggaagacacatggcctttccctcttcagatgcctgaagggagtgctttgaggcaggtgatgtgctgggagtgtgggcggcctccctctggccccggggccctctgtggaccttggctccctccgtggacctgggcttcgtggtgagcactgcagcctccctgggcattccctccagcgccagcaccactgcaacatatagacctgagtgctattgtattttggcttggtgtgtatgctcttcattgtgtaaaattgctgttcttttgacaatttaagtgattgttttgtttactgtaagtttgaaaataaaaatgaagaaaaaaattccaatga

SEQ ID NO: 68330 - DNA, 1437 bp, Homo sapiens
  misc_feature (18)..(18): n is a, c, g, or t
  misc_feature (25)..(26): n is a, c, g, or t
agccaggctggtacgccnggagtanngggaatcggcagaaatggtcccatgtgaccaagttctgctgtttgggtgacagtgctttgaagatctcctttgaggatgtgcagtcttttttttttttttttttgagatggagtttgttgcccaggctggagtgagtggcacagtctcggctcactgcaacctccacctcctgggttcaagcagttctcgtgccgcagcctcccaagtagctgggactacaggcatgcgccaccacgccaggctaatttttgtatttttagtagagatggggtttcaccatgtctcaaactcctgacctcaggcgatccacccacctcagcgtcccaaagtgctgggattataggcgtgagccaccgcacctggcctatgagtggtcttttaattaggaacaaatctaatggaaaggagagttgactgaagttggcccacaggattgtgagctgggcagtgccttcatgaaggcttgccaccttgggacgccccagtttactggggtgtcttgcggagtgcagaaggctttctggcagctgcctgggtttggccagaccctgcctcccctcccgccggccaacccctagtccccttcctgtctccacttgcattcaggggtggctgctgttctgagaacattagaactgggaagagagatggagtcacatggatttttggtgggcattattctgaactttcgtatccaagttagtcccccttattccactgtggcattgccgttctaagcagttacctgatgcctgctgctgaagagctgctcacaggaggcggcggcggccctggcactgccccttgcattaggtcttgtgtttgatgtgttcttgtgaatttactttgtcagaacaaaatatttacgcgttgggttcaggaatttcttttagctccccatctggctgtgaaattcaggaaacctcccgttgcctagtaatcaccccatgtaggtgtacattgtgacaaagtgcatctgaccactaaggggcccccttggtgaccccagcacattcacagcagtgttaaaatggcctgcattttggagatgctggctggcctttcagtgcctcccaggaagacacatggcctttccctcttcagatgcctgaagggagtgctttgaggcaggtgatgtgctgggagtgtgggcggcctccctctggccccggggccctctgtggaccttggctccctccgtggacctgggcttcgtggtgagcactgcagcctccctgggcattccctccagcgccagcaccactgcaacatatagacctgagtgctattgtattttggcttggtgtgtatgctcttcattgtgtaaaattgctgttcttttgacaatttaagtgattgttttgtttactgtaagtttgaaaataaaaatgaagaaaaaaattccaatga

SEQ ID NO: 68331 - DNA, 2341 bp, Homo sapiens
gagcggagtgcggtccgcagcagccgcagctcgggggcggtgcctgccttgcagcctcccctcggcgatcgcgcagccccatctttgtccggcctccgcgctttgttctcggcgcccgggccttggccagcctggccagccgccgagcagcccccacgccgcgctggcgtcgtcctcgcctccctcgccgccgccccccgcgcgctggccgggccttgccccccatggtgtcccggccagagcccgagggcgaggccatggacgccgagctggcggtagcgccgccgggctgctcgcacctgggcagcttcaaggtggacaactggaagcagaacctgcgggccatctaccagtgcttcgtgtggagcggcacggctgaggcccgcaagcgcaaggccaagtcctgtatctgccatgtctgtggcgtccacctcaacaggctgcattcctgcctctactgtgtcttcttcggctgtttcacaaagaagcatattcacgagcatgcgaaggcgaagcggcacaacctggccattgatctgatgtatggaggcatctactgttttctgtgccaggactacatctatgacaaagacatggaaataatcgccaaggaggagcagcgaaaagcttggaaaatgcaaggcgttggagagaagttttcaacttgggaaccaaccaaacgggagcttgaactgctgaagcacaacccgaaaaggagaaagatcacctcgaactgcaccataggtctgcgtgggctgatcaaccttgggaacacatgcttcatgaactgcatcgtgcaggccctgacccacacgccacttctgcgggacttcttcctgtctgacaggcaccgctgtgagatgcagagccccagctcctgtctggtctgtgagatgtcctcactgtttcaggagttttactctggacaccggtcccctcacatcccgtataagttgctgcacctggtgtggacccacgcgaggcacctagcaggctacgagcagcaggacgcccacgagttcctcatcgcggccctggacgtgctccaccgacactgcaaaggtgatgacaatgggaagaaggccaacaacctccacctcctgggttcaagcagttctcgtgccgcagcctcccaagtagctgggactacaggcatgcgccaccacgccaggctaatttttgtatttttagtagagatggggtttcaccatgtctcaaactcctgacctcaggcgatccacccacctcagcgtcccaaagtgctgggattataggcgtgagccaccgcacctggcctatgagtggtcttttaattaggaacaaatctaatggaaaggagagttgactgaagttggcccacaggattgtgagctgggcagtgccttcatgaaggcttgccaccttgggacgccccagtttactggggtgtcttgcggagtgcagaaggctttctggcagctgcctgggtttggccagaccctgcctcccctcccgccggccaacccctagtccccttcctgtctccacttgcattcaggggtggctgctgttctgagaacattagaactgggaagagagatggagtcacatggatttttggtgggcattattctgaactttcgtatccaagttagtcccccttattccactgtggcattgccgttctaagcagttacctgatgcctgctgctgaagagctgctcacaggaggcggcggcggccctggcactgccccttgcattaggtcttgtgtttgatgtgttcttgtgaatttactttgtcagaacaaaatatttacgcgttgggttcaggaatttcttttagctccccatctggctgtgaaattcaggaaacctcccgttgcctagtaatcaccccatgtaggtgtacattgtgacaaagtgcatctgaccactaaggggcccccttggtgaccccagcacattcacagcagtgttaaaatggcctgcattttggagatgctggctggcctttcagtgcctcccaggaagacacatggcctttccctcttcagatgcctgaagggagtgctttgaggcaggtgatgtgctgggagtgtgggcggcctccctctggccccggggccctctgtggaccttggctccctccgtggacctgggcttcgtggtgagcactgcagcctccctgggcattccctccagcgccagcaccactgcaacatatagacctgagtgctattgtattttggcttggtgtgtatgctcttcattgtgtaaaattgctgttcttttgacaatttaagtgattgttttgtttactgtaagtttgaaaataaaaatgaagaaaaaaattccaatga

SEQ ID NO: 68332 - DNA, 1249 bp, Homo sapiens
cagacatcccaggtgaagccatggtgaagctctactcctcccaagtagctgggactacaggcatgcgccaccacgccaggctaatttttgtatttttagtagagatggggtttcaccatgtctcaaactcctgacctcaggcgatccacccacctcagcgtcccaaagtgctgggattataggcgtgagccaccgcacctggcctatgagtggtcttttaattaggaacaaatctaatggaaaggagagttgactgaagttggcccacaggattgtgagctgggcagtgccttcatgaaggcttgccaccttgggacgccccagtttactggggtgtcttgcggagtgcagaaggctttctggcagctgcctgggtttggccagaccctgcctcccctcccgccggccaacccctagtccccttcctgtctccacttgcattcaggggtggctgctgttctgagaacattagaactgggaagagagatggagtcacatggatttttggtgggcattattctgaactttcgtatccaagttagtcccccttattccactgtggcattgccgttctaagcagttacctgatgcctgctgctgaagagctgctcacaggaggcggcggcggccctggcactgccccttgcattaggtcttgtgtttgatgtgttcttgtgaatttactttgtcagaacaaaatatttacgcgttgggttcaggaatttcttttagctccccatctggctgtgaaattcaggaaacctcccgttgcctagtaatcaccccatgtaggtgtacattgtgacaaagtgcatctgaccactaaggggcccccttggtgaccccagcacattcacagcagtgttaaaatggcctgcattttggagatgctggctggcctttcagtgcctcccaggaagacacatggcctttccctcttcagatgcctgaagggagtgctttgaggcaggtgatgtgctgggagtgtgggcggcctccctctggccccggggccctctgtggaccttggctccctccgtggacctgggcttcgtggtgagcactgcagcctccctgggcattccctccagcgccagcaccactgcaacatatagacctgagtgctattgtattttggcttggtgtgtatgctcttcattgtgtaaaattgctgttcttttgacaatttaagtgattgttttgtttactgtaagtttgaaaataaaaatgaagaaaaaaattccaatga

SEQ ID NO: 68333 - DNA, 4859 bp, Homo sapiens
  misc_feature (1896)..(1896): n is a, c, g, or t
gagcggagtgcggtccgcagcagccgcagctcgggggcggtgcctgccttgcagcctcccctcggcgatcgcgcagccccatctttgtccggcctccgcgctttgttctcggcgcccgggccttggccagcctggccagccgccgagcagcccccacgccgcgctggcgtcgtcctcgcctccctcgccgccgccccccgcgcgctggccgggccttgccccccatggtgtcccggccagagcccgagggcgaggccatggacgccgagctggcggtagcgccgccgggctgctcgcacctgggcagcttcaaggtggacaactggaagcagaacctgcgggccatctaccagtgcttcgtgtggagcggcacggctgaggcccgcaagcgcaaggccaagtcctgtatctgccatgtctgtggcgtccacctcaacaggctgcattcctgcctctactgtgtcttcttcggctgtttcacaaagaagcatattcacgagcatgcgaaggcgaagcggcacaacctggccattgatctgatgtatggaggcatctactgttttctgtgccaggactacatctatgacaaagacatggaaataatcgccaaggaggagcagcgaaaagcttggaaaatgcaaggcgttggagagaagttttcaacttgggaaccaaccaaacgggagcttgaactgctgaagcacaacccgaaaaggagaaagatcacctcgaactgcaccataggtctgcgtgggctgatcaaccttgggaacacatgcttcatgaactgcatcgtgcaggccctgacccacacgccacttctgcgggacttcttcctgtctgacaggcaccgctgtgagatgcagagccccagctcctgtctggtctgtgagatgtcctcactgtttcaggagttttactctggacaccggtcccctcacatcccgtataagttgctgcacctggtgtggacccacgcgaggcacctagcaggctacgagcagcaggacgcccacgagttcctcatcgcggccctggacgtgctccaccgacactgcaaaggtgatgacaatgggaagaaggccaacaaccccaaccactgcaactgcatcatagaccagatcttcacaggcgggttgcagtcagacgtcacctgccaagtctgccatggagtctccaccaccatcgaccccttctgggacatcagcttggatctccccggctcttccaccccattctggcccctgagcccagggagcgagggcaacgtggtaaacggggaaagccacgtgtcgggaaccaccacgctcacggactgcctgcgacgattcaccagaccagagcacttgggcagcagcgccaagatcaagtgcagcggttgccatagctaccaggagtccacaaagcagctcactatgaagaaactgcccatcgtagcctgttttcatctcaaacgatttgaacactcagccaagctgcggcggaagatcaccacgtatgtgtccttccccctggagctggacatgacccctttcatggcctccagcaaagagagcaggatgaatggacagtaccagcagcccacggacagtctcaacaatgacaacaagtattccctgtttgctgttgttaaccatcaagggaccttggagagtggccactacaccagctttatccggcagcacaaagaccagtggttcaagtgtgacgatgccatcatcaccaaggccagcatcaaggacgtcctggacagcgaagggtacttgctgttctatcacaaacagttcctggaatacgagtagccttatctgcagctggtcagaaaaacaaaggcaatgcattggcaagcctcacaaagtgatcctccctggccccccccctcccccaagcctcccnccgcctccccggcctggtgacaccacctcccatgcagatgtggcccctctgcacctgggacccatcgggtcgggatggaccacacggacggggaggctcctggagctgctttgaagatggatgagatgaggggtgtgctctgggtgggaggagcagcgtacacccgtcaccagaacatctcttgtgtcatgacatgggggtgcaacgggggcctcacagcacagagtgaccgctgcctggcgttccccagcactcggtgtggaaaggcccctacctgctgtaagattatgggtccatgaaagcagtaagctggacacagaggtgtagtgtgcgggacagagggccttgcagatgcctttctgttggtgttttagtgttaaaatacggagagtatggaactcttcacctccattttctcagcggctgtgaagcagcctcctagcttcggaagtacggacactacgtcgcgttttcaagcgtgtctgttctgcaggtaacagcatcaagctgcacgtggaagcatctcgcggttttctagaaacaggcattttcttatccctctcccgctcctttttccacaaaggtgaatttcataaatgtaatactagtaaagtgaatgaattactgagtttatacagaaatttaggtaacttctcctttagtctcaagagcgagtcttgctttttaatgggtgccgtttatgttgctgcccgccctgtgtgcctggctcctctgggtgccttggtgtctgctggtggctggcagtgggcgcagcggaggagagttgtgctgcagctcatacggtgtgtctgtcatctcagtctggagtaaatgcagtgtctgccggtgtctgatgggttctgtccctcgtattttctttgccttctatcccattgcctggctaccgctgcctggcagccaagggtgttggtcgcgaagctggagtggcctctggtggagcctgcatcttgtctcgtctgcctctgctttacatttggtgtactttcgggcgtggtggcagtaaaatgacaccgtgattgagcttgtcagcagagctgaaagagaaagtagaaggatgtgcattgtttcttgtaagatatcttgcatgtatctgtgtattcaaattcaaacagagatggtttgtccatttgtccactgagaaattataaactagggacaagggggaggaaaagtactgaaatacagtttatgaagcaagtgtgtctcgggctgtgcttgtcccaggagccccagcagcatctgaactgaggcttcttcagtcctgcaggaacaggatcatctgtctcagcggtgggcagatgttttcatagacagccagggagtaaacactgttggctctgtgggctgtatggtctctgccataaatagtacagagatgtggctgtgtctagtacaacttttagacacagaaatctgaatgacatatattgttctgtgtcaagaaacttagattttttttttaactatttaaaaacgtgaaacctattcttagctcacaggccatggagaagctggtggggaccagacccagctccttagctggctgggctggggagggggcagtgacagtggcagctgctactcactgctcagtgtggaaaacacaggacttggcaatcacagcccgcagaaccatcatgtgtggcagaagcctgagggatgcggtttcttgcccacgtgctctgttcattttctgttgtttttctgcacttaaagaattcacatggaagcatgttttataaaatgaattaccagagaaacagagatgggccgagattctcagaaatggtcccatgtgaccaagttctgctgtttgggtgacagtgctttgaagatctcctttgaggatgtgcagtcttttttttttttttttttgagatggagtttgttgcccaggctggagtgagtggcacagtctcggctcactgcaacctccacctcctgggttcaagcagttctcgtgccgcagcctcccaagtagctgggactacaggcatgcgccaccacgccaggctaatttttgtatttttagtagagatggggtttcaccatgtctcaaactcctgacctcaggcgatccacccacctcagcgtcccaaagtgctgggattataggcgtgagccaccgcacctggcctatgagtggtcttttaattaggaacaaatctaatggaaaggagagttgactgaagttggcccacaggattgtgagctgggcagtgccttcatgaaggcttgccaccttgggacgccccagtttactggggtgtcttgcggagtgcagaaggctttctggcagctgcctgggtttggccagaccctgcctcccctcccgccggccaacccctagtccccttcctgtctccacttgcattcaggggtggctgctgttctgagaacattattctgaactttcgtatccaagttagtcccccttattccactgtggcattgccgttctaagcagttacctgatgcctgctgctgaagagctgctcacaggaggcggcggcggccctggcactgccccttgcattaggtcttgtgtttgatgtgttcttgtgaatttactttgtcagaacaaaatatttacgcgttgggttcaggaatttcttttagctccccatctggctgtgaaattcaggaaacctcccgttgcctagtaatcaccccatgtaggtgtacattgtgacaaagtgcatctgaccactaaggggcccccttggtgaccccagcacattcacagcagtgttaaaatggcctgcattttggagatgctggctggcctttcagtgcctcccaggaagacacatggcctttccctcttcagatgcctgaagggagtgctttgaggcaggtagggccggaaaaggaggccgggactcctaagggcccgggggccctagggggaaccgggctccaatcgagggaaccgggcttaa

SEQ ID NO: 68334 - DNA, 1133 bp, Homo sapiens
atctgagtccaggagtttgagaccagcctgggcaacatagcaagaccacatctatataaaacattaaaaagagccaccgcacctggcctatgagtggtcttttaattaggaacaaatctaatggaaaggagagttgactgaagttggcccacaggattgtgagctgggcagtgccttcatgaaggcttgccaccttgggacgccccagtttactggggtgtcttgcggagtgcagaaggctttctggcagctgcctgggtttggccagaccctgcctcccctcccgccggccaacccctagtccccttcctgtctccacttgcattcaggggtggctgctgttctgagaacattagaactgggaagagagatggagtcacatggatttttggtgggcattattctgaactttcgtatccaagttagtcccccttattccactgtggcattgccgttctaagcagttacctgatgcctgctgctgaagagctgctcacaggaggcggcggcggccctggcactgccccttgcattaggtcttgtgtttgatgtgttcttgtgaatttactttgtcagaacaaaatatttacgcgttgggttcaggaatttcttttagctccccatctggctgtgaaattcaggaaacctcccgttgcctagtaatcaccccatgtaggtgtacattgtgacaaagtgcatctgaccactaaggggcccccttggtgaccccagcacattcacagcagtgttaaaatggcctgcattttggagatgctggctggcctttcagtgcctcccaggaagacacatggcctttccctcttcagatgcctgaagggagtgctttgaggcaggtgatgtgctgggagtgtgggcggcctccctctggccccggggccctctgtggaccttggctccctccgtggacctgggcttcgtggtgagcactgcagcctccctgggcattccctccagcgccagcaccactgcaacatatagacctgagtgctattgtattttggcttggtgtgtatgctcttcattgtgtaaaattgctgttcttttgacaatttaagtgattgttttgtttactgtaagtttgaaaataaaaatgaagaaaaaaattccaatga

SEQ ID NO: 68335 - DNA, 4168 bp, Homo sapiens
  misc_feature (1896)..(1896): n is a, c, g, or t
gagcggagtgcggtccgcagcagccgcagctcgggggcggtgcctgccttgcagcctcccctcggcgatcgcgcagccccatctttgtccggcctccgcgctttgttctcggcgcccgggccttggccagcctggccagccgccgagcagcccccacgccgcgctggcgtcgtcctcgcctccctcgccgccgccccccgcgcgctggccgggccttgccccccatggtgtcccggccagagcccgagggcgaggccatggacgccgagctggcggtagcgccgccgggctgctcgcacctgggcagcttcaaggtggacaactggaagcagaacctgcgggccatctaccagtgcttcgtgtggagcggcacggctgaggcccgcaagcgcaaggccaagtcctgtatctgccatgtctgtggcgtccacctcaacaggctgcattcctgcctctactgtgtcttcttcggctgtttcacaaagaagcatattcacgagcatgcgaaggcgaagcggcacaacctggccattgatctgatgtatggaggcatctactgttttctgtgccaggactacatctatgacaaagacatggaaataatcgccaaggaggagcagcgaaaagcttggaaaatgcaaggcgttggagagaagttttcaacttgggaaccaaccaaacgggagcttgaactgctgaagcacaacccgaaaaggagaaagatcacctcgaactgcaccataggtctgcgtgggctgatcaaccttgggaacacatgcttcatgaactgcatcgtgcaggccctgacccacacgccacttctgcgggacttcttcctgtctgacaggcaccgctgtgagatgcagagccccagctcctgtctggtctgtgagatgtcctcactgtttcaggagttttactctggacaccggtcccctcacatcccgtataagttgctgcacctggtgtggacccacgcgaggcacctagcaggctacgagcagcaggacgcccacgagttcctcatcgcggccctggacgtgctccaccgacactgcaaaggtgatgacaatgggaagaaggccaacaaccccaaccactgcaactgcatcatagaccagatcttcacaggcgggttgcagtcagacgtcacctgccaagtctgccatggagtctccaccaccatcgaccccttctgggacatcagcttggatctccccggctcttccaccccattctggcccctgagcccagggagcgagggcaacgtggtaaacggggaaagccacgtgtcgggaaccaccacgctcacggactgcctgcgacgattcaccagaccagagcacttgggcagcagcgccaagatcaagtgcagcggttgccatagctaccaggagtccacaaagcagctcactatgaagaaactgcccatcgtagcctgttttcatctcaaacgatttgaacactcagccaagctgcggcggaagatcaccacgtatgtgtccttccccctggagctggacatgacccctttcatggcctccagcaaagagagcaggatgaatggacagtaccagcagcccacggacagtctcaacaatgacaacaagtattccctgtttgctgttgttaaccatcaagggaccttggagagtggccactacaccagctttatccggcagcacaaagaccagtggttcaagtgtgacgatgccatcatcaccaaggccagcatcaaggacgtcctggacagcgaagggtacttgctgttctatcacaaacagttcctggaatacgagtagccttatctgcagctggtcagaaaaacaaaggcaatgcattggcaagcctcacaaagtgatcctccctggccccccccctcccccaagcctcccnccgcctccccggcctggtgacaccacctcccatgcagatgtggcccctctgcacctgggacccatcgggtcgggatggaccacacggacggggaggctcctggagctgctttgaagatggatgagatgaggggtgtgctctgggtgggaggagcagcgtacacccgtcaccagaacatctcttgtgtcatgacatgggggtgcaacgggggcctcacagcacagagtgaccgctgcctggcgttccccagcactcggtgtggaaaggcccctacctgctgtaagattatgggtccatgaaagcagtaagctggacacagaggtgtagtgtgcgggacagagggccttgcagatgcctttctgttggtgttttagtgttaaaatacggagagtatggaactcttcacctccattttctcagcggctgtgaagcagcctcctagcttcggaagtacggacactacgtcgcgttttcaagcgtgtctgttctgcaggtaacagcatcaagctgcacgtggaagcatctcgcggttttctagaaacaggcattttcttatccctctcccgctcctttttccacaaaggtgaatttcataaatgtaatactagtaaagtgaatgaattactgagtttatacagaaatttaggtaacttctcctttagtctcaagagcgagtcttgctttttaatgggtgccgtttatgttgctgcccgccctgtgtgcctggctcctctgggtgccttggtgtctgctggtggctggcagtgggcgcagcggaggagagttgtgctgcagctcatacggtgtgtctgtcatctcagtctggagtaaatgcagtgtctgccggtgtctgatgggttctgtccctcgtattttctttgccttctatcccattgcctggctaccgctgcctggcagccaagggtgttggtcgcgaagctggagtggcctctggtggagcctgcatcttgtctcgtctgcctctgctttacatttggtgtactttcgggcgtggtggcagtaaaatgacaccgtgattgagcttgtcagcagagctgaaagagaaagtagaaggatgtgcattgtttcttgtaagatatcttgcatgtatctgtgtattcaaattcaaacagagatggtttgtccatttgtccactgagaaattataaactagggacaagggggaggaaaagtactgaaatacagtttatgaagcaagtgtgtctcgggctgtgcttgtcccaggagccccagcagcatctgaactgaggcttcttcagtcctgcaggaacaggatcatctgtctcagcggtgggcagatgttttcatagacagccagggagtaaacactgttggctctgtgggctgtatggtctctgccataaatagtacagagatgtggctgtgtctagtacaacttttagacacagaaatctgaatgacatatattgttctgtgtcaagaaacttagattttttttttaactatttaaaaacgtgaaacctattcttagctcacaggccatggagaagctggtggggaccagacccagctccttagctggctgggctggggagggggcagtgacagtggcagctgctactcactgctcagtgtggaaaacacaggacttggcaatcacagcccgcagaaccatcatgtgtggcagaagcctgagggatgcggtttcttgcccacgtgctctgttcattttctgttgtttttctgcacttaaagaattcacatggaagcatgttttataaaatgaattaccagagaaacagagatgggccgagattctcagaaatggtcccatgtgaccaagttctgctgtttgggtgacagtgctttgaagatctcctttgaggatgtgcagtcttttttttttttttttttgagatggagtttgttgcccaggctggagtgagtggcacagtctcggctcactgcaacctccacctcctgggttcaagcagttctcgtgccgcagcctcccaagtagctgggactacaggcatgcgccaccacgccaggctaatttttgtatttttagtagagatggggtttcaccatgtctcaaactcctgacctcaggcgatccacccacctcagcgtcccaaagtgctgggattataggcgtgagccaccgcacctggcctatgagtggtcttttaattaggaacaaatctaatggaaaggagaccgccgagaagcccacaagatctgagtgaaatgagcaaaagtcacctgcccaataaagcttgacaagaca

SEQ ID NO: 68336 - DNA, 1058 bp, Homo sapiens
cggccgctccaacatcagtcaactctcctttccattagatttgttcctaattaaaaggttgactgaagttggcccacaggattgtgagctgggcagtgccttcatgaaggcttgccaccttgggacgccccagtttactggggtgtcttgcggagtgcagaaggctttctggcagctgcctgggtttggccagaccctgcctcccctcccgccggccaacccctagtccccttcctgtctccacttgcattcaggggtggctgctgttctgagaacattagaactgggaagagagatggagtcacatggatttttggtgggcattattctgaactttcgtatccaagttagtcccccttattccactgtggcattgccgttctaagcagttacctgatgcctgctgctgaagagctgctcacaggaggcggcggcggccctggcactgccccttgcattaggtcttgtgtttgatgtgttcttgtgaatttactttgtcagaacaaaatatttacgcgttgggttcaggaatttcttttagctccccatctggctgtgaaattcaggaaacctcccgttgcctagtaatcaccccatgtaggtgtacattgtgacaaagtgcatctgaccactaaggggcccccttggtgaccccagcacattcacagcagtgttaaaatggcctgcattttggagatgctggctggcctttcagtgcctcccaggaagacacatggcctttccctcttcagatgcctgaagggagtgctttgaggcaggtgatgtgctgggagtgtgggcggcctccctctggccccggggccctctgtggaccttggctccctccgtggacctgggcttcgtggtgagcactgcagcctccctgggcattccctccagcgccagcaccactgcaacatatagacctgagtgctattgtattttggcttggtgtgtatgctcttcattgtgtaaaattgctgttcttttgacaatttaagtgattgttttgtttactgtaagtttgaaaataaaaatgaagaaaaaaattccaatga

SEQ ID NO: 68337 - DNA, 562 bp, Homo sapiens
ttcaatttctacaagcatgcaggcttggatgcgaatttcttttagctccccatctggctgtgaaattcaggaaacctcccgttgcctagtaatcaccccatgtaggtgtacattgtgacaaagtgcatctgaccactaaggggcccccttggtgaccccagcacattcacagcagtgttaaaatggcctgcattttggagatgctggctggcctttcagtgcctcccaggaagacacatggcctttccctcttcagatgcctgaagggagtgctttgaggcaggtgatgtgctgggagtgtgggcggcctccctctggccccggggccctctgtggaccttggctccctccgtggacctgggcttcgtggtgagcactgcagcctccctgggcattccctccagcgccagcaccactgcaacatatagacctgagtgctattgtattttggcttggtgtgtatgctcttcattgtgtaaaattgctgttcttttgacaatttaagtgattgttttgtttactgtaagtttgaaaataaaaatgaagaaaaaaattccaatga

SEQ ID NO: 68338 - DNA, 1800 bp, Homo sapiens
gagcggagtgcggtccgcagcagccgcagctcgggggcggtgcctgccttgcagcctcccctcggcgatcgcgcagccccatctttgtccggcctccgcgctttgttctcggcgcccgggccttggccagcctggccagccgccgagcagcccccacgccgcgctggcgtcgtcctcgcctccctcgccgccgccccccgcgcgctggccgggccttgccccccatggtgtcccggccagagcccgagggcgaggccatggacgccgagctggcggtagcgccgccgggctgctcgcacctgggcagcttcaaggtggacaactggaagcagaacctgcgggccatctaccagtgcttcgtgtggagcggcacggctgaggcccgcaagcgcaaggccaagtcctgtatctgccatgtctgtggcgtccacctcaacaggctgcattcctgcctctactgtgtcttcttcggctgtttcacaaagaagcatattcacgagcatgcgaaggcgaagcggcacaacctggccattgatctgatgtatggaggcatctactgttttctgtgccaggactacatctatgacaaagacatggaaataatcgccaaggaggagcagcgaaaagcttggaaaatgcaaggcgttggagagaagttttcaacttgggaaccaaccaaacgggagcttgaactgctgaagcacaacccgaaaaggagaaagatcacctcgaactgcaccataggtctgcgtgggctgatcaaccttgggaacacatgcttcatgaactgcatcgtgcaggccctgacccacacgccacttctgcgggacttcttcctgtctgacaggcaccgctgtgagatgcagagccccagctcctgtctggtctgtgagatgtcctcactgtttcaggagttttactctggacaccggtcccctcacatcccgtataagttgctgcacctggtgtggacccacgcgaggcacctagcaggctacgagcagcaggacgcccacgagttcctcatcgcggccctggacgtgctccaccgacactgcaaaggtgatgacaatgggaagaaggccaacaaccccaaccactgcaactgcatcatagaccagatcttcacaggcgggttgcagtcagacgtcacctgccaagtctgccatggagtctccaccaccatcgaccccttctgggacatcagcttggatctccccggctcttccaccccattctggcccctgagcccagggagcgagggcaacgtggtaaacggggaaagccacgtgtcgggaaccaccacgctcacggactgcctgcgacgattcaccagaccagagcacttgggcagcagcgccaagatcaagtgcagcggttgccatagctaccaggagtccacaaagcagctcactatgaagaaactgcccatcgtagcctgttttcatctcaaacgatttgaacactcagccaagctgcggcggaagatcaccacgtatgtgtccttccccctggagctggacatgacccctttcatggcctccagcaaagagagcaggatgaatggacagtaccagcagcccacggacagtctcaacaatgacaacaagtattccctgtttgctgttgttaaccatcaagggaccttggagagtggccactacaccagctttatccggcagcacaaagaccagtggttcaagtgtgacgatgccatcatcaccaaggccagcatcaaggacgtcctggacagcgaaggccaactgagggtaccgaggtcgacttcggcctcccgggccc

SEQ ID NO: 68339 - DNA, 1786 bp, Homo sapiens
gagcggagtgcggtccgcagcagccgcagctcgggggcggtgcctgccttgcagcctcccctcggcgatcgcgcagccccatctttgtccggcctccgcgctttgttctcggcgcccgggccttggccagcctggccagccgccgagcagcccccacgccgcgctggcgtcgtcctcgcctccctcgccgccgccccccgcgcgctggccgggccttgccccccatggtgtcccggccagagcccgagggcgaggccatggacgccgagctggcggtagcgccgccgggctgctcgcacctgggcagcttcaaggtggacaactggaagcagaacctgcgggccatctaccagtgcttcgtgtggagcggcacggctgaggcccgcaagcgcaaggccaagtcctgtatctgccatgtctgtggcgtccacctcaacaggctgcattcctgcctctactgtgtcttcttcggctgtttcacaaagaagcatattcacgagcatgcgaaggcgaagcggcacaacctggccattgatctgatgtatggaggcatctactgttttctgtgccaggactacatctatgacaaagacatggaaataatcgccaaggaggagcagcgaaaagcttggaaaatgcaaggcgttggagagaagttttcaacttgggaaccaaccaaacgggagcttgaactgctgaagcacaacccgaaaaggagaaagatcacctcgaactgcaccataggtctgcgtgggctgatcaaccttgggaacacatgcttcatgaactgcatcgtgcaggccctgacccacacgccacttctgcgggacttcttcctgtctgacaggcaccgctgtgagatgcagagccccagctcctgtctggtctgtgagatgtcctcactgtttcaggagttttactctggacaccggtcccctcacatcccgtataagttgctgcacctggtgtggacccacgcgaggcacctagcaggctacgagcagcaggacgcccacgagttcctcatcgcggccctggacgtgctccaccgacactgcaaaggtgatgacaatgggaagaaggccaacaaccccaaccactgcaactgcatcatagaccagatcttcacaggcgggttgcagtcagacgtcacctgccaagtctgccatggagtctccaccaccatcgaccccttctgggacatcagcttggatctccccggctcttccaccccattctggcccctgagcccagggagcgagggcaacgtggtaaacggggaaagccacgtgtcgggaaccaccacgctcacggactgcctgcgacgattcaccagaccagagcacttgggcagcagcgccaagatcaagtgcagcggttgccatagctaccaggagtccacaaagcagctcactatgaagaaactgcccatcgtagcctgttttcatctcaaacgatttgaacactcagccaagctgcggcggaagatcaccacgtatgtgtccttccccctggagctggacatgacccctttcatggcctccagcaaagagagcaggatgaatggacagtaccagcagcccacggacagtctcaacaatgacaacaagtattccctgtttgctgttgttaaccatcaagggaccttggagagtggccactacaccagctttatccggcagcacaaagaccagtggttcaagtgtgacgatgccatcatcaccaaggccagcatcaaggacgtcctggacagcgaaggccacactagacgtcgctttccacctag

SEQ ID NO: 68340 - DNA, 1676 bp, Homo sapiens
gagcggagtgcggtccgcagcagccgcagctcgggggcggtgcctgccttgcagcctcccctcggcgatcgcgcagccccatctttgtccggcctccgcgctttgttctcggcgcccgggccttggccagcctggccagccgccgagcagcccccacgccgcgctggcgtcgtcctcgcctccctcgccgccgccccccgcgcgctggccgggccttgccccccatggtgtcccggccagagcccgagggcgaggccatggacgccgagctggcggtagcgccgccgggctgctcgcacctgggcagcttcaaggtggacaactggaagcagaacctgcgggccatctaccagtgcttcgtgtggagcggcacggctgaggcccgcaagcgcaaggccaagtcctgtatctgccatgtctgtggcgtccacctcaacaggctgcattcctgcctctactgtgtcttcttcggctgtttcacaaagaagcatattcacgagcatgcgaaggcgaagcggcacaacctggccattgatctgatgtatggaggcatctactgttttctgtgccaggactacatctatgacaaagacatggaaataatcgccaaggaggagcagcgaaaagcttggaaaatgcaaggcgttggagagaagttttcaacttgggaaccaaccaaacgggagcttgaactgctgaagcacaacccgaaaaggagaaagatcacctcgaactgcaccataggtctgcgtgggctgatcaaccttgggaacacatgcttcatgaactgcatcgtgcaggccctgacccacacgccacttctgcgggacttcttcctgtctgacaggcaccgctgtgagatgcagagccccagctcctgtctggtctgtgagatgtcctcactgtttcaggagttttactctggacaccggtcccctcacatcccgtataagttgctgcacctggtgtggacccacgcgaggcacctagcaggctacgagcagcaggacgcccacgagttcctcatcgcggccctggacgtgctccaccgacactgcaaaggtgatgacaatgggaagaaggccaacaaccccaaccactgcaactgcatcatagaccagatcttcacaggcgggttgcagtcagacgtcacctgccaagtctgccatggagtctccaccaccatcgaccccttctgggacatcagcttggatctccccggctcttccaccccattctggcccctgagcccagggagcgagggcaacgtggtaaacggggaaagccacgtgtcgggaaccaccacgctcacggactgcctgcgacgattcaccagaccagagcacttgggcagcagcgccaagatcaagtgcagcggttgccatagctaccaggagtccacaaagcagctcactatgaagaaactgcccatcgtagcctgttttcatctcaaacgatttgaacactcagccaagctgcggcggaagatcaccacgtatgtgtccttccccctggagctggacatgacccctttcatggcctccagcaaagagagcaggatgaatggacagtaccagcagcccacggacagtctcaacaatgacaacaagtattccctgtttgtggggtagcactctgtttgtggaggtagcactactgtttgtggaggtagcact

SEQ ID NO: 68341 - DNA, 1529 bp, Homo sapiens
gagcggagtgcggtccgcagcagccgcagctcgggggcggtgcctgccttgcagcctcccctcggcgatcgcgcagccccatctttgtccggcctccgcgctttgttctcggcgcccgggccttggccagcctggccagccgccgagcagcccccacgccgcgctggcgtcgtcctcgcctccctcgccgccgccccccgcgcgctggccgggccttgccccccatggtgtcccggccagagcccgagggcgaggccatggacgccgagctggcggtagcgccgccgggctgctcgcacctgggcagcttcaaggtggacaactggaagcagaacctgcgggccatctaccagtgcttcgtgtggagcggcacggctgaggcccgcaagcgcaaggccaagtcctgtatctgccatgtctgtggcgtccacctcaacaggctgcattcctgcctctactgtgtcttcttcggctgtttcacaaagaagcatattcacgagcatgcgaaggcgaagcggcacaacctggccattgatctgatgtatggaggcatctactgttttctgtgccaggactacatctatgacaaagacatggaaataatcgccaaggaggagcagcgaaaagcttggaaaatgcaaggcgttggagagaagttttcaacttgggaaccaaccaaacgggagcttgaactgctgaagcacaacccgaaaaggagaaagatcacctcgaactgcaccataggtctgcgtgggctgatcaaccttgggaacacatgcttcatgaactgcatcgtgcaggccctgacccacacgccacttctgcgggacttcttcctgtctgacaggcaccgctgtgagatgcagagccccagctcctgtctggtctgtgagatgtcctcactgtttcaggagttttactctggacaccggtcccctcacatcccgtataagttgctgcacctggtgtggacccacgcgaggcacctagcaggctacgagcagcaggacgcccacgagttcctcatcgcggccctggacgtgctccaccgacactgcaaaggtgatgacaatgggaagaaggccaacaaccccaaccactgcaactgcatcatagaccagatcttcacaggcgggttgcagtcagacgtcacctgccaagtctgccatggagtctccaccaccatcgaccccttctgggacatcagcttggatctccccggctcttccaccccattctggcccctgagcccagggagcgagggcaacgtggtaaacggggaaagccacgtgtcgggaaccaccacgctcacggactgcctgcgacgattcaccagaccagagcacttgggcagcagcgccaagatcaagtgcagcggttgccatagctaccaggagtccacaaagcagctcactatgaagaaactgcccatcgtagcctgttttcatctcaaacgatttgaacactcagccaagctgcggcggaagatcaccacgtgaaatacatgggggtcctctagagtcagaccc

SEQ ID NO: 68342 - DNA, 1442 bp, Homo sapiens
gagcggagtgcggtccgcagcagccgcagctcgggggcggtgcctgccttgcagcctcccctcggcgatcgcgcagccccatctttgtccggcctccgcgctttgttctcggcgcccgggccttggccagcctggccagccgccgagcagcccccacgccgcgctggcgtcgtcctcgcctccctcgccgccgccccccgcgcgctggccgggccttgccccccatggtgtcccggccagagcccgagggcgaggccatggacgccgagctggcggtagcgccgccgggctgctcgcacctgggcagcttcaaggtggacaactggaagcagaacctgcgggccatctaccagtgcttcgtgtggagcggcacggctgaggcccgcaagcgcaaggccaagtcctgtatctgccatgtctgtggcgtccacctcaacaggctgcattcctgcctctactgtgtcttcttcggctgtttcacaaagaagcatattcacgagcatgcgaaggcgaagcggcacaacctggccattgatctgatgtatggaggcatctactgttttctgtgccaggactacatctatgacaaagacatggaaataatcgccaaggaggagcagcgaaaagcttggaaaatgcaaggcgttggagagaagttttcaacttgggaaccaaccaaacgggagcttgaactgctgaagcacaacccgaaaaggagaaagatcacctcgaactgcaccataggtctgcgtgggctgatcaaccttgggaacacatgcttcatgaactgcatcgtgcaggccctgacccacacgccacttctgcgggacttcttcctgtctgacaggcaccgctgtgagatgcagagccccagctcctgtctggtctgtgagatgtcctcactgtttcaggagttttactctggacaccggtcccctcacatcccgtataagttgctgcacctggtgtggacccacgcgaggcacctagcaggctacgagcagcaggacgcccacgagttcctcatcgcggccctggacgtgctccaccgacactgcaaaggtgatgacaatgggaagaaggccaacaaccccaaccactgcaactgcatcatagaccagatcttcacaggcgggttgcagtcagacgtcacctgccaagtctgccagtaagtgagaggctgcgtgctcggcaatatcaaaccctctggggccgtactgacatcctcccagtctccagagctgtgtgtgctctgagaggtctttaaggaggctacgagataaatgattaatagacgccatgagagcgaaggttgtggggtgggggtgcttcctcttggggaggtcgtagggcaggtgtcccctcgggatgcgagcccttcgtgttgaggtcttggctgttgtctacagccagcagtgtgttcttggaagcttcccctacca

SEQ ID NO: 68343 - DNA, 1124 bp, Homo sapiens
gagcggagtgcggtccgcagcagccgcagctcgggggcggtgcctgccttgcagcctcccctcggcgatcgcgcagccccatctttgtccggcctccgcgctttgttctcggcgcccgggccttggccagcctggccagccgccgagcagcccccacgccgcgctggcgtcgtcctcgcctccctcgccgccgccccccgcgcgctggccgggccttgccccccatggtgtcccggccagagcccgagggcgaggccatggacgccgagctggcggtagcgccgccgggctgctcgcacctgggcagcttcaaggtggacaactggaagcagaacctgcgggccatctaccagtgcttcgtgtggagcggcacggctgaggcccgcaagcgcaaggccaagtcctgtatctgccatgtctgtggcgtccacctcaacaggctgcattcctgcctctactgtgtcttcttcggctgtttcacaaagaagcatattcacgagcatgcgaaggcgaagcggcacaacctggccattgatctgatgtatggaggcatctactgttttctgtgccaggactacatctatgacaaagacatggaaataatcgccaaggaggagcagcgaaaagcttggaaaatgcaaggcgttggagagaagttttcaacttgggaaccaaccaaacgggagcttgaactgctgaagcacaacccgaaaaggagaaagatcacctcgaactgcaccataggtctgcgtgggctgatcaaccttgggaacacatgcttcatgaactgcatcgtgcaggccctgacccacacgccacttctgcgggacttcttcctgtctgacaggcaccgctgtgagatgcagagccccagctcctgtctggtctgtgagatgtcctcactgtttcaggagttttactctggacaccggtcccctcacatcccgtataagttgctgcacctggtgtggacccacgcgaggcacctagcaggctacgagcagcaggacgcccacgagttcctcatcgcggccctggacgtgctccaccgacactgcaaaggtgatgacaatggaagaagtacaacaacgcccaccacctcgcctcgtgcggtacagcgctcg

SEQ ID NO: 68344 - DNA, 410 bp, Homo sapiens
taggctaggtgcgaggccgggtgttggcccatgagtttatcctcctcccaagtccctcagtgactgtgatggtctccagactgggaagtccttgcttgaggagcgcccctcgccttccgagttcacacacacccctccccagggccaccttgggagccaggacacgttgggtgtgagcactgctgctcttgctcctgccccatcccacctgagtgtcactgtgacaaagggcacagcggggaagggatgtgggaacggcttccaccccgggttgcctctggagctgggtgggtgtcagtcctcacagccattgttttccctctgcttccagtggagtctccaccaccatcgaccccttctgggacatcagcttggatctccccgggcggccgcggctccccgggcggccg

SEQ ID NO: 68345 - DNA, 686 bp, Homo sapiens
gagcggagtgcggtccgcagcagccgcagctcgggggcggtgcctgccttgcagcctcccctcggcgatcgcgcagccccatctttgtccggcctccgcgctttgttctcggcgcccgggccttggccagcctggccagccgccgagcagcccccacgccgcgctggcgtcgtcctcgcctccctcgccgccgccccccgcgcgctggccgggccttgccccccatggtgtcccggccagagcccgagggcgaggccatggacgccgagctggcggtagcgccgccgggctgctcgcacctgggcagcttcaaggtggacaactggaagcagaacctgcgggccatctaccagtgcttcgtgtggagcggcacggctgaggcccgcaagcgcaaggccaagtcctgtatctgccatgtctgtggcgtccacctcaacaggctgcattcctgcctctactgtgtcttcttcggctgtttcacaaagaagcatattcacgagcatgcgaaggcgaagcggcacaacctgggtgaggcgagcttctgggatggggggatagttgtggcccccaaattgctactctttgattttttgatttgcagttccactcttccaaaagtccactttgtcgtttgtctcaagtaatgcgtgcccctcactggtgacacttggaagtgaaagggacaa

SEQ ID NO: 68346 - DNA, 449 bp, Homo sapiens
tacaatggctgaagtgggaggggtccatggtggtggacattcttcaataccgttcatgtaaaagtggcataaaaactagcagaatgcgatatctcatcgttttctggcttgaatgaatgaataaaagaaaatgagtatgtagaggtagaggaagccactgggatccagcgacacctgtggttcagcacacaggtaactcctgctctctggtgatttgtgtccaggtctgcgtgggctgatcaaccttgggaacacatgcttcatgaactgcatcgtgcaggccctgacccacacgccacttctgcgggacttcttcctgtctgacaggcaccgctgtgagatgcagagccccagctcctgtctggtctgtgagatgtcctcactgtttcaggaggtgagcgccattgacttctgcaggggaacatttctgttactttgttttcaccttc

SEQ ID NO: 68347 - DNA, 2933 bp, Homo sapiens
  misc_feature (808)..(808): n is a, c, g, or t
caacataggctagatgagccgcggggtatcggccgaggcacaggcgggttgcagtcagacgtcacctgccaagtctgccatggagtctccaccaccatcgaccccttctgggacatcagcttggatctccccggctcttccaccccattctggcccctgagcccagggagcgagggcaacgtggtaaacggggaaagccacgtgtcgggaaccaccacgctcacggactgcctgcgacgattcaccagaccagagcacttgggcagcagcgccaagatcaagtgcagcggttgccatagctaccaggagtccacaaagcagctcactatgaagaaactgcccatcgtagcctgttttcatctcaaacgatttgaacactcagccaagctgcggcggaagatcaccacgtatgtgtccttccccctggagctggacatgacccctttcatggcctccagcaaagagagcaggatgaatggacagtaccagcagcccacggacagtctcaacaatgacaacaagtattccctgtttgctgttgttaaccatcaagggaccttggagagtggccactacaccagctttatccggcagcacaaagaccagtggttcaagtgtgacgatgccatcatcaccaaggccagcatcaaggacgtcctggacagcgaagggtacttgctgttctatcacaaacagttcctggaatacgagtagccttatctgcagctggtcagaaaaacaaaggcaatgcattggcaagcctcacaaagtgatcctccctggccccccccctcccccaagcctcccnccgcctccccggcctggtgacaccacctcccatgcagatgtggcccctctgcacctgggacccatcgggtcgggatggaccacacggacggggaggctcctggagctgctttgaagatggatgagatgaggggtgtgctctgggtgggaggagcagcgtacacccgtcaccagaacatctcttgtgtcatgacatgggggtgcaacgggggcctcacagcacagagtgaccgctgcctggcgttccccagcactcggtgtggaaaggcccctacctgctgtaagattatgggtccatgaaagcagtaagctggacacagaggtgtagtgtgcgggacagagggccttgcagatgcctttctgttggtgttttagtgttaaaatacggagagtatggaactcttcacctccattttctcagcggctgtgaagcagcctcctagcttcggaagtacggacactacgtcgcgttttcaagcgtgtctgttctgcaggtaacagcatcaagctgcacgtggaagcatctcgcggttttctagaaacaggcattttcttatccctctcccgctcctttttccacaaaggtgaatttcataaatgtaatactagtaaagtgaatgaattactgagtttatacagaaatttaggtaacttctcctttagtctcaagagcgagtcttgctttttaatgggtgccgtttatgttgctgcccgccctgtgtgcctggctcctctgggtgccttggtgtctgctggtggctggcagtgggcgcagcggaggagagttgtgctgcagctcatacggtgtgtctgtcatctcagtctggagtaaatgcagtgtctgccggtgtctgatgggttctgtccctcgtattttctttgccttctatcccattgcctggctaccgctgcctggcagccaagggtgttggtcgcgaagctggagtggcctctggtggagcctgcatcttgtctcgtctgcctctgctttacatttggtgtactttcgggcgtggtggcagtaaaatgacaccgtgattgagcttgtcagcagagctgaaagagaaagtagaaggatgtgcattgtttcttgtaagatatcttgcatgtatctgtgtattcaaattcaaacagagatggtttgtccatttgtccactgagaaattataaactagggacaagggggaggaaaagtactgaaatacagtttatgaagcaagtgtgtctcgggctgtgcttgtcccaggagccccagcagcatctgaactgaggcttcttcagtcctgcaggaacaggatcatctgtctcagcggtgggcagatgttttcatagacagccagggagtaaacactgttggctctgtgggctgtatggtctctgccataaatagtacagagatgtggctgtgtctagtacaacttttagacacagaaatctgaatgacatatattgttctgtgtcaagaaacttagattttttttttaactatttaaaaacgtgaaacctattcttagctcacaggccatggagaagctggtggggaccagacccagctccttagctggctgggctggggagggggcagtgacagtggcagctgctactcactgctcagtgtggaaaacacaggacttggcaatcacagcccgcagaaccatcatgtgtggcagaagcctgagggatgcggtttcttgcccacgtgctctgttcattttctgttgtttttctgcacttaaagaattcacatggaagcatgttttataaaatgaattaccagagaaacagagatgggccgagattctgcaccaccgcactccagcctgggtgacagagcgagacttatctcataaataaatagatagatactccagcctgggtgacagagcgagacttatagatagatagatagatagatggatagatagatagatagatagatagatagataaacggaattggagccattttgctttaagtgaatggcagtcccttgtcttattcagaatataaaattcagtctgaatggcatcttacagattttacttcaatttttgtgtacggtattttttatttgactaaatcaatatattgtacagcctaagttaataaatgttatttatatatgc

SEQ ID NO: 68348 - DNA, 1337 bp, Homo sapiens
tcaggcatggggtcttgtgtatgttgcccaggctggccttgaacccatgggctcaagcaatcctccctccttagcctcccaagtagctgggactacaggcatgggccaccgtgcctggctctgttctttacttcagttgaagtttaaaaaccctggacatgatccaccgaaattatttcagaacccgaaatggactgtcacttctaaactgcataagacgagcaaatatcgggaaaggccagtgctgcctgtgtcacgggggccattttctataaggagcatagaccgtttggggccttgtctctgagtattagaaaccgagtttgctctgagcaatttggacctcctcgctgtcccttaactactgaattccattagtaggagattgtctcaagatttaaatcctgtataaatatcgagagtaaatttcccagtctgcaagttttcattttttatattgttaaataaatttctagcaaggaactggccttgtgaaatgcagcattgactgtccagtgcaggccaccgggcctggcctgggcacgctctgtgaaatgtgcaggggtctccagtgttgcctagggtcacaggccccaagttctagatgcagctgagatagacctgtggattcagagcctctgacagggcccatgagtttatcctcctcccaagtccctcagtgactgtgatggtctccagactgggaagtccttgcttgaggagcgcccctcgccttccgagttcacacacacccctccccagggccaccttgggagccaggacacgttgggtgtgagcactgctgctcttgctcctgccccatcccacctgagtgtcactgtgacaaagggcacagcggggaagggatgtgggaacggcttccaccccgggttgcctctggagctgggtgggtgtcagtcctcacagccattgttttccctctgcttccagtggagtctccaccaccatcgaccccttctgggacatcagcttggatctccccggctcttccaccccattctggcccctgagcccagggagcgagggcaacgtggtaaacggggaaagccacgtgtcgggaaccaccacgctcacggactgcctgcgacggtgagaggcctgcacccacacggcgggggcgtgtctcctggccagaaggctgtgctccatcaggaccaaagcagggctctttcacatgcccaggacagagcctgggcaaaggtgcagcatgagcctggattggctgcagtctcttgtgctagtttgtcctttgttttggccagatgactcaatatttctgtcccccagcttcgcacagcaccaggtgtcagtgtcag

SEQ ID NO: 68349 - DNA, 1102 bp, Homo sapiens
  misc_feature (28)..(28): n is a, c, g, or t
  misc_feature (33)..(33): n is a, c, g, or t
gtatataggcggtacctcagggtgcganggcgnagcggcacaatctggccattgatctgatgtatggaggcatctactgttttctgtgccaggactacatctatgacaaagacatggaaataatcgccaaggaggagcagcgaaaagcttggaaaatgcaaggcgttggagagaagttttcaacttgggaaccaaccaaacgggagcttgaactgctgaagcacaacccgaaaaggagaaagatcacctcgaactgcaccataggtctgcgtgggctgatcaaccttgggaacacatgcttcatgaactgcatcgtgcaggccctgacccacacgccacttctgcgggacttcttcctgtctgacaggcaccgctgtgagatgcagagccccagctcctgtctggtctgtgagatgtcctcactgtttcaggagttttactctggacaccggtcccctcacatcccgtataagttgctgcacctggtgtggacccacgcgaggcacctagcaggctacgagcagcaggacgcccacgagttcctcatcgcggccctggacgtgctccaccgacactgcaaaggtgatgacaatgggaagaaggccaacaaccccaaccactgcaactgcatcatagaccagatcttcacaggcgggttgcagtcagacgtcacctgccaagtctgccatggagtttccaacaaccattcgaacctttctggcacatcaagtttggatcttcccgggtctttcacccaattttggcccttaaccaagaacaaggcacacgtgcaacaggggaaagcacatgttgggatacacgagcacagaaagcctaggagaatccagaaccaaacagttggacagcaaggcccagaaacatgcagggctgtaccaagtacagcgaacccaacagctccatagtaagaaggtcgactgatcggtaccatactaaaaagaacccatccatcggtggaaaacagcagtgcaacccgagacgatacacatagcacacgaagagcagagctaacaatagtagaacagacgtagacagtacagcacgtagcagcgacatgtgcgtagactagtatacgctacaacaa

SEQ ID NO: 68350 - DNA, 4892 bp, Homo sapiens
  misc_feature (1533)..(1533): n is a, c, g, or t
taaatcagggacgaggcgaggttgtaggtctagatcgggagtccgtgagtggttgatgtgcagtccacctcaacaggctgcattcctgcctctactgtgtcttcttcggctgtttcacaaagaagcatattcacgagcatgcgaaggcgaagcggcacaacctggccattgatctgatgtatggaggcatctactgttttctgtgccaggactacatctatgacaaagacatggaaataatcgccaaggaggagcagcgaaaagcttggaaaatgcaaggcgttggagagaagttttcaacttgggaaccaaccaaacgggagcttgaactgctgaagcacaacccgaaaaggagaaagatcacctcgaactgcaccataggtctgcgtgggctgatcaaccttgggaacacatgcttcatgaactgcatcgtgcaggccctgacccacacgccacttctgcgggacttcttcctgtctgacaggcaccgctgtgagatgcagagccccagctcctgtctggtctgtgagatgtcctcactgtttcaggagttttactctggacaccggtcccctcacatcccgtataagttgctgcacctggtgtggacccacgcgaggcacctagcaggctacgagcagcaggacgcccacgagttcctcatcgcggccctggacgtgctccaccgacactgcaaaggtgatgacaatgggaagaaggccaacaaccccaaccactgcaactgcatcatagaccagatcttcacaggcgggttgcagtcagacgtcacctgccaagtctgccatggagtctccaccaccatcgaccccttctgggacatcagcttggatctccccggctcttccaccccattctggcccctgagcccagggagcgagggcaacgtggtaaacggggaaagccacgtgtcgggaaccaccacgctcacggactgcctgcgacgattcaccagaccagagcacttgggcagcagcgccaagatcaagtgcagcggttgccatagctaccaggagtccacaaagcagctcactatgaagaaactgcccatcgtagcctgttttcatctcaaacgatttgaacactcagccaagctgcggcggaagatcaccacgtatgtgtccttccccctggagctggacatgacccctttcatggcctccagcaaagagagcaggatgaatggacagtaccagcagcccacggacagtctcaacaatgacaacaagtattccctgtttgctgttgttaaccatcaagggaccttggagagtggccactacaccagctttatccggcagcacaaagaccagtggttcaagtgtgacgatgccatcatcaccaaggccagcatcaaggacgtcctggacagcgaagggtacttgctgttctatcacaaacagttcctggaatacgagtagccttatctgcagctggtcagaaaaacaaaggcaatgcattggcaagcctcacaaagtgatcctccctggccccccccctcccccaagcctcccnccgcctccccggcctggtgacaccacctcccatgcagatgtggcccctctgcacctgggacccatcgggtcgggatggaccacacggacggggaggctcctggagctgctttgaagatggatgagatgaggggtgtgctctgggtgggaggagcagcgtacacccgtcaccagaacatctcttgtgtcatgacatgggggtgcaacgggggcctcacagcacagagtgaccgctgcctggcgttccccagcactcggtgtggaaaggcccctacctgctgtaagattatgggtccatgaaagcagtaagctggacacagaggtgtagtgtgcgggacagagggccttgcagatgcctttctgttggtgttttagtgttaaaatacggagagtatggaactcttcacctccattttctcagcggctgtgaagcagcctcctagcttcggaagtacggacactacgtcgcgttttcaagcgtgtctgttctgcaggtaacagcatcaagctgcacgtggaagcatctcgcggttttctagaaacaggcattttcttatccctctcccgctcctttttccacaaaggtgaatttcataaatgtaatactagtaaagtgaatgaattactgagtttatacagaaatttaggtaacttctcctttagtctcaagagcgagtcttgctttttaatgggtgccgtttatgttgctgcccgccctgtgtgcctggctcctctgggtgccttggtgtctgctggtggctggcagtgggcgcagcggaggagagttgtgctgcagctcatacggtgtgtctgtcatctcagtctggagtaaatgcagtgtctgccggtgtctgatgggttctgtccctcgtattttctttgccttctatcccattgcctggctaccgctgcctggcagccaagggtgttggtcgcgaagctggagtggcctctggtggagcctgcatcttgtctcgtctgcctctgctttacatttggtgtactttcgggcgtggtggcagtaaaatgacaccgtgattgagcttgtcagcagagctgaaagagaaagtagaaggatgtgcattgtttcttgtaagatatcttgcatgtatctgtgtattcaaattcaaacagagatggtttgtccatttgtccactgagaaattataaactagggacaagggggaggaaaagtactgaaatacagtttatgaagcaagtgtgtctcgggctgtgcttgtcccaggagccccagcagcatctgaactgaggcttcttcagtcctgcaggaacaggatcatctgtctcagcggtgggcagatgttttcatagacagccagggagtaaacactgttggctctgtgggctgtatggtctctgccataaatagtacagagatgtggctgtgtctagtacaacttttagacacagaaatctgaatgacatatattgttctgtgtcaagaaacttagattttttttttaactatttaaaaacgtgaaacctattcttagctcacaggccatggagaagctggtggggaccagacccagctccttagctggctgggctggggagggggcagtgacagtggcagctgctactcactgctcagtgtggaaaacacaggacttggcaatcacagcccgcagaaccatcatgtgtggcagaagcctgagggatgcggtttcttgcccacgtgctctgttcattttctgttgtttttctgcacttaaagaattcacatggaagcatgttttataaaatgaattaccagagaaacagagatgggccgagattctcagaaatggtcccatgtgaccaagttctgctgtttgggtgacagtgctttgaagatctcctttgaggatgtgcagtcttttttttttttttttttgagatggagtttgttgcccaggctggagtgagtggcacagtctcggctcactgcaacctccacctcctgggttcaagcagttctcgtgccgcagcctcccaagtagctgggactacaggcatgcgccaccacgccaggctaatttttgtatttttagtagagatggggtttcaccatgtctcaaactcctgacctcaggcgatccacccacctcagcgtcccaaagtgctgggattataggcgtgagccaccgcacctggcctatgagtggtcttttaattaggaacaaatctaatggaaaggagagttgactgaagttggcccacaggattgtgagctgggcagtgccttcatgaaggcttgccaccttgggacgccccagtttactggggtgtcttgcggagtgcagaaggctttctggcagctgcctgggtttggccagaccctgcctcccctcccgccggccaacccctagtccccttcctgtctccacttgcattcaggggtggctgctgttctgagaacattagaactgggaagagagatggagtcacatggatttttggtgggcattattctgaactttcgtatccaagttagtcccccttattccactgtggcattgccgttctaagcagttacctgatgcctgctgctgaagagctgctcacaggaggcggcggcggccctggcactgccccttgcattaggtcttgtgtttgatgtgttcttgtgaatttactttgtcagaacaaaatatttacgcgttgggttcaggaatttcttttagctccccatctggctgtgaaattcaggaaacctcccgttgcctagtaatcaccccatgtaggtgtacattgtgacaaagtgcatctgaccactaaggggcccccttggtgaccccagcacattcacagcagtgttaaaatggcctgcattttggagatgctggctggcctttcagtgcctcccaggaagacacatggcctttccctcttcagatgcctgaagggagtgctttgaggcaggtgatgtgctgggagtgtgggcggcctccctctggccccggggccctctgtggaccttggctccctccgtggacctgggcttcgtggtgagcactgcagcctccctgggcattccctccagcgccagcaccactgcaacatatagacctgagtgctattgtattttggcttggtgtgtatgctcttcattgtgtaaaattgctgttcttttgacaatttaagtgattgttttgtttactgtaagtttgaaaataaaaatgaagaaaaaaattccaatgactgtgctgtggttggagactttatttaccaagatgtttactcttcctttccccttccattttgaggagctgtgtcactcctcctcccccccagtgctttgtagtctctcctatgtcataataaagctacattttctctgagaaaaaaaaacagttt

SEQ ID NO: 68351 - DNA, 4011 bp, Homo sapiens
  misc_feature (652)..(652): n is a, c, g, or t
gaggatcccccattgtatttcaacgtggtaaacggggaaagccacgtgtcgggaaccaccacgctcacggactgcctgcgacgattcaccagaccagagcacttgggcagcagcgccaagatcaagtgcagcggttgccatagctaccaggagtccacaaagcagctcactatgaagaaactgcccatcgtagcctgttttcatctcaaacgatttgaacactcagccaagctgcggcggaagatcaccacgtatgtgtccttccccctggagctggacatgacccctttcatggcctccagcaaagagagcaggatgaatggacagtaccagcagcccacggacagtctcaacaatgacaacaagtattccctgtttgctgttgttaaccatcaagggaccttggagagtggccactacaccagctttatccggcagcacaaagaccagtggttcaagtgtgacgatgccatcatcaccaaggccagcatcaaggacgtcctggacagcgaagggtacttgctgttctatcacaaacagttcctggaatacgagtagccttatctgcagctggtcagaaaaacaaaggcaatgcattggcaagcctcacaaagtgatcctccctggccccccccctcccccaagcctcccnccgcctccccggcctggtgacaccacctcccatgcagatgtggcccctctgcacctgggacccatcgggtcgggatggaccacacggacggggaggctcctggagctgctttgaagatggatgagatgaggggtgtgctctgggtgggaggagcagcgtacacccgtcaccagaacatctcttgtgtcatgacatgggggtgcaacgggggcctcacagcacagagtgaccgctgcctggcgttccccagcactcggtgtggaaaggcccctacctgctgtaagattatgggtccatgaaagcagtaagctggacacagaggtgtagtgtgcgggacagagggccttgcagatgcctttctgttggtgttttagtgttaaaatacggagagtatggaactcttcacctccattttctcagcggctgtgaagcagcctcctagcttcggaagtacggacactacgtcgcgttttcaagcgtgtctgttctgcaggtaacagcatcaagctgcacgtggaagcatctcgcggttttctagaaacaggcattttcttatccctctcccgctcctttttccacaaaggtgaatttcataaatgtaatactagtaaagtgaatgaattactgagtttatacagaaatttaggtaacttctcctttagtctcaagagcgagtcttgctttttaatgggtgccgtttatgttgctgcccgccctgtgtgcctggctcctctgggtgccttggtgtctgctggtggctggcagtgggcgcagcggaggagagttgtgctgcagctcatacggtgtgtctgtcatctcagtctggagtaaatgcagtgtctgccggtgtctgatgggttctgtccctcgtattttctttgccttctatcccattgcctggctaccgctgcctggcagccaagggtgttggtcgcgaagctggagtggcctctggtggagcctgcatcttgtctcgtctgcctctgctttacatttggtgtactttcgggcgtggtggcagtaaaatgacaccgtgattgagcttgtcagcagagctgaaagagaaagtagaaggatgtgcattgtttcttgtaagatatcttgcatgtatctgtgtattcaaattcaaacagagatggtttgtccatttgtccactgagaaattataaactagggacaagggggaggaaaagtactgaaatacagtttatgaagcaagtgtgtctcgggctgtgcttgtcccaggagccccagcagcatctgaactgaggcttcttcagtcctgcaggaacaggatcatctgtctcagcggtgggcagatgttttcatagacagccagggagtaaacactgttggctctgtgggctgtatggtctctgccataaatagtacagagatgtggctgtgtctagtacaacttttagacacagaaatctgaatgacatatattgttctgtgtcaagaaacttagattttttttttaactatttaaaaacgtgaaacctattcttagctcacaggccatggagaagctggtggggaccagacccagctccttagctggctgggctggggagggggcagtgacagtggcagctgctactcactgctcagtgtggaaaacacaggacttggcaatcacagcccgcagaaccatcatgtgtggcagaagcctgagggatgcggtttcttgcccacgtgctctgttcattttctgttgtttttctgcacttaaagaattcacatggaagcatgttttataaaatgaattaccagagaaacagagatgggccgagattctcagaaatggtcccatgtgaccaagttctgctgtttgggtgacagtgctttgaagatctcctttgaggatgtgcagtcttttttttttttttttttgagatggagtttgttgcccaggctggagtgagtggcacagtctcggctcactgcaacctccacctcctgggttcaagcagttctcgtgccgcagcctcccaagtagctgggactacaggcatgcgccaccacgccaggctaatttttgtatttttagtagagatggggtttcaccatgtctcaaactcctgacctcaggcgatccacccacctcagcgtcccaaagtgctgggattataggcgtgagccaccgcacctggcctatgagtggtcttttaattaggaacaaatctaatggaaaggagagttgactgaagttggcccacaggattgtgagctgggcagtgccttcatgaaggcttgccaccttgggacgccccagtttactggggtgtcttgcggagtgcagaaggctttctggcagctgcctgggtttggccagaccctgcctcccctcccgccggccaacccctagtccccttcctgtctccacttgcattcaggggtggctgctgttctgagaacattagaactgggaagagagatggagtcacatggatttttggtgggcattattctgaactttcgtatccaagttagtcccccttattccactgtggcattgccgttctaagcagttacctgatgcctgctgctgaagagctgctcacaggaggcggcggcggccctggcactgccccttgcattaggtcttgtgtttgatgtgttcttgtgaatttactttgtcagaacaaaatatttacgcgttgggttcaggaatttcttttagctccccatctggctgtgaaattcaggaaacctcccgttgcctagtaatcaccccatgtaggtgtacattgtgacaaagtgcatctgaccactaaggggcccccttggtgaccccagcacattcacagcagtgttaaaatggcctgcattttggagatgctggctggcctttcagtgcctcccaggaagacacatggcctttccctcttcagatgcctgaagggagtgctttgaggcaggtgatgtgctgggagtgtgggcggcctccctctggccccggggccctctgtggaccttggctccctccgtggacctgggcttcgtggtgagcactgcagcctccctgggcattccctccagcgccagcaccactgcaacatatagacctgagtgctattgtattttggcttggtgtgtatgctcttcattgtgtaaaattgctgttcttttgacaatttaagtgattgttttgtttactgtaagtttgaaaataaaaatgaagaaaaaaattccaatgactgtgctgtggttggagactttatttaccaagatgtttactcttcctttccccttccattttgaggagctgtgtcactcctcctcccccccagtgctttgtagtctctcctatgtcataataaagctacattttctctgagaaaaaaaaacagttt

SEQ ID NO: 68352 - DNA, 4418 bp, Homo sapiens
  misc_feature (1059)..(1059): n is a, c, g, or t
taggctaggtgcgaggccgggtgttggcccatgagtttatcctcctcccaagtccctcagtgactgtgatggtctccagactgggaagtccttgcttgaggagcgcccctcgccttccgagttcacacacacccctccccagggccaccttgggagccaggacacgttgggtgtgagcactgctgctcttgctcctgccccatcccacctgagtgtcactgtgacaaagggcacagcggggaagggatgtgggaacggcttccaccccgggttgcctctggagctgggtgggtgtcagtcctcacagccattgttttccctctgcttccagtggagtctccaccaccatcgaccccttctgggacatcagcttggatctccccggctcttccaccccattctggcccctgagcccagggagcgagggcaacgtggtaaacggggaaagccacgtgtcgggaaccaccacgctcacggactgcctgcgacgattcaccagaccagagcacttgggcagcagcgccaagatcaagtgcagcggttgccatagctaccaggagtccacaaagcagctcactatgaagaaactgcccatcgtagcctgttttcatctcaaacgatttgaacactcagccaagctgcggcggaagatcaccacgtatgtgtccttccccctggagctggacatgacccctttcatggcctccagcaaagagagcaggatgaatggacagtaccagcagcccacggacagtctcaacaatgacaacaagtattccctgtttgctgttgttaaccatcaagggaccttggagagtggccactacaccagctttatccggcagcacaaagaccagtggttcaagtgtgacgatgccatcatcaccaaggccagcatcaaggacgtcctggacagcgaagggtacttgctgttctatcacaaacagttcctggaatacgagtagccttatctgcagctggtcagaaaaacaaaggcaatgcattggcaagcctcacaaagtgatcctccctggccccccccctcccccaagcctcccnccgcctccccggcctggtgacaccacctcccatgcagatgtggcccctctgcacctgggacccatcgggtcgggatggaccacacggacggggaggctcctggagctgctttgaagatggatgagatgaggggtgtgctctgggtgggaggagcagcgtacacccgtcaccagaacatctcttgtgtcatgacatgggggtgcaacgggggcctcacagcacagagtgaccgctgcctggcgttccccagcactcggtgtggaaaggcccctacctgctgtaagattatgggtccatgaaagcagtaagctggacacagaggtgtagtgtgcgggacagagggccttgcagatgcctttctgttggtgttttagtgttaaaatacggagagtatggaactcttcacctccattttctcagcggctgtgaagcagcctcctagcttcggaagtacggacactacgtcgcgttttcaagcgtgtctgttctgcaggtaacagcatcaagctgcacgtggaagcatctcgcggttttctagaaacaggcattttcttatccctctcccgctcctttttccacaaaggtgaatttcataaatgtaatactagtaaagtgaatgaattactgagtttatacagaaatttaggtaacttctcctttagtctcaagagcgagtcttgctttttaatgggtgccgtttatgttgctgcccgccctgtgtgcctggctcctctgggtgccttggtgtctgctggtggctggcagtgggcgcagcggaggagagttgtgctgcagctcatacggtgtgtctgtcatctcagtctggagtaaatgcagtgtctgccggtgtctgatgggttctgtccctcgtattttctttgccttctatcccattgcctggctaccgctgcctggcagccaagggtgttggtcgcgaagctggagtggcctctggtggagcctgcatcttgtctcgtctgcctctgctttacatttggtgtactttcgggcgtggtggcagtaaaatgacaccgtgattgagcttgtcagcagagctgaaagagaaagtagaaggatgtgcattgtttcttgtaagatatcttgcatgtatctgtgtattcaaattcaaacagagatggtttgtccatttgtccactgagaaattataaactagggacaagggggaggaaaagtactgaaatacagtttatgaagcaagtgtgtctcgggctgtgcttgtcccaggagccccagcagcatctgaactgaggcttcttcagtcctgcaggaacaggatcatctgtctcagcggtgggcagatgttttcatagacagccagggagtaaacactgttggctctgtgggctgtatggtctctgccataaatagtacagagatgtggctgtgtctagtacaacttttagacacagaaatctgaatgacatatattgttctgtgtcaagaaacttagattttttttttaactatttaaaaacgtgaaacctattcttagctcacaggccatggagaagctggtggggaccagacccagctccttagctggctgggctggggagggggcagtgacagtggcagctgctactcactgctcagtgtggaaaacacaggacttggcaatcacagcccgcagaaccatcatgtgtggcagaagcctgagggatgcggtttcttgcccacgtgctctgttcattttctgttgtttttctgcacttaaagaattcacatggaagcatgttttataaaatgaattaccagagaaacagagatgggccgagattctcagaaatggtcccatgtgaccaagttctgctgtttgggtgacagtgctttgaagatctcctttgaggatgtgcagtcttttttttttttttttttgagatggagtttgttgcccaggctggagtgagtggcacagtctcggctcactgcaacctccacctcctgggttcaagcagttctcgtgccgcagcctcccaagtagctgggactacaggcatgcgccaccacgccaggctaatttttgtatttttagtagagatggggtttcaccatgtctcaaactcctgacctcaggcgatccacccacctcagcgtcccaaagtgctgggattataggcgtgagccaccgcacctggcctatgagtggtcttttaattaggaacaaatctaatggaaaggagagttgactgaagttggcccacaggattgtgagctgggcagtgccttcatgaaggcttgccaccttgggacgccccagtttactggggtgtcttgcggagtgcagaaggctttctggcagctgcctgggtttggccagaccctgcctcccctcccgccggccaacccctagtccccttcctgtctccacttgcattcaggggtggctgctgttctgagaacattagaactgggaagagagatggagtcacatggatttttggtgggcattattctgaactttcgtatccaagttagtcccccttattccactgtggcattgccgttctaagcagttacctgatgcctgctgctgaagagctgctcacaggaggcggcggcggccctggcactgccccttgcattaggtcttgtgtttgatgtgttcttgtgaatttactttgtcagaacaaaatatttacgcgttgggttcaggaatttcttttagctccccatctggctgtgaaattcaggaaacctcccgttgcctagtaatcaccccatgtaggtgtacattgtgacaaagtgcatctgaccactaaggggcccccttggtgaccccagcacattcacagcagtgttaaaatggcctgcattttggagatgctggctggcctttcagtgcctcccaggaagacacatggcctttccctcttcagatgcctgaagggagtgctttgaggcaggtgatgtgctgggagtgtgggcggcctccctctggccccggggccctctgtggaccttggctccctccgtggacctgggcttcgtggtgagcactgcagcctccctgggcattccctccagcgccagcaccactgcaacatatagacctgagtgctattgtattttggcttggtgtgtatgctcttcattgtgtaaaattgctgttcttttgacaatttaagtgattgttttgtttactgtaagtttgaaaataaaaatgaagaaaaaaattccaatgactgtgctgtggttggagactttatttaccaagatgtttactcttcctttccccttccattttgaggagctgtgtcactcctcctcccccccagtgctttgtagtctctcctatgtcataataaagctacattttctctgagaaaaaaaaacagttt

SEQ ID NO: 68353 - DNA, 4167 bp, Homo sapiens
  misc_feature (808)..(808): n is a, c, g, or t
caacataggctagatgagccgcggggtatcggccgaggcacaggcgggttgcagtcagacgtcacctgccaagtctgccatggagtctccaccaccatcgaccccttctgggacatcagcttggatctccccggctcttccaccccattctggcccctgagcccagggagcgagggcaacgtggtaaacggggaaagccacgtgtcgggaaccaccacgctcacggactgcctgcgacgattcaccagaccagagcacttgggcagcagcgccaagatcaagtgcagcggttgccatagctaccaggagtccacaaagcagctcactatgaagaaactgcccatcgtagcctgttttcatctcaaacgatttgaacactcagccaagctgcggcggaagatcaccacgtatgtgtccttccccctggagctggacatgacccctttcatggcctccagcaaagagagcaggatgaatggacagtaccagcagcccacggacagtctcaacaatgacaacaagtattccctgtttgctgttgttaaccatcaagggaccttggagagtggccactacaccagctttatccggcagcacaaagaccagtggttcaagtgtgacgatgccatcatcaccaaggccagcatcaaggacgtcctggacagcgaagggtacttgctgttctatcacaaacagttcctggaatacgagtagccttatctgcagctggtcagaaaaacaaaggcaatgcattggcaagcctcacaaagtgatcctccctggccccccccctcccccaagcctcccnccgcctccccggcctggtgacaccacctcccatgcagatgtggcccctctgcacctgggacccatcgggtcgggatggaccacacggacggggaggctcctggagctgctttgaagatggatgagatgaggggtgtgctctgggtgggaggagcagcgtacacccgtcaccagaacatctcttgtgtcatgacatgggggtgcaacgggggcctcacagcacagagtgaccgctgcctggcgttccccagcactcggtgtggaaaggcccctacctgctgtaagattatgggtccatgaaagcagtaagctggacacagaggtgtagtgtgcgggacagagggccttgcagatgcctttctgttggtgttttagtgttaaaatacggagagtatggaactcttcacctccattttctcagcggctgtgaagcagcctcctagcttcggaagtacggacactacgtcgcgttttcaagcgtgtctgttctgcaggtaacagcatcaagctgcacgtggaagcatctcgcggttttctagaaacaggcattttcttatccctctcccgctcctttttccacaaaggtgaatttcataaatgtaatactagtaaagtgaatgaattactgagtttatacagaaatttaggtaacttctcctttagtctcaagagcgagtcttgctttttaatgggtgccgtttatgttgctgcccgccctgtgtgcctggctcctctgggtgccttggtgtctgctggtggctggcagtgggcgcagcggaggagagttgtgctgcagctcatacggtgtgtctgtcatctcagtctggagtaaatgcagtgtctgccggtgtctgatgggttctgtccctcgtattttctttgccttctatcccattgcctggctaccgctgcctggcagccaagggtgttggtcgcgaagctggagtggcctctggtggagcctgcatcttgtctcgtctgcctctgctttacatttggtgtactttcgggcgtggtggcagtaaaatgacaccgtgattgagcttgtcagcagagctgaaagagaaagtagaaggatgtgcattgtttcttgtaagatatcttgcatgtatctgtgtattcaaattcaaacagagatggtttgtccatttgtccactgagaaattataaactagggacaagggggaggaaaagtactgaaatacagtttatgaagcaagtgtgtctcgggctgtgcttgtcccaggagccccagcagcatctgaactgaggcttcttcagtcctgcaggaacaggatcatctgtctcagcggtgggcagatgttttcatagacagccagggagtaaacactgttggctctgtgggctgtatggtctctgccataaatagtacagagatgtggctgtgtctagtacaacttttagacacagaaatctgaatgacatatattgttctgtgtcaagaaacttagattttttttttaactatttaaaaacgtgaaacctattcttagctcacaggccatggagaagctggtggggaccagacccagctccttagctggctgggctggggagggggcagtgacagtggcagctgctactcactgctcagtgtggaaaacacaggacttggcaatcacagcccgcagaaccatcatgtgtggcagaagcctgagggatgcggtttcttgcccacgtgctctgttcattttctgttgtttttctgcacttaaagaattcacatggaagcatgttttataaaatgaattaccagagaaacagagatgggccgagattctcagaaatggtcccatgtgaccaagttctgctgtttgggtgacagtgctttgaagatctcctttgaggatgtgcagtcttttttttttttttttttgagatggagtttgttgcccaggctggagtgagtggcacagtctcggctcactgcaacctccacctcctgggttcaagcagttctcgtgccgcagcctcccaagtagctgggactacaggcatgcgccaccacgccaggctaatttttgtatttttagtagagatggggtttcaccatgtctcaaactcctgacctcaggcgatccacccacctcagcgtcccaaagtgctgggattataggcgtgagccaccgcacctggcctatgagtggtcttttaattaggaacaaatctaatggaaaggagagttgactgaagttggcccacaggattgtgagctgggcagtgccttcatgaaggcttgccaccttgggacgccccagtttactggggtgtcttgcggagtgcagaaggctttctggcagctgcctgggtttggccagaccctgcctcccctcccgccggccaacccctagtccccttcctgtctccacttgcattcaggggtggctgctgttctgagaacattagaactgggaagagagatggagtcacatggatttttggtgggcattattctgaactttcgtatccaagttagtcccccttattccactgtggcattgccgttctaagcagttacctgatgcctgctgctgaagagctgctcacaggaggcggcggcggccctggcactgccccttgcattaggtcttgtgtttgatgtgttcttgtgaatttactttgtcagaacaaaatatttacgcgttgggttcaggaatttcttttagctccccatctggctgtgaaattcaggaaacctcccgttgcctagtaatcaccccatgtaggtgtacattgtgacaaagtgcatctgaccactaaggggcccccttggtgaccccagcacattcacagcagtgttaaaatggcctgcattttggagatgctggctggcctttcagtgcctcccaggaagacacatggcctttccctcttcagatgcctgaagggagtgctttgaggcaggtgatgtgctgggagtgtgggcggcctccctctggccccggggccctctgtggaccttggctccctccgtggacctgggcttcgtggtgagcactgcagcctccctgggcattccctccagcgccagcaccactgcaacatatagacctgagtgctattgtattttggcttggtgtgtatgctcttcattgtgtaaaattgctgttcttttgacaatttaagtgattgttttgtttactgtaagtttgaaaataaaaatgaagaaaaaaattccaatgactgtgctgtggttggagactttatttaccaagatgtttactcttcctttccccttccattttgaggagctgtgtcactcctcctcccccccagtgctttgtagtctctcctatgtcataataaagctacattttctctgagaaaaaaaaacagttt

SEQ ID NO: 68354 - DNA, 3810 bp, Homo sapiens
  misc_feature (607)..(607): n is a, c, g, or t
gtgaactggcaccgtcgctcggcacctgcctgacgacgattcaccagaccagagcacttgggcagcagcgccaagatcaagtgcagcggttgccatagctaccaggagtccacaaagcagctcactatgaagaaactgcccatcgtagcctgttttcatctcaaacgatttgaacactcagccaagctgcggcggaagatcaccacgtatgtgtccttccccctggagctggacatgacccctttcatggcctccagcaaagagagcaggatgaatggacagtaccagcagcccacggacagtctcaacaatgacaacaagtattccctgtttgctgttgttaaccatcaagggaccttggagagtggccactacaccagctttatccggcagcacaaagaccagtggttcaagtgtgacgatgccatcatcaccaaggccagcatcaaggacgtcctggacagcgaagggtacttgctgttctatcacaaacagttcctggaatacgagtagccttatctgcagctggtcagaaaaacaaaggcaatgcattggcaagcctcacaaagtgatcctccctggccccccccctcccccaagcctcccnccgcctccccggcctggtgacaccacctcccatgcagatgtggcccctctgcacctgggacccatcgggtcgggatggaccacacggacggggaggctcctggagctgctttgaagatggatgagatgaggggtgtgctctgggtgggaggagcagcgtacacccgtcaccagaacatctcttgtgtcatgacatgggggtgcaacgggggcctcacagcacagagtgaccgctgcctggcgttccccagcactcggtgtggaaaggcccctacctgctgtaagattatgggtccatgaaagcagtaagctggacacagaggtgtagtgtgcgggacagagggccttgcagatgcctttctgttggtgttttagtgttaaaatacggagagtatggaactcttcacctccattttctcagcggctgtgaagcagcctcctagcttcggaagtacggacactacgtcgcgttttcaagcgtgtctgttctgcaggtaacagcatcaagctgcacgtggaagcatctcgcggttttctagaaacaggcattttcttatccctctcccgctcctttttccacaaaggtgaatttcataaatgtaatactagtaaagtgaatgaattactgagtttatacagaaatttaggtaacttctcctttagtctcaagagcgagtcttgctttttaatgggtgccgtttatgttgctgcccgccctgtgtgcctggctcctctgggtgccttggtgtctgctggtggctggcagtgggcgcagcggaggagagttgtgctgcagctcatacggtgtgtctgtcatctcagtctggagtaaatgcagtgtctgccggtgtctgatgggttctgtccctcgtattttctttgccttctatcccattgcctggctaccgctgcctggcagccaagggtgttggtcgcgaagctggagtggcctctggtggagcctgcatcttgtctcgtctgcctctgctttacatttggtgtactttcgggcgtggtggcagtaaaatgacaccgtgattgagcttgtcagcagagctgaaagagaaagtagaaggatgtgcattgtttcttgtaagatatcttgcatgtatctgtgtattcaaattcaaacagagatggtttgtccatttgtccactgagaaattataaactagggacaagggggaggaaaagtactgaaatacagtttatgaagcaagtgtgtctcgggctgtgcttgtcccaggagccccagcagcatctgaactgaggcttcttcagtcctgcaggaacaggatcatctgtctcagcggtgggcagatgttttcatagacagccagggagtaaacactgttggctctgtgggctgtatggtctctgccataaatagtacagagatgtggctgtgtctagtacaacttttagacacagaaatctgaatgacatatattgttctgtgtcaagaaacttagattttttttttaactatttaaaaacgtgaaacctattcttagctcacaggccatggagaagctggtggggaccagacccagctccttagctggctgggctggggagggggcagtgacagtggcagctgctactcactgctcagtgtggaaaacacaggacttggcaatcacagcccgcagaaccatcatgtgtggcagaagcctgagggatgcggtttcttgcccacgtgctctgttcattttctgttgtttttctgcacttaaagaattcacatggaagcatgttttataaaatgaattaccagagaaacagagatgggccgagattctcagaaatggtcccatgtgaccaagttctgctgtttgggtgacagtgctttgaagatctcctttgaggatgtgcagtcttttttttttttttttttgagatggagtttgttgcccaggctggagtgagtggcacagtctcggctcactgcaacctccacctcctgggttcaagcagttctcgtgccgcagcctcccaagtagctgggactacaggcatgcgccaccacgccaggctaatttttgtatttttagtagagatggggtttcaccatgtctcaaactcctgacctcaggcgatccacccacctcagcgtcccaaagtgctgggattataggcgtgagccaccgcacctggcctatgagtggtcttttaattaggaacaaatctaatggaaaggagagttgactgaagttggcccacaggattgtgagctgggcagtgccttcatgaaggcttgccaccttgggacgccccagtttactggggtgtcttgcggagtgcagaaggctttctggcagctgcctgggtttggccagaccctgcctcccctcccgccggccaacccctagtccccttcctgtctccacttgcattcaggggtggctgctgttctgagaacattagaactgggaagagagatggagtcacatggatttttggtgggcattattctgaactttcgtatccaagttagtcccccttattccactgtggcattgccgttctaagcagttacctgatgcctgctgctgaagagctgctcacaggaggcggcggcggccctggcactgccccttgcattaggtcttgtgtttgatgtgttcttgtgaatttactttgtcagaacaaaatatttacgcgttgggttcaggaatttcttttagctccccatctggctgtgaaattcaggaaacctcccgttgcctagtaatcaccccatgtaggtgtacattgtgacaaagtgcatctgaccactaaggggcccccttggtgaccccagcacattcacagcagtgttaaaatggcctgcattttggagatgctggctggcctttcagtgcctcccaggaagacacatggcctttccctcttcagatgcctgaagggagtgctttgaggcaggtgatgtgctgggagtgtgggcggcctccctctggccccggggccctctgtggaccttggctccctccgtggacctgggcttcgtggtgagcactgcagcctccctgggcattccctccagcgccagcaccactgcaacatatagacctgagtgctattgtattttggcttggtgtgtatgctcttcattgtgtaaaattgctgttcttttgacaatttaagtgattgttttgtttactgtaagtttgaaaataaaaatgaagaaaaaaattccaatga

SEQ ID NO: 68355 - DNA, 3435 bp, Homo sapiens
  misc_feature (232)..(232): n is a, c, g, or t
aacaaacaaaaaagcaggactatgacgagctgggtgttactcggccgaggcccatcaccaaggtcaagcatcaaggacgtctggacagcgaatgggtacttgctgttctatcacaaacagttcctggaatacgagtagccttatctgcagctggtcagaaaaacaaaggcaatgcattggcaagcctcacaaagtgatcctccctggccccccccctcccccaagcctcccnccgcctccccggcctggtgacaccacctcccatgcagatgtggcccctctgcacctgggacccatcgggtcgggatggaccacacggacggggaggctcctggagctgctttgaagatggatgagatgaggggtgtgctctgggtgggaggagcagcgtacacccgtcaccagaacatctcttgtgtcatgacatgggggtgcaacgggggcctcacagcacagagtgaccgctgcctggcgttccccagcactcggtgtggaaaggcccctacctgctgtaagattatgggtccatgaaagcagtaagctggacacagaggtgtagtgtgcgggacagagggccttgcagatgcctttctgttggtgttttagtgttaaaatacggagagtatggaactcttcacctccattttctcagcggctgtgaagcagcctcctagcttcggaagtacggacactacgtcgcgttttcaagcgtgtctgttctgcaggtaacagcatcaagctgcacgtggaagcatctcgcggttttctagaaacaggcattttcttatccctctcccgctcctttttccacaaaggtgaatttcataaatgtaatactagtaaagtgaatgaattactgagtttatacagaaatttaggtaacttctcctttagtctcaagagcgagtcttgctttttaatgggtgccgtttatgttgctgcccgccctgtgtgcctggctcctctgggtgccttggtgtctgctggtggctggcagtgggcgcagcggaggagagttgtgctgcagctcatacggtgtgtctgtcatctcagtctggagtaaatgcagtgtctgccggtgtctgatgggttctgtccctcgtattttctttgccttctatcccattgcctggctaccgctgcctggcagccaagggtgttggtcgcgaagctggagtggcctctggtggagcctgcatcttgtctcgtctgcctctgctttacatttggtgtactttcgggcgtggtggcagtaaaatgacaccgtgattgagcttgtcagcagagctgaaagagaaagtagaaggatgtgcattgtttcttgtaagatatcttgcatgtatctgtgtattcaaattcaaacagagatggtttgtccatttgtccactgagaaattataaactagggacaagggggaggaaaagtactgaaatacagtttatgaagcaagtgtgtctcgggctgtgcttgtcccaggagccccagcagcatctgaactgaggcttcttcagtcctgcaggaacaggatcatctgtctcagcggtgggcagatgttttcatagacagccagggagtaaacactgttggctctgtgggctgtatggtctctgccataaatagtacagagatgtggctgtgtctagtacaacttttagacacagaaatctgaatgacatatattgttctgtgtcaagaaacttagattttttttttaactatttaaaaacgtgaaacctattcttagctcacaggccatggagaagctggtggggaccagacccagctccttagctggctgggctggggagggggcagtgacagtggcagctgctactcactgctcagtgtggaaaacacaggacttggcaatcacagcccgcagaaccatcatgtgtggcagaagcctgagggatgcggtttcttgcccacgtgctctgttcattttctgttgtttttctgcacttaaagaattcacatggaagcatgttttataaaatgaattaccagagaaacagagatgggccgagattctcagaaatggtcccatgtgaccaagttctgctgtttgggtgacagtgctttgaagatctcctttgaggatgtgcagtcttttttttttttttttttgagatggagtttgttgcccaggctggagtgagtggcacagtctcggctcactgcaacctccacctcctgggttcaagcagttctcgtgccgcagcctcccaagtagctgggactacaggcatgcgccaccacgccaggctaatttttgtatttttagtagagatggggtttcaccatgtctcaaactcctgacctcaggcgatccacccacctcagcgtcccaaagtgctgggattataggcgtgagccaccgcacctggcctatgagtggtcttttaattaggaacaaatctaatggaaaggagagttgactgaagttggcccacaggattgtgagctgggcagtgccttcatgaaggcttgccaccttgggacgccccagtttactggggtgtcttgcggagtgcagaaggctttctggcagctgcctgggtttggccagaccctgcctcccctcccgccggccaacccctagtccccttcctgtctccacttgcattcaggggtggctgctgttctgagaacattagaactgggaagagagatggagtcacatggatttttggtgggcattattctgaactttcgtatccaagttagtcccccttattccactgtggcattgccgttctaagcagttacctgatgcctgctgctgaagagctgctcacaggaggcggcggcggccctggcactgccccttgcattaggtcttgtgtttgatgtgttcttgtgaatttactttgtcagaacaaaatatttacgcgttgggttcaggaatttcttttagctccccatctggctgtgaaattcaggaaacctcccgttgcctagtaatcaccccatgtaggtgtacattgtgacaaagtgcatctgaccactaaggggcccccttggtgaccccagcacattcacagcagtgttaaaatggcctgcattttggagatgctggctggcctttcagtgcctcccaggaagacacatggcctttccctcttcagatgcctgaagggagtgctttgaggcaggtgatgtgctgggagtgtgggcggcctccctctggccccggggccctctgtggaccttggctccctccgtggacctgggcttcgtggtgagcactgcagcctccctgggcattccctccagcgccagcaccactgcaacatatagacctgagtgctattgtattttggcttggtgtgtatgctcttcattgtgtaaaattgctgttcttttgacaatttaagtgattgttttgtttactgtaagtttgaaaataaaaatgaagaaaaaaattccaatga

SEQ ID NO: 68356 - DNA, 2762 bp, Homo sapiens
actaggtacgaggccggcggttaatcggccgaggagcgtgtctgttctgcaggtaacagcatcaagctgcacgtggaagcatctcgcggttttctagaaacaggcattttcttatccctctcccgctcctttttccacaaaggtgaatttcataaatgtaatactagtaaagtgaatgaattactgagtttatacagaaatttaggtaacttctcctttagtctcaagagcgagtcttgctttttaatgggtgccgtttatgttgctgcccgccctgtgtgcctggctcctctgggtgccttggtgtctgctggtggctggcagtgggcgcagcggaggagagttgtgctgcagctcatacggtgtgtctgtcatctcagtctggagtaaatgcagtgtctgccggtgtctgatgggttctgtccctcgtattttctttgccttctatcccattgcctggctaccgctgcctggcagccaagggtgttggtcgcgaagctggagtggcctctggtggagcctgcatcttgtctcgtctgcctctgctttacatttggtgtactttcgggcgtggtggcagtaaaatgacaccgtgattgagcttgtcagcagagctgaaagagaaagtagaaggatgtgcattgtttcttgtaagatatcttgcatgtatctgtgtattcaaattcaaacagagatggtttgtccatttgtccactgagaaattataaactagggacaagggggaggaaaagtactgaaatacagtttatgaagcaagtgtgtctcgggctgtgcttgtcccaggagccccagcagcatctgaactgaggcttcttcagtcctgcaggaacaggatcatctgtctcagcggtgggcagatgttttcatagacagccagggagtaaacactgttggctctgtgggctgtatggtctctgccataaatagtacagagatgtggctgtgtctagtacaacttttagacacagaaatctgaatgacatatattgttctgtgtcaagaaacttagattttttttttaactatttaaaaacgtgaaacctattcttagctcacaggccatggagaagctggtggggaccagacccagctccttagctggctgggctggggagggggcagtgacagtggcagctgctactcactgctcagtgtggaaaacacaggacttggcaatcacagcccgcagaaccatcatgtgtggcagaagcctgagggatgcggtttcttgcccacgtgctctgttcattttctgttgtttttctgcacttaaagaattcacatggaagcatgttttataaaatgaattaccagagaaacagagatgggccgagattctcagaaatggtcccatgtgaccaagttctgctgtttgggtgacagtgctttgaagatctcctttgaggatgtgcagtcttttttttttttttttttgagatggagtttgttgcccaggctggagtgagtggcacagtctcggctcactgcaacctccacctcctgggttcaagcagttctcgtgccgcagcctcccaagtagctgggactacaggcatgcgccaccacgccaggctaatttttgtatttttagtagagatggggtttcaccatgtctcaaactcctgacctcaggcgatccacccacctcagcgtcccaaagtgctgggattataggcgtgagccaccgcacctggcctatgagtggtcttttaattaggaacaaatctaatggaaaggagagttgactgaagttggcccacaggattgtgagctgggcagtgccttcatgaaggcttgccaccttgggacgccccagtttactggggtgtcttgcggagtgcagaaggctttctggcagctgcctgggtttggccagaccctgcctcccctcccgccggccaacccctagtccccttcctgtctccacttgcattcaggggtggctgctgttctgagaacattagaactgggaagagagatggagtcacatggatttttggtgggcattattctgaactttcgtatccaagttagtcccccttattccactgtggcattgccgttctaagcagttacctgatgcctgctgctgaagagctgctcacaggaggcggcggcggccctggcactgccccttgcattaggtcttgtgtttgatgtgttcttgtgaatttactttgtcagaacaaaatatttacgcgttgggttcaggaatttcttttagctccccatctggctgtgaaattcaggaaacctcccgttgcctagtaatcaccccatgtaggtgtacattgtgacaaagtgcatctgaccactaaggggcccccttggtgaccccagcacattcacagcagtgttaaaatggcctgcattttggagatgctggctggcctttcagtgcctcccaggaagacacatggcctttccctcttcagatgcctgaagggagtgctttgaggcaggtgatgtgctgggagtgtgggcggcctccctctggccccggggccctctgtggaccttggctccctccgtggacctgggcttcgtggtgagcactgcagcctccctgggcattccctccagcgccagcaccactgcaacatatagacctgagtgctattgtattttggcttggtgtgtatgctcttcattgtgtaaaattgctgttcttttgacaatttaagtgattgttttgtttactgtaagtttgaaaataaaaatgaagaaaaaaattccaatga

SEQ ID NO: 68357 - DNA, 2388 bp, Homo sapiens
tgtcagtaagcactgcactctgggactgccgagagctgattctgtccgcccctcgtattttctttgccttctatcccattgcctggctaccgctgcctggcagccaagggtgttggtcgcgaagctggagtggcctctggtggagcctgcatcttgtctcgtctgcctctgctttacatttggtgtactttcgggcgtggtggcagtaaaatgacaccgtgattgagcttgtcagcagagctgaaagagaaagtagaaggatgtgcattgtttcttgtaagatatcttgcatgtatctgtgtattcaaattcaaacagagatggtttgtccatttgtccactgagaaattataaactagggacaagggggaggaaaagtactgaaatacagtttatgaagcaagtgtgtctcgggctgtgcttgtcccaggagccccagcagcatctgaactgaggcttcttcagtcctgcaggaacaggatcatctgtctcagcggtgggcagatgttttcatagacagccagggagtaaacactgttggctctgtgggctgtatggtctctgccataaatagtacagagatgtggctgtgtctagtacaacttttagacacagaaatctgaatgacatatattgttctgtgtcaagaaacttagattttttttttaactatttaaaaacgtgaaacctattcttagctcacaggccatggagaagctggtggggaccagacccagctccttagctggctgggctggggagggggcagtgacagtggcagctgctactcactgctcagtgtggaaaacacaggacttggcaatcacagcccgcagaaccatcatgtgtggcagaagcctgagggatgcggtttcttgcccacgtgctctgttcattttctgttgtttttctgcacttaaagaattcacatggaagcatgttttataaaatgaattaccagagaaacagagatgggccgagattctcagaaatggtcccatgtgaccaagttctgctgtttgggtgacagtgctttgaagatctcctttgaggatgtgcagtcttttttttttttttttttgagatggagtttgttgcccaggctggagtgagtggcacagtctcggctcactgcaacctccacctcctgggttcaagcagttctcgtgccgcagcctcccaagtagctgggactacaggcatgcgccaccacgccaggctaatttttgtatttttagtagagatggggtttcaccatgtctcaaactcctgacctcaggcgatccacccacctcagcgtcccaaagtgctgggattataggcgtgagccaccgcacctggcctatgagtggtcttttaattaggaacaaatctaatggaaaggagagttgactgaagttggcccacaggattgtgagctgggcagtgccttcatgaaggcttgccaccttgggacgccccagtttactggggtgtcttgcggagtgcagaaggctttctggcagctgcctgggtttggccagaccctgcctcccctcccgccggccaacccctagtccccttcctgtctccacttgcattcaggggtggctgctgttctgagaacattagaactgggaagagagatggagtcacatggatttttggtgggcattattctgaactttcgtatccaagttagtcccccttattccactgtggcattgccgttctaagcagttacctgatgcctgctgctgaagagctgctcacaggaggcggcggcggccctggcactgccccttgcattaggtcttgtgtttgatgtgttcttgtgaatttactttgtcagaacaaaatatttacgcgttgggttcaggaatttcttttagctccccatctggctgtgaaattcaggaaacctcccgttgcctagtaatcaccccatgtaggtgtacattgtgacaaagtgcatctgaccactaaggggcccccttggtgaccccagcacattcacagcagtgttaaaatggcctgcattttggagatgctggctggcctttcagtgcctcccaggaagacacatggcctttccctcttcagatgcctgaagggagtgctttgaggcaggtgatgtgctgggagtgtgggcggcctccctctggccccggggccctctgtggaccttggctccctccgtggacctgggcttcgtggtgagcactgcagcctccctgggcattccctccagcgccagcaccactgcaacatatagacctgagtgctattgtattttggcttggtgtgtatgctcttcattgtgtaaaattgctgttcttttgacaatttaagtgattgttttgtttactgtaagtttgaaaataaaaatgaagaaaaaaattccaatga

SEQ ID NO: 68358 - DNA, 5096 bp, Homo sapiens
  misc_feature (1896)..(1896): n is a, c, g, or t
gagcggagtgcggtccgcagcagccgcagctcgggggcggtgcctgccttgcagcctcccctcggcgatcgcgcagccccatctttgtccggcctccgcgctttgttctcggcgcccgggccttggccagcctggccagccgccgagcagcccccacgccgcgctggcgtcgtcctcgcctccctcgccgccgccccccgcgcgctggccgggccttgccccccatggtgtcccggccagagcccgagggcgaggccatggacgccgagctggcggtagcgccgccgggctgctcgcacctgggcagcttcaaggtggacaactggaagcagaacctgcgggccatctaccagtgcttcgtgtggagcggcacggctgaggcccgcaagcgcaaggccaagtcctgtatctgccatgtctgtggcgtccacctcaacaggctgcattcctgcctctactgtgtcttcttcggctgtttcacaaagaagcatattcacgagcatgcgaaggcgaagcggcacaacctggccattgatctgatgtatggaggcatctactgttttctgtgccaggactacatctatgacaaagacatggaaataatcgccaaggaggagcagcgaaaagcttggaaaatgcaaggcgttggagagaagttttcaacttgggaaccaaccaaacgggagcttgaactgctgaagcacaacccgaaaaggagaaagatcacctcgaactgcaccataggtctgcgtgggctgatcaaccttgggaacacatgcttcatgaactgcatcgtgcaggccctgacccacacgccacttctgcgggacttcttcctgtctgacaggcaccgctgtgagatgcagagccccagctcctgtctggtctgtgagatgtcctcactgtttcaggagttttactctggacaccggtcccctcacatcccgtataagttgctgcacctggtgtggacccacgcgaggcacctagcaggctacgagcagcaggacgcccacgagttcctcatcgcggccctggacgtgctccaccgacactgcaaaggtgatgacaatgggaagaaggccaacaaccccaaccactgcaactgcatcatagaccagatcttcacaggcgggttgcagtcagacgtcacctgccaagtctgccatggagtctccaccaccatcgaccccttctgggacatcagcttggatctccccggctcttccaccccattctggcccctgagcccagggagcgagggcaacgtggtaaacggggaaagccacgtgtcgggaaccaccacgctcacggactgcctgcgacgattcaccagaccagagcacttgggcagcagcgccaagatcaagtgcagcggttgccatagctaccaggagtccacaaagcagctcactatgaagaaactgcccatcgtagcctgttttcatctcaaacgatttgaacactcagccaagctgcggcggaagatcaccacgtatgtgtccttccccctggagctggacatgacccctttcatggcctccagcaaagagagcaggatgaatggacagtaccagcagcccacggacagtctcaacaatgacaacaagtattccctgtttgctgttgttaaccatcaagggaccttggagagtggccactacaccagctttatccggcagcacaaagaccagtggttcaagtgtgacgatgccatcatcaccaaggccagcatcaaggacgtcctggacagcgaagggtacttgctgttctatcacaaacagttcctggaatacgagtagccttatctgcagctggtcagaaaaacaaaggcaatgcattggcaagcctcacaaagtgatcctccctggccccccccctcccccaagcctcccnccgcctccccggcctggtgacaccacctcccatgcagatgtggcccctctgcacctgggacccatcgggtcgggatggaccacacggacggggaggctcctggagctgctttgaagatggatgagatgaggggtgtgctctgggtgggaggagcagcgtacacccgtcaccagaacatctcttgtgtcatgacatgggggtgcaacgggggcctcacagcacagagtgaccgctgcctggcgttccccagcactcggtgtggaaaggcccctacctgctgtaagattatgggtccatgaaagcagtaagctggacacagaggtgtagtgtgcgggacagagggccttgcagatgcctttctgttggtgttttagtgttaaaatacggagagtatggaactcttcacctccattttctcagcggctgtgaagcagcctcctagcttcggaagtacggacactacgtcgcgttttcaagcgtgtctgttctgcaggtaacagcatcaagctgcacgtggaagcatctcgcggttttctagaaacaggcattttcttatccctctcccgctcctttttccacaaaggtgaatttcataaatgtaatactagtaaagtgaatgaattactgagtttatacagaaatttaggtaacttctcctttagtctcaagagcgagtcttgctttttaatgggtgccgtttatgttgctgcccgccctgtgtgcctggctcctctgggtgccttggtgtctgctggtggctggcagtgggcgcagcggaggagagttgtgctgcagctcatacggtgtgtctgtcatctcagtctggagtaaatgcagtgtctgccggtgtctgatgggttctgtccctcgtattttctttgccttctatcccattgcctggctaccgctgcctggcagccaagggtgttggtcgcgaagctggagtggcctctggtggagcctgcatcttgtctcgtctgcctctgctttacatttggtgtactttcgggcgtggtggcagtaaaatgacaccgtgattgagcttgtcagcagagctgaaagagaaagtagaaggatgtgcattgtttcttgtaagatatcttgcatgtatctgtgtattcaaattcaaacagagatggtttgtccatttgtccactgagaaattataaactagggacaagggggaggaaaagtactgaaatacagtttatgaagcaagtgtgtctcgggctgtgcttgtcccaggagccccagcagcatctgaactgaggcttcttcagtcctgcaggaacaggatcatctgtctcagcggtgggcagatgttttcatagacagccagggagtaaacactgttggctctgtgggctgtatggtctctgccataaatagtacagagatgtggctgtgtctagtacaacttttagacacagaaatctgaatgacatatattgttctgtgtcaagaaacttagattttttttttaactatttaaaaacgtgaaacctattcttagctcacaggccatggagaagctggtggggaccagacccagctccttagctggctgggctggggagggggcagtgacagtggcagctgctactcactgctcagtgtggaaaacacaggacttggcaatcacagcccgcagaaccatcatgtgtggcagaagcctgagggatgcggtttcttgcccacgtgctctgttcattttctgttgtttttctgcacttaaagaattcacatggaagcatgttttataaaatgaattaccagagaaacagagatgggccgagattctcagaaatggtcccatgtgaccaagttctgctgtttgggtgacagtgctttgaagatctcctttgaggatgtgcagtcttttttttttttttttttgagatggagtttgttgcccaggctggagtgagtggcacagtctcggctcactgcaacctccacctcctgggttcaagcagttctcgtgccgcagcctcccaagtagctgggactacaggcatgcgccaccacgccaggctaatttttgtatttttagtagagatggggtttcaccatgtctcaaactcctgacctcaggcgatccacccacctcagcgtcccaaagtgctgggattataggcgtgagccaccgcacctggcctatgagtggtcttttaattaggaacaaatctaatggaaaggagagttgactgaagttggcccacaggattgtgagctgggcagtgccttcatgaaggcttgccaccttgggacgccccagtttactggggtgtcttgcggagtgcagaaggctttctggcagctgcctgggtttggccagaccctgcctcccctcccgccggccaacccctagtccccttcctgtctccacttgcattcaggggtggctgctgttctgagaacattagaactgggaagagagatggagtcacatggatttttggtgggcattattctgaactttcgtatccaagttagtcccccttattccactgtggcattgccgttctaagcagttacctgatgcctgctgctgaagagctgctcacaggaggcggcggcggccctggcactgccccttgcattaggtcttgtgtttgatgtgttcttgtgaatttactttgtcagaacaaaatatttacgcgttgggttcaggaatttcttttagctccccatctggctgtgaaattcaggaaacctcccgttgcctagtaatcaccccatgtaggtgtacattgtgacaaagtgcatctgaccactaaggggcccccttggtgaccccagcacattcacagcagtgttaaaatggcctgcattttggagatgctggctggcctttcagtgcctcccaggaagacacatctccagcgccagcaccactgcaacatatagacctgagtgctattgtattttggcttggtgtgtatgctcttcattgtgtaaaattgctgttcttttgacaatttaagtgattgttttgtttactgtaagtttgaaaataaaaatgaagaaaaaaattccaatgactgtgctgtggttggagactttatttaccaagatgtttactcttcctttccccttccattttgaggagctgtgtcactcctcctcccccccagtgctttgtagtctctcctatgtcataataaagctacattttctctgagaaaaaaaaacagttt

SEQ ID NO: 68359 - DNA, 4940 bp, Homo sapiens
  misc_feature (1896)..(1896): n is a, c, g, or t
gagcggagtgcggtccgcagcagccgcagctcgggggcggtgcctgccttgcagcctcccctcggcgatcgcgcagccccatctttgtccggcctccgcgctttgttctcggcgcccgggccttggccagcctggccagccgccgagcagcccccacgccgcgctggcgtcgtcctcgcctccctcgccgccgccccccgcgcgctggccgggccttgccccccatggtgtcccggccagagcccgagggcgaggccatggacgccgagctggcggtagcgccgccgggctgctcgcacctgggcagcttcaaggtggacaactggaagcagaacctgcgggccatctaccagtgcttcgtgtggagcggcacggctgaggcccgcaagcgcaaggccaagtcctgtatctgccatgtctgtggcgtccacctcaacaggctgcattcctgcctctactgtgtcttcttcggctgtttcacaaagaagcatattcacgagcatgcgaaggcgaagcggcacaacctggccattgatctgatgtatggaggcatctactgttttctgtgccaggactacatctatgacaaagacatggaaataatcgccaaggaggagcagcgaaaagcttggaaaatgcaaggcgttggagagaagttttcaacttgggaaccaaccaaacgggagcttgaactgctgaagcacaacccgaaaaggagaaagatcacctcgaactgcaccataggtctgcgtgggctgatcaaccttgggaacacatgcttcatgaactgcatcgtgcaggccctgacccacacgccacttctgcgggacttcttcctgtctgacaggcaccgctgtgagatgcagagccccagctcctgtctggtctgtgagatgtcctcactgtttcaggagttttactctggacaccggtcccctcacatcccgtataagttgctgcacctggtgtggacccacgcgaggcacctagcaggctacgagcagcaggacgcccacgagttcctcatcgcggccctggacgtgctccaccgacactgcaaaggtgatgacaatgggaagaaggccaacaaccccaaccactgcaactgcatcatagaccagatcttcacaggcgggttgcagtcagacgtcacctgccaagtctgccatggagtctccaccaccatcgaccccttctgggacatcagcttggatctccccggctcttccaccccattctggcccctgagcccagggagcgagggcaacgtggtaaacggggaaagccacgtgtcgggaaccaccacgctcacggactgcctgcgacgattcaccagaccagagcacttgggcagcagcgccaagatcaagtgcagcggttgccatagctaccaggagtccacaaagcagctcactatgaagaaactgcccatcgtagcctgttttcatctcaaacgatttgaacactcagccaagctgcggcggaagatcaccacgtatgtgtccttccccctggagctggacatgacccctttcatggcctccagcaaagagagcaggatgaatggacagtaccagcagcccacggacagtctcaacaatgacaacaagtattccctgtttgctgttgttaaccatcaagggaccttggagagtggccactacaccagctttatccggcagcacaaagaccagtggttcaagtgtgacgatgccatcatcaccaaggccagcatcaaggacgtcctggacagcgaagggtacttgctgttctatcacaaacagttcctggaatacgagtagccttatctgcagctggtcagaaaaacaaaggcaatgcattggcaagcctcacaaagtgatcctccctggccccccccctcccccaagcctcccnccgcctccccggcctggtgacaccacctcccatgcagatgtggcccctctgcacctgggacccatcgggtcgggatggaccacacggacggggaggctcctggagctgctttgaagatggatgagatgaggggtgtgctctgggtgggaggagcagcgtacacccgtcaccagaacatctcttgtgtcatgacatgggggtgcaacgggggcctcacagcacagagtgaccgctgcctggcgttccccagcactcggtgtggaaaggcccctacctgctgtaagattatgggtccatgaaagcagtaagctggacacagaggtgtagtgtgcgggacagagggccttgcagatgcctttctgttggtgttttagtgttaaaatacggagagtatggaactcttcacctccattttctcagcggctgtgaagcagcctcctagcttcggaagtacggacactacgtcgcgttttcaagcgtgtctgttctgcaggtaacagcatcaagctgcacgtggaagcatctcgcggttttctagaaacaggcattttcttatccctctcccgctcctttttccacaaaggtgaatttcataaatgtaatactagtaaagtgaatgaattactgagtttatacagaaatttaggtaacttctcctttagtctcaagagcgagtcttgctttttaatgggtgccgtttatgttgctgcccgccctgtgtgcctggctcctctgggtgccttggtgtctgctggtggctggcagtgggcgcagcggaggagagttgtgctgcagctcatacggtgtgtctgtcatctcagtctggagtaaatgcagtgtctgccggtgtctgatgggttctgtccctcgtattttctttgccttctatcccattgcctggctaccgctgcctggcagccaagggtgttggtcgcgaagctggagtggcctctggtggagcctgcatcttgtctcgtctgcctctgctttacatttggtgtactttcgggcgtggtggcagtaaaatgacaccgtgattgagcttgtcagcagagctgaaagagaaagtagaaggatgtgcattgtttcttgtaagatatcttgcatgtatctgtgtattcaaattcaaacagagatggtttgtccatttgtccactgagaaattataaactagggacaagggggaggaaaagtactgaaatacagtttatgaagcaagtgtgtctcgggctgtgcttgtcccaggagccccagcagcatctgaactgaggcttcttcagtcctgcaggaacaggatcatctgtctcagcggtgggcagatgttttcatagacagccagggagtaaacactgttggctctgtgggctgtatggtctctgccataaatagtacagagatgtggctgtgtctagtacaacttttagacacagaaatctgaatgacatatattgttctgtgtcaagaaacttagattttttttttaactatttaaaaacgtgaaacctattcttagctcacaggccatggagaagctggtggggaccagacccagctccttagctggctgggctggggagggggcagtgacagtggcagctgctactcactgctcagtgtggaaaacacaggacttggcaatcacagcccgcagaaccatcatgtgtggcagaagcctgagggatgcggtttcttgcccacgtgctctgttcattttctgttgtttttctgcacttaaagaattcacatggaagcatgttttataaaatgaattaccagagaaacagagatgggccgagattctcagaaatggtcccatgtgaccaagttctgctgtttgggtgacagtgctttgaagatctcctttgaggatgtgcagtcttttttttttttttttttgagatggagtttgttgcccaggctggagtgagtggcacagtctcggctcactgcaacctccacctcctgggttcaagcagttctcgtgccgcagcctcccaagtagctgggactacaggcatgcgccaccacgccaggctaatttttgtatttttagtagagatggggtttcaccatgtctcaaactcctgacctcaggcgatccacccacctcagcgtcccaaagtgctgggattataggcgtgagccaccgcacctggcctatgagtggtcttttaattaggaacaaatctaatggaaaggagagttgactgaagttggcccacaggattgtgagctgggcagtgccttcatgaaggcttgccaccttgggacgccccagtttactggggtgtcttgcggagtgcagaaggctttctggcagctgcctgggtttggccagaccctgcctcccctcccgccggccaacccctagtccccttcctgtctccacttgcattcaggggtggctgctgttctgagaacattagaactgggaagagagatggagtcacatggatttttggtgggcattattctgaactttcgtatccaagttagtcccccttattccactgtggcattgccgttctaagcagttacctgatgcctgctgctgaagagctgctcacaggaggcggcggcggccctggcactgccccttgcattaggtcttgtgtttgatgtgttcttgtgaatttactttgtcagaacaaaatatttacgcgttgggttcaggaatttcttttagctccccatctggctgtgaaattcaggaaacctcccgttgcctagtaatcaccccatgtaggtgtacattgtgacaaagtgcatctgaccactaaggggcccccttggtgaccccagcacattcacagcagtgttaaaatggcctgcattttggagatgctggctggcctttcagtgcctcccaggaagacacatctccagcgccagcaccactgcaacatatagacctgagtgctattgtattttggcttggtgtgtatgctcttcattgtgtaaaattgctgttcttttgacaatttaagtgattgttttgtttactgtaagtttgaaaataaaaatgaagaaaaaaattccaatga

SEQ ID NO: 68360 - DNA, 4511 bp, Homo sapiens
  misc_feature (1896)..(1896): n is a, c, g, or t
gagcggagtgcggtccgcagcagccgcagctcgggggcggtgcctgccttgcagcctcccctcggcgatcgcgcagccccatctttgtccggcctccgcgctttgttctcggcgcccgggccttggccagcctggccagccgccgagcagcccccacgccgcgctggcgtcgtcctcgcctccctcgccgccgccccccgcgcgctggccgggccttgccccccatggtgtcccggccagagcccgagggcgaggccatggacgccgagctggcggtagcgccgccgggctgctcgcacctgggcagcttcaaggtggacaactggaagcagaacctgcgggccatctaccagtgcttcgtgtggagcggcacggctgaggcccgcaagcgcaaggccaagtcctgtatctgccatgtctgtggcgtccacctcaacaggctgcattcctgcctctactgtgtcttcttcggctgtttcacaaagaagcatattcacgagcatgcgaaggcgaagcggcacaacctggccattgatctgatgtatggaggcatctactgttttctgtgccaggactacatctatgacaaagacatggaaataatcgccaaggaggagcagcgaaaagcttggaaaatgcaaggcgttggagagaagttttcaacttgggaaccaaccaaacgggagcttgaactgctgaagcacaacccgaaaaggagaaagatcacctcgaactgcaccataggtctgcgtgggctgatcaaccttgggaacacatgcttcatgaactgcatcgtgcaggccctgacccacacgccacttctgcgggacttcttcctgtctgacaggcaccgctgtgagatgcagagccccagctcctgtctggtctgtgagatgtcctcactgtttcaggagttttactctggacaccggtcccctcacatcccgtataagttgctgcacctggtgtggacccacgcgaggcacctagcaggctacgagcagcaggacgcccacgagttcctcatcgcggccctggacgtgctccaccgacactgcaaaggtgatgacaatgggaagaaggccaacaaccccaaccactgcaactgcatcatagaccagatcttcacaggcgggttgcagtcagacgtcacctgccaagtctgccatggagtctccaccaccatcgaccccttctgggacatcagcttggatctccccggctcttccaccccattctggcccctgagcccagggagcgagggcaacgtggtaaacggggaaagccacgtgtcgggaaccaccacgctcacggactgcctgcgacgattcaccagaccagagcacttgggcagcagcgccaagatcaagtgcagcggttgccatagctaccaggagtccacaaagcagctcactatgaagaaactgcccatcgtagcctgttttcatctcaaacgatttgaacactcagccaagctgcggcggaagatcaccacgtatgtgtccttccccctggagctggacatgacccctttcatggcctccagcaaagagagcaggatgaatggacagtaccagcagcccacggacagtctcaacaatgacaacaagtattccctgtttgctgttgttaaccatcaagggaccttggagagtggccactacaccagctttatccggcagcacaaagaccagtggttcaagtgtgacgatgccatcatcaccaaggccagcatcaaggacgtcctggacagcgaagggtacttgctgttctatcacaaacagttcctggaatacgagtagccttatctgcagctggtcagaaaaacaaaggcaatgcattggcaagcctcacaaagtgatcctccctggccccccccctcccccaagcctcccnccgcctccccggcctggtgacaccacctcccatgcagatgtggcccctctgcacctgggacccatcgggtcgggatggaccacacggacggggaggctcctggagctgctttgaagatggatgagatgaggggtgtgctctgggtgggaggagcagcgtacacccgtcaccagaacatctcttgtgtcatgacatgggggtgcaacgggggcctcacagcacagagtgaccgctgcctggcgttccccagcactcggtgtggaaaggcccctacctgctgtaagattatgggtccatgaaagcagtaagctggacacagaggtgtagtgtgcgggacagagggccttgcagatgcctttctgttggtgttttagtgttaaaatacggagagtatggaactcttcacctccattttctcagcggctgtgaagcagcctcctagcttcggaagtacggacactacgtcgcgttttcaagcgtgtctgttctgcaggtaacagcatcaagctgcacgtggaagcatctcgcggttttctagaaacaggcattttcttatccctctcccgctcctttttccacaaaggtgaatttcataaatgtaatactagtaaagtgaatgaattactgagtttatacagaaatttaggtaacttctcctttagtctcaagagcgagtcttgctttttaatgggtgccgtttatgttgctgcccgccctgtgtgcctggctcctctgggtgccttggtgtctgctggtggctggcagtgggcgcagcggaggagagttgtgctgcagctcatacggtgtgtctgtcatctcagtctggagtaaatgcagtgtctgccggtgtctgatgggttctgtccctcgtattttctttgccttctatcccattgcctggctaccgctgcctggcagccaagggtgttggtcgcgaagctggagtggcctctggtggagcctgcatcttgtctcgtctgcctctgctttacatttggtgtactttcgggcgtggtggcagtaaaatgacaccgtgattgagcttgtcagcagagctgaaagagaaagtagaaggatgtgcattgtttcttgtaagatatcttgcatgtatctgtgtattcaaattcaaacagagatggtttgtccatttgtccactgagaaattataaactagggacaagggggaggaaaagtactgaaatacagtttatgaagcaagtgtgtctcgggctgtgcttgtcccaggagccccagcagcatctgaactgaggcttcttcagtcctgcaggaacaggatcatctgtctcagcggtgggcagatgttttcatagacagccagggagtaaacactgttggctctgtgggctgtatggtctctgccataaatagtacagagatgtggctgtgtctagtacaacttttagacacagaaatctgaatgacatatattgttctgtgtcaagaaacttagattttttttttaactatttaaaaacgtgaaacctattcttagctcacaggccatggagaagctggtggggaccagacccagctccttagctggctgggctggggagggggcagtgacagtggcagctgctactcactgctcagtgtggaaaacacaggacttggcaatcacagcccgcagaaccatcatgtgtggcagaagcctgagggatgcggtttcttgcccacgtgctctgttcattttctgttgtttttctgcacttaaagaattcacatggaagcatgttttataaaatgaattaccagagaaacagagatgggccgagattctcagaaatggtcccatgtgaccaagttctgctgtttgggtgacagtgctttgaagatctcctttgaggatgtgcagtcttttttttttttttttttgagatggagtttgttgcccaggctggagtgagtggcacagtctcggctcactgcaacctccacctcctgggttcaagcagttctcgtgccgcagcctcccaagtagctgggactacaggcatgcgccaccacgccaggctaatttttgtatttttagtagagatggggtttcaccatgtctcaaactcctgacctcaggcgatccacccacctcagcgtcccaaagtgctgggattataggcgtgagccaccgcacctggcctatgagtggtcttttaattaggaacaaatctaatggaaaggagagttgactgaagttggcccacaggattgtgagctgggcagtgccttcatgaaggcttgccaccttgggacgccccagtttactggggtgtcttgcggagtgcagaaggctttctggcagctgcctgggtttggccagaccctgcctcccctcccgccggccaacccctagtccccttcctgtctccacttgcattcaggggtggctgctgttctgagaacattagaactgggaagagagatggagtcacatggatttttggtgggcattattctgaactttcgtatccaagttagtcccccttattccactgtggcattgccgttctaagcagttacctgatgcctgctgctgaagagctgctcacaggaggcgggcgcagagaggggcggagcagcagagaggggcggagcag

SEQ ID NO: 68361 - DNA, 4142 bp, Homo sapiens
  misc_feature (1896)..(1896): n is a, c, g, or t
gagcggagtgcggtccgcagcagccgcagctcgggggcggtgcctgccttgcagcctcccctcggcgatcgcgcagccccatctttgtccggcctccgcgctttgttctcggcgcccgggccttggccagcctggccagccgccgagcagcccccacgccgcgctggcgtcgtcctcgcctccctcgccgccgccccccgcgcgctggccgggccttgccccccatggtgtcccggccagagcccgagggcgaggccatggacgccgagctggcggtagcgccgccgggctgctcgcacctgggcagcttcaaggtggacaactggaagcagaacctgcgggccatctaccagtgcttcgtgtggagcggcacggctgaggcccgcaagcgcaaggccaagtcctgtatctgccatgtctgtggcgtccacctcaacaggctgcattcctgcctctactgtgtcttcttcggctgtttcacaaagaagcatattcacgagcatgcgaaggcgaagcggcacaacctggccattgatctgatgtatggaggcatctactgttttctgtgccaggactacatctatgacaaagacatggaaataatcgccaaggaggagcagcgaaaagcttggaaaatgcaaggcgttggagagaagttttcaacttgggaaccaaccaaacgggagcttgaactgctgaagcacaacccgaaaaggagaaagatcacctcgaactgcaccataggtctgcgtgggctgatcaaccttgggaacacatgcttcatgaactgcatcgtgcaggccctgacccacacgccacttctgcgggacttcttcctgtctgacaggcaccgctgtgagatgcagagccccagctcctgtctggtctgtgagatgtcctcactgtttcaggagttttactctggacaccggtcccctcacatcccgtataagttgctgcacctggtgtggacccacgcgaggcacctagcaggctacgagcagcaggacgcccacgagttcctcatcgcggccctggacgtgctccaccgacactgcaaaggtgatgacaatgggaagaaggccaacaaccccaaccactgcaactgcatcatagaccagatcttcacaggcgggttgcagtcagacgtcacctgccaagtctgccatggagtctccaccaccatcgaccccttctgggacatcagcttggatctccccggctcttccaccccattctggcccctgagcccagggagcgagggcaacgtggtaaacggggaaagccacgtgtcgggaaccaccacgctcacggactgcctgcgacgattcaccagaccagagcacttgggcagcagcgccaagatcaagtgcagcggttgccatagctaccaggagtccacaaagcagctcactatgaagaaactgcccatcgtagcctgttttcatctcaaacgatttgaacactcagccaagctgcggcggaagatcaccacgtatgtgtccttccccctggagctggacatgacccctttcatggcctccagcaaagagagcaggatgaatggacagtaccagcagcccacggacagtctcaacaatgacaacaagtattccctgtttgctgttgttaaccatcaagggaccttggagagtggccactacaccagctttatccggcagcacaaagaccagtggttcaagtgtgacgatgccatcatcaccaaggccagcatcaaggacgtcctggacagcgaagggtacttgctgttctatcacaaacagttcctggaatacgagtagccttatctgcagctggtcagaaaaacaaaggcaatgcattggcaagcctcacaaagtgatcctccctggccccccccctcccccaagcctcccnccgcctccccggcctggtgacaccacctcccatgcagatgtggcccctctgcacctgggacccatcgggtcgggatggaccacacggacggggaggctcctggagctgctttgaagatggatgagatgaggggtgtgctctgggtgggaggagcagcgtacacccgtcaccagaacatctcttgtgtcatgacatgggggtgcaacgggggcctcacagcacagagtgaccgctgcctggcgttccccagcactcggtgtggaaaggcccctacctgctgtaagattatgggtccatgaaagcagtaagctggacacagaggtgtagtgtgcgggacagagggccttgcagatgcctttctgttggtgttttagtgttaaaatacggagagtatggaactcttcacctccattttctcagcggctgtgaagcagcctcctagcttcggaagtacggacactacgtcgcgttttcaagcgtgtctgttctgcaggtaacagcatcaagctgcacgtggaagcatctcgcggttttctagaaacaggcattttcttatccctctcccgctcctttttccacaaaggtgaatttcataaatgtaatactagtaaagtgaatgaattactgagtttatacagaaatttaggtaacttctcctttagtctcaagagcgagtcttgctttttaatgggtgccgtttatgttgctgcccgccctgtgtgcctggctcctctgggtgccttggtgtctgctggtggctggcagtgggcgcagcggaggagagttgtgctgcagctcatacggtgtgtctgtcatctcagtctggagtaaatgcagtgtctgccggtgtctgatgggttctgtccctcgtattttctttgccttctatcccattgcctggctaccgctgcctggcagccaagggtgttggtcgcgaagctggagtggcctctggtggagcctgcatcttgtctcgtctgcctctgctttacatttggtgtactttcgggcgtggtggcagtaaaatgacaccgtgattgagcttgtcagcagagctgaaagagaaagtagaaggatgtgcattgtttcttgtaagatatcttgcatgtatctgtgtattcaaattcaaacagagatggtttgtccatttgtccactgagaaattataaactagggacaagggggaggaaaagtactgaaatacagtttatgaagcaagtgtgtctcgggctgtgcttgtcccaggagccccagcagcatctgaactgaggcttcttcagtcctgcaggaacaggatcatctgtctcagcggtgggcagatgttttcatagacagccagggagtaaacactgttggctctgtgggctgtatggtctctgccataaatagtacagagatgtggctgtgtctagtacaacttttagacacagaaatctgaatgacatatattgttctgtgtcaagaaacttagattttttttttaactatttaaaaacgtgaaacctattcttagctcacaggccatggagaagctggtggggaccagacccagctccttagctggctgggctggggagggggcagtgacagtggcagctgctactcactgctcagtgtggaaaacacaggacttggcaatcacagcccgcagaaccatcatgtgtggcagaagcctgagggatgcggtttcttgcccacgtgctctgttcattttctgttgtttttctgcacttaaagaattcacatggaagcatgttttataaaatgaattaccagagaaacagagatgggccgagattctcagaaatggtcccatgtgaccaagttctgctgtttgggtgacagtgctttgaagatctcctttgaggatgtgcagtctttttttttttttttttgggggagggggtttggtggcccggggtgggggttggtgggcccgtctggggtcgtgggaccttccactgtcggtggggtctcaagcatgttcctcgtgccgaagctcctcccaaagattcgctggggacataccgggatttgcgccaccagcgccggggataatcgtggtcatttcagccacagcaggtggggggtttcctcctttgtcctcaactccctgaccctgaggggattccaccccaccttagtgtccccagtgcgggtgtttatgggggtggacccccggcctggcctaggagtggccttcattgcgacctttttgtgaacgggacttgttgctttggcccagt

SEQ ID NO: 68362 - DNA, 3475 bp, Homo sapiens
  misc_feature (1896)..(1896): n is a, c, g, or t
gagcggagtgcggtccgcagcagccgcagctcgggggcggtgcctgccttgcagcctcccctcggcgatcgcgcagccccatctttgtccggcctccgcgctttgttctcggcgcccgggccttggccagcctggccagccgccgagcagcccccacgccgcgctggcgtcgtcctcgcctccctcgccgccgccccccgcgcgctggccgggccttgccccccatggtgtcccggccagagcccgagggcgaggccatggacgccgagctggcggtagcgccgccgggctgctcgcacctgggcagcttcaaggtggacaactggaagcagaacctgcgggccatctaccagtgcttcgtgtggagcggcacggctgaggcccgcaagcgcaaggccaagtcctgtatctgccatgtctgtggcgtccacctcaacaggctgcattcctgcctctactgtgtcttcttcggctgtttcacaaagaagcatattcacgagcatgcgaaggcgaagcggcacaacctggccattgatctgatgtatggaggcatctactgttttctgtgccaggactacatctatgacaaagacatggaaataatcgccaaggaggagcagcgaaaagcttggaaaatgcaaggcgttggagagaagttttcaacttgggaaccaaccaaacgggagcttgaactgctgaagcacaacccgaaaaggagaaagatcacctcgaactgcaccataggtctgcgtgggctgatcaaccttgggaacacatgcttcatgaactgcatcgtgcaggccctgacccacacgccacttctgcgggacttcttcctgtctgacaggcaccgctgtgagatgcagagccccagctcctgtctggtctgtgagatgtcctcactgtttcaggagttttactctggacaccggtcccctcacatcccgtataagttgctgcacctggtgtggacccacgcgaggcacctagcaggctacgagcagcaggacgcccacgagttcctcatcgcggccctggacgtgctccaccgacactgcaaaggtgatgacaatgggaagaaggccaacaaccccaaccactgcaactgcatcatagaccagatcttcacaggcgggttgcagtcagacgtcacctgccaagtctgccatggagtctccaccaccatcgaccccttctgggacatcagcttggatctccccggctcttccaccccattctggcccctgagcccagggagcgagggcaacgtggtaaacggggaaagccacgtgtcgggaaccaccacgctcacggactgcctgcgacgattcaccagaccagagcacttgggcagcagcgccaagatcaagtgcagcggttgccatagctaccaggagtccacaaagcagctcactatgaagaaactgcccatcgtagcctgttttcatctcaaacgatttgaacactcagccaagctgcggcggaagatcaccacgtatgtgtccttccccctggagctggacatgacccctttcatggcctccagcaaagagagcaggatgaatggacagtaccagcagcccacggacagtctcaacaatgacaacaagtattccctgtttgctgttgttaaccatcaagggaccttggagagtggccactacaccagctttatccggcagcacaaagaccagtggttcaagtgtgacgatgccatcatcaccaaggccagcatcaaggacgtcctggacagcgaagggtacttgctgttctatcacaaacagttcctggaatacgagtagccttatctgcagctggtcagaaaaacaaaggcaatgcattggcaagcctcacaaagtgatcctccctggccccccccctcccccaagcctcccnccgcctccccggcctggtgacaccacctcccatgcagatgtggcccctctgcacctgggacccatcgggtcgggatggaccacacggacggggaggctcctggagctgctttgaagatggatgagatgaggggtgtgctctgggtgggaggagcagcgtacacccgtcaccagaacatctcttgtgtcatgacatgggggtgcaacgggggcctcacagcacagagtgaccgctgcctggcgttccccagcactcggtgtggaaaggcccctacctgctgtaagattatgggtccatgaaagcagtaagctggacacagaggtgtagtgtgcgggacagagggccttgcagatgcctttctgttggtgttttagtgttaaaatacggagagtatggaactcttcacctccattttctcagcggctgtgaagcagcctcctagcttcggaagtacggacactacgtcgcgttttcaagcgtgtctgttctgcaggtaacagcatcaagctgcacgtggaagcatctcgcggttttctagaaacaggcattttcttatccctctcccgctcctttttccacaaaggtgaatttcataaatgtaatactagtaaagtgaatgaattactgagtttatacagaaatttaggtaacttctcctttagtctcaagagcgagtcttgctttttaatgggtgccgtttatgttgctgcccgccctgtgtgcctggctcctctgggtgccttggtgtctgctggtggctggcagtgggcgcagcggaggagagttgtgctgcagctcatacggtgtgtctgtcatctcagtctggagtaaatgcagtgtctgccggtgtctgatgggttctgtccctcgtattttctttgccttctatcccattgcctggctaccgctgcctggcagccaagggtgttggtcgcgaagctggagtggcctctggtggagcctgcatcttgtctcgtctgcctctgctttacatttggtgtactttcgggcgtggtggcagtaaaatgacaccgtgattgagcttgtcagcagagctgaaagagaaagtagaaggatgtgcattgtttcttgtaagatatcttgcatgtatctgtgtattcaaattcaaacagagatggtttgtccatttgtccactgagaaattataaactagggacaagggggaggaaaagtactgaaatacagtttatgaagcaagtgtgtctcgggctgtgcttgtcccaggagccccagcagcatctgaactgaggcttcttcagtcctgcaggaacaggatcatctgtctcagcggtgggcagatgttttcatagacagccagggagtaaacactgttggctctgtgggctgtatggtctctgccataaatagtacagagatgtggctgtgtctagtacaacttttagacacagaaatctgaatgacatatattgttctgtgtcaagaaacttagatttttttactatttaaaaagttgaccaatttcacccactgggaggtcagcgcaaaggctaacccgggggcttagaccagaacccagctcaccgcgaaaggacctcaa

SEQ ID NO: 68363 - DNA, 1919 bp, Homo sapiens
gagcggagtgcggtccgcagcagccgcagctcgggggcggtgcctgccttgcagcctcccctcggcgatcgcgcagccccatctttgtccggcctccgcgctttgttctcggcgcccgggccttggccagcctggccagccgccgagcagcccccacgccgcgctggcgtcgtcctcgcctccctcgccgccgccccccgcgcgctggccgggccttgccccccatggtgtcccggccagagcccgagggcgaggccatggacgccgagctggcggtagcgccgccgggctgctcgcacctgggcagcttcaaggtggacaactggaagcagaacctgcgggccatctaccagtgcttcgtgtggagcggcacggctgaggcccgcaagcgcaaggccaagtcctgtatctgccatgtctgtggcgtccacctcaacaggctgcattcctgcctctactgtgtcttcttcggctgtttcacaaagaagcatattcacgagcatgcgaaggcgaagcggcacaacctggccattgatctgatgtatggaggcatctactgttttctgtgccaggactacatctatgacaaagacatggaaataatcgccaaggaggagcagcgaaaagcttggaaaatgcaaggcgttggagagaagttttcaacttgggaaccaaccaaacgggagcttgaactgctgaagcacaacccgaaaaggagaaagatcacctcgaactgcaccataggtctgcgtgggctgatcaaccttgggaacacatgcttcatgaactgcatcgtgcaggccctgacccacacgccacttctgcgggacttcttcctgtctgacaggcaccgctgtgagatgcagagccccagctcctgtctggtctgtgagatgtcctcactgtttcaggagttttactctggacaccggtcccctcacatcccgtataagttgctgcacctggtgtggacccacgcgaggcacctagcaggctacgagcagcaggacgcccacgagttcctcatcgcggccctggacgtgctccaccgacactgcaaaggtgatgacaatgggaagaaggccaacaaccccaaccactgcaactgcatcatagaccagatcttcacaggcgggttgcagtcagacgtcacctgccaagtctgccatggagtctccaccaccatcgaccccttctgggacatcagcttggatctccccggctcttccaccccattctggcccctgagcccagggagcgagggcaacgtggtaaacggggaaagccacgtgtcgggaaccaccacgctcacggactgcctgcgacgattcaccagaccagagcacttgggcagcagcgccaagatcaagtgcagcggttgccatagctaccaggagtccacaaagcagctcactatgaagaaactgcccatcgtagcctgttttcatctcaaacgatttgaacactcagccaagctgcggcggaagatcaccacgtatgtgtccttccccctggagctggacatgacccctttcatggcctccaggtatgtggggttgtaggcccgttctgtgtcctgaggggctgtgatcctatcaggacaggaatccagctcggagctcctattaagatgactgttggccgggtgcagtggctcccgcctgtaatcccagcacttcaggaggtcgaagcgggcagatcatgaggtcaacagattgagaccatcatggccaacatggtgaaaccccgtctctactaaaaatacaaaaattagctgggtgtggtggcaggcacctgtagtcccagctatttgggaggctgaggcaggagaatcgcttgaacccgggaggtggaggttgcagtgagccaagatcgcgccactgcactccagcctggtgacagaacgagactacgtctaa

SEQ ID NO: 68364 - DNA, 1773 bp, Homo sapiens
gagcggagtgcggtccgcagcagccgcagctcgggggcggtgcctgccttgcagcctcccctcggcgatcgcgcagccccatctttgtccggcctccgcgctttgttctcggcgcccgggccttggccagcctggccagccgccgagcagcccccacgccgcgctggcgtcgtcctcgcctccctcgccgccgccccccgcgcgctggccgggccttgccccccatggtgtcccggccagagcccgagggcgaggccatggacgccgagctggcggtagcgccgccgggctgctcgcacctgggcagcttcaaggtggacaactggaagcagaacctgcgggccatctaccagtgcttcgtgtggagcggcacggctgaggcccgcaagcgcaaggccaagtcctgtatctgccatgtctgtggcgtccacctcaacaggctgcattcctgcctctactgtgtcttcttcggctgtttcacaaagaagcatattcacgagcatgcgaaggcgaagcggcacaacctggccattgatctgatgtatggaggcatctactgttttctgtgccaggactacatctatgacaaagacatggaaataatcgccaaggaggagcagcgaaaagcttggaaaatgcaaggcgttggagagaagttttcaacttgggaaccaaccaaacgggagcttgaactgctgaagcacaacccgaaaaggagaaagatcacctcgaactgcaccataggtctgcgtgggctgatcaaccttgggaacacatgcttcatgaactgcatcgtgcaggccctgacccacacgccacttctgcgggacttcttcctgtctgacaggcaccgctgtgagatgcagagccccagctcctgtctggtctgtgagatgtcctcactgtttcaggagttttactctggacaccggtcccctcacatcccgtataagttgctgcacctggtgtggacccacgcgaggcacctagcaggctacgagcagcaggacgcccacgagttcctcatcgcggccctggacgtgctccaccgacactgcaaaggtgatgacaatgggaagaaggccaacaaccccaaccactgcaactgcatcatagaccagatcttcacaggcgggttgcagtcagacgtcacctgccaagtctgccatggagtctccaccaccatcgaccccttctgggacatcagcttggatctccccggctcttccaccccattctggcccctgagcccagggagcgagggcaacgtggtaaacggggaaagccacgtgtcgggaaccaccacgctcacggactgcctgcgacgattcaccagaccagagcacttgggcagcagcgccaagatcaagtgcagcggttgccatagctaccaggagtccacaaagcagctcactatgaagaaactgcccatcgtagcctgttttcatctcaaacgatttgaacactcagccaagctgcggcggaagatcaccacgtatgtgtccttccccctggagctggacatgacccctttcatggcctccagcagagagagcaggatgagtgggccagttaccagcagcccacggaacagtctcagcatgacacagtatttcctgtttgctgttgttaaccatccagggcttggtggagtggcctaccccggttttccggggcccagacctggtcagtgtgcggtgcctcttccaggcggtcggggtctgcgcggctgtggtctcaacgtcggtcgtcctttgggcgcaaggtcttgcc

SEQ ID NO: 68365 - DNA, 1498 bp, Homo sapiens
gagcggagtgcggtccgcagcagccgcagctcgggggcggtgcctgccttgcagcctcccctcggcgatcgcgcagccccatctttgtccggcctccgcgctttgttctcggcgcccgggccttggccagcctggccagccgccgagcagcccccacgccgcgctggcgtcgtcctcgcctccctcgccgccgccccccgcgcgctggccgggccttgccccccatggtgtcccggccagagcccgagggcgaggccatggacgccgagctggcggtagcgccgccgggctgctcgcacctgggcagcttcaaggtggacaactggaagcagaacctgcgggccatctaccagtgcttcgtgtggagcggcacggctgaggcccgcaagcgcaaggccaagtcctgtatctgccatgtctgtggcgtccacctcaacaggctgcattcctgcctctactgtgtcttcttcggctgtttcacaaagaagcatattcacgagcatgcgaaggcgaagcggcacaacctggccattgatctgatgtatggaggcatctactgttttctgtgccaggactacatctatgacaaagacatggaaataatcgccaaggaggagcagcgaaaagcttggaaaatgcaaggcgttggagagaagttttcaacttgggaaccaaccaaacgggagcttgaactgctgaagcacaacccgaaaaggagaaagatcacctcgaactgcaccataggtctgcgtgggctgatcaaccttgggaacacatgcttcatgaactgcatcgtgcaggccctgacccacacgccacttctgcgggacttcttcctgtctgacaggcaccgctgtgagatgcagagccccagctcctgtctggtctgtgagatgtcctcactgtttcaggagttttactctggacaccggtcccctcacatcccgtataagttgctgcacctggtgtggacccacgcgaggcacctagcaggctacgagcagcaggacgcccacgagttcctcatcgcggccctggacgtgctccaccgacactgcaaaggtgatgacaatgggaagaaggccaacaaccccaaccactgcaactgcatcatagaccagatcttcacaggcgggttgcagtcagacgtcacctgccaagtctgccatggagtctccaccaccatcgaccccttctgggacatcagcttggatctccccggctcttccaccccattctggcccctgagcccagggagcgagggcaacgtggtaaacggggaaagccacgtgtcgggaaccaccacgctcacggactgcctgcgacgattcaccagaccagagcacttgggcagcagcgccaagatcaagtgcagcggttgccatagctaccaggagtccacaaagcagctcactatgaagaaactgcccatcgtagcctgttttcatctcaaaagacgatattgaacaataagcacaatgtgcacaaggaagatcat

SEQ ID NO: 68366 - DNA, 1057 bp, Homo sapiens
gagcggagtgcggtccgcagcagccgcagctcgggggcggtgcctgccttgcagcctcccctcggcgatcgcgcagccccatctttgtccggcctccgcgctttgttctcggcgcccgggccttggccagcctggccagccgccgagcagcccccacgccgcgctggcgtcgtcctcgcctccctcgccgccgccccccgcgcgctggccgggccttgccccccatggtgtcccggccagagcccgagggcgaggccatggacgccgagctggcggtagcgccgccgggctgctcgcacctgggcagcttcaaggtggacaactggaagcagaacctgcgggccatctaccagtgcttcgtgtggagcggcacggctgaggcccgcaagcgcaaggccaagtcctgtatctgccatgtctgtggcgtccacctcaacaggctgcattcctgcctctactgtgtcttcttcggctgtttcacaaagaagcatattcacgagcatgcgaaggcgaagcggcacaacctggccattgatctgatgtatggaggcatctactgttttctgtgccaggactacatctatgacaaagacatggaaataatcgccaaggaggagcagcgaaaagcttggaaaatgcaaggcgttggagagaagttttcaacttgggaaccaaccaaacgggagcttgaactgctgaagcacaacccgaaaaggagaaagatcacctcgaactgcaccataggtgggtggagcgtgtcgtcactctcagctaggcttctttccagggtttaaaagtaaatacagaattgtgggtttcttaagtccacatgattctgttgaagccctgcataactgtcactcatcaatgtgctcagcaaccagctcttgagcacctgttctctgcagggacctgcagtgggcttggggcgcagagtgatgcgtagcaacagccctgccctcacagccttcagcgtctgtgtgggtaaagggactcaagttgattttggccagggtgaggctgggcacagtaatcttcagggagagaaatgatgtgt

SEQ ID NO: 68367 - DNA, 326 bp, Homo sapiens
cccctcacctgctcaggataggagactccgctggactggcttccctgcttgtgaataggaaggtgctgtgaacagtcagtatctacagaacctcactgtgtttaactctgccctccagccttccattgtggtttttaattcaacttggtttctcctccctcctttctctcctcagccattgatctgatgtatggaggcatctactgttttctgtgccaggactacatctatgacaaagacatggaaataatcgccaaggaggagcagcgaaaagcttggaaaatgcaaggtttggttccacctcagtttacctgcttgatcctgca

SEQ ID NO: 68368 - DNA, 314 bp, Homo sapiens
gtcatttttatcactttggtgacggtttaatgaatacagaattgtatatctgactataattagatctgcctcacaaaagaaaaattagcagatcaacagtaggtttcagactagtaataagcattcacatcacaataacatcctcttttcaagttggcccaatacatagctttccataagacatgcacagtgggacttttcacaaacctgcttgtatccagtgactaaactgatggtgtctcattgacatttttccttttaatcatagagctagtgaggtaaagtgagacttggttaattattttaaaactctg

SEQ ID NO: 68369 - DNA, 526 bp, Homo sapiens
tgctagaagtttctggttgcctcggtcgtaacatgttggagtggaggcagcagagcaaggaatatagtagatgggctttctggtgcctccatgtcctcatccatgagatgggtctgaaagccacagtatacagggctgtggtgagggtgaagtggacaaaactcagaagggcttgaagcccatggaacacaataagtgctcaagaaatattagcggtttatgttgctagagggtgagcagctgctgctgtgttcatcccggggtcttcggagccttacacaggccctggtagaggctcacagacgtttactgaatcaaactgacttttccctcggctacgctttctctctccaattgattttcaggtcctgtcaattccacttcaaaaagtgtctcaaatgtgtgccccacctgtcctccaccatcacttctttacttcaggcctcatcattgctcccctggatgattacagcagcctcccagttggtctcagccttgtagtcttttgtctcttttctcaatccac

SEQ ID NO: 68370 - DNA, 432 bp, Homo sapiens
agagactatttttctgtcctaaagatgaggctgaaagttcccaaatgcaagacgatttttgccctgaagctaaacagcaattaaatggatgaagcaaaggacttgtttaagtcctttggctgttgtcccacagggtcatggtgctagctcaggcaaaaatggatgagcaaggacttgtttagtcctttggctgttgtccacagggggtgatagcgctcagtgttatgtgacgtcagaaggccatcatgttaaaatatagcacgatagggacaactgatcactctcttgaagtccggagctcttagaacagatggtctgtttttctgtagtaatgctcacaccatgtcttcccactcatagctcccactcactgccccttaccccaccccagcctccagtcgtcaaaatttaaagctgtaaagggaagacgtt

SEQ ID NO: 68371 - DNA, 600 bp, Homo sapiens
aaatactgacaaaagttgtcacaatcaacttctttggatggggaaattaactaaaggcttgtaacaatccaaggagtgtttaatcaagaaaaacagctgaatcttggtaagaatagcaagctttgtggcattttaacttgccatatacccatctccctcttctcagctccatgataatcttaaaagccaacagctgctcaaatcagggtgaaaaccaggcagcctagcagccattggagggagcagatcagggttaaggctcccatgtcccacagttctcacattgtcattatttgacctgtctggcacttccctttaaactcccattctaagtacttatatttatttcacctgactcagaccttgctcagtgcaagtagactttttaaaaaacctggtatttatcaaaaacaatcagcaacatttatttagcatcacagctgactgaagaggcagtaacagttgagtgagcaagaagctgactaaaaatcttaagaggataagctgaggaaggagatcccctagtgggcactagaaacttccaacatatccctgggaatctgaaaggtcatgggtctgtgtagggctgtgtgcaacggc

SEQ ID NO: 68372 - DNA, 429 bp, Homo sapiens
atggctgttttccaagcctcacgtagcaggatccttgctgtctggtccttgaggaggcctcattgactgcagacagtgcatatgtcacatctagtttgcgctgtggttgtgggagaagcggcccttctctcctatcctcctcacccttagctggctgcaatggagctgatagcatacacattttctcttttctccgtacatctcaacagtgacagtaaagattcagttaccaaagatttgacttacctatggacctgccagagcaccatgcctacaattcttatgggttgcttgaggtgactgccacctactttagcctgatcctaagcagtactatcccaggcttgaggtcattaagtgattgtctttcaagtgaaacgtgtttgtcagcgtaagcacataaggcaagcttatgttccagcagaggtt

SEQ ID NO: 68373 - DNA, 1181 bp, Homo sapiens
gttaggtcccggttgcgggacagtttttttttcttttttaaaacagacacagctactgagtgcaatgccgcctccacagaaaatcccaagcgtcagacccttcaagcagaggaaaagcttggcaatcagacaagaggaagttgctggaatccgggcaaagttccccaacaaaatcccggtggtagtggagcgctaccccagggagacgttcctgcccccgctggacaaaaccaagttcctggtcccgcaggagctgaccatgacccagttcctcagcatcatccggagccgcatggtcctgagagccacggaagccttttacttgctggtgaacaacaagagcctggtcagcatgagcgcaaccatggcagagatctacagagactacaaggatgaggatggcttcgtgtacatgacctacgcctcccaggagacatttggctgcctggagtcagcagcccccagggatgggagcagccttgaggacagaccctgcaatcctctctagcccatgtcgggaaggatgtgtgctctgacagacgtgtcagatgctggcagaagggattggttttctcctgtgtatacagtggaggagtctgagaagcagggatgcctggggtgatcagctccaaccagtggcagcagagtggtggctcttcctagtttagtttttgtgctccgtgttcttgtgtccttctaagaaaaatgtgggctgctcttgaaagttatataattatcatttttttttttttgaaacagggtcttgctctattgcctaggctggagcacagtggcatgatcttggctcactgcaacctccgcctcctgggttcaagtgattcttctgcctccaccccccgagtggctggtattacaagcacatgccaccacaccaggctaatttttgtatttttagtagagacggggtttcaccatgttggccaggctggtctcgaactcctgacctcaggtgatccacccacctcggcctcccaaagtgctgggattacaggcgtgagccactgcatccagccatataaccgtattctaaataagaaatggttggcttgtgtgatggttttgtgtaatgagctagagataatattttaagtgtcttctgtggtatatgtgggagggccattaaggagtgggtttcactccctgcatgtgggcaggtgtcc

SEQ ID NO: 68374 - DNA, 542 bp, Homo sapiens
gttaggtcccggttgcgggacagtttttttttcttttttaaaacagacacagctactgagtgcaatgccgcctccacagaaaatcccaagcgtcagacccttcaagcagaggaaaagcttggcaatcagacaagaggaagttgctggaatccgggcaaagttccccaacaaaatcccggtggtagtggagcgctaccccagggagacgttcctgcccccgctggacaaaaccaagttcctggtcccgcaggagctgaccatgacccagttcctcagcatcatccggagccgcatggtcctgagagccacggaagccttttacttgctggtgaacaacaagagcctggtcagcatgagcgcaaccatggcagagatctacagagatgcatccagccatataaccgtattctaaataagaaatggttggcttgtgtgatggttttgtgtaatgagctagagataatattttaagtgtcttctgtggtatatgtgggagggccattaaggagtgggtttcactccctgcatgtgggcaggtgtcc

SEQ ID NO: 68375 - DNA, 1272 bp, Homo sapiens
  misc_feature (2)..(3): n is a, c, g, or t
gnnagaacgtgctgtgtggatgcggcgaaacgctgaggcgcggccttcgctgtgtggtggggactcacaagaccgacgtcaagatgatgctttcaagggccaaacctgctgtaggcagaggcgtacagcacactgacaaaagaaagaagaaaggtaggaagattccaaaactagaggagctactttcaaaaagagatttcactggagctattaccctgttggagttcaaacgtcatgttggggaagaagaagaggatactaatttgtggattggatattgtgcctttcacctgggtgactacaagagagctctggaggaatacgaaaatgctacaaaagaggaaaattgtaattctgaagtctgggtgaacctagcttgcacctacttctttcttgggatgtataaacaagctgaagcagctggatttaaagcttcaaaaagccgactccaaaaccgcctcctcttccacttggctcacaagtttaatgatgagaaaaaattgatgagctttcatcaaaatcttcaggatgtcacagaagatcaactcagtttggcctcaatccactatatgcgatctcactaccaagaagctatagatatatataagcgaatactgctagataacagggaataccttgcccttaatgtttatgtggccctctgctactacaagttggattactatgatgtgtctcaagaagttttggctgtttaccttcagcaaattcctgatagtaccatcgcactcaatcttaaagcctgtaaccattttcgcctttacaatggcagagcagctgaggcagaactcaaaagcttgatggacaatgcttcttcatcctttgaatttgctaaagaactcatcaggcacaatctggttgttttccgaggaggtgaaggggctttgcaggttttacctcccctagttgatgtcattcctgaagctaggctaaacttggtgatttactaccttcgtcaagatgatgtacaagaagcttataacttaattaaggatctggaacctactactcctcaggagtatattctcaaaggagtggtcaatgcagcccttggccaggaaatgggttcagtgagtatgaaatcactgataatctataggttgcaaagttataagtgtatggaagagaacaaaatgactatcaaagtgcaagcagcaataggctctcctgtagctccttttatttctccatatcccccaatccagactccactgagaaaagaatgttatgttatttagagacaaaaaaaaaaaa

SEQ ID NO: 68376 - DNA, 2694 bp, Homo sapiens
  misc_feature (2)..(3): n is a, c, g, or t
gnnagaacgtgctgtgtggatgcggcgaaacgctgaggcgcggccttcgctgtgtggtggggactcacaagaccgacgtcaagatgatgctttcaagggccaaacctgctgtaggcagaggcgtacagcacactgacaaaagaaagaagaaaggtaggaagattccaaaactagaggagctactttcaaaaagagatttcactggagctattaccctgttggagttcaaacgtcatgttggggaagaagaagaggatactaatttgtggattggatattgtgcctttcacctgggtgactacaagagagctctggaggaatacgaaaatgctacaaaagaggaaaattgtaattctgaagtctgggtgaacctagcttgcacctacttctttcttgggatgtataaacaagctgaagcagctggatttaaagcttcaaaaagccgactccaaaaccgcctcctcttccacttggctcacaaggagaaatgaagtagaagacaaagaacctaagggaaataggaagaagagagagacacaatggctaaagaaggaagagttaaaatctctatcacatagatattgatttctctaacaacactaatatgaatctttacatgtcttttccactctcacaattttagtttaatgatgagaaaaaattgatgagctttcatcaaaatcttcaggatgtcacagaagatcaactcagtttggcctcaatccactatatgcgatctcactaccaagaagctatagatatatataagcgaatactgctagataacagggaataccttgcccttaatgtttatgtggccctctgctactacaagttggattactatgatgtgtctcaagaagttttggctgtttaccttcagcaaattcctgatagtaccatcgcactcaatcttaaagcctgtaaccattttcgcctttacaatggcagagcagctgaggcagaactcaaaagcttgatggacaatgcttcttcatcctttgaatttgctaaagaactcatcaggcacaatctggttgttttccgaggaggtgaaggggctttgcaggttttacctcccctagttgatgtcattcctgaagctaggctaaacttggtgatttactaccttcgtcaagatgatgtacaagaagcttataacttaattaaggatctggaacctactactcctcaggagtatattctcaaaggagtggtcaatgcagcccttggccaggaaatgggttcaagggatcatatgaaaattgcccagcagttcttccagttggtgggaggatcagctagtgaatgtgatacaataccagggaggcagtgcatggcttcctgtttcttcctgcttaagcaatttgatgatgttttgatttacctcaactcatttaagagttacttctataatgatgacatctttaactttaattatgcccaagccaaagctgcaacaggcaataccagtgagggcgaagaggcgttcctcttgatccaaagtgagaagatgaaaaatgattacatttacctcagctggttagctcggtgctatattatgaataagaaaccaagactagcctgggaactttatcttaagatggaaacctccggcgagtccttcagtctcttacagctcattgctaatgactgctacaagatgggccagttttactattctgccaaagcttttgatgtccttgagaggctggatcctaaccctgaatattgggaaggcaaacggggtgcctgtgtgggcattttccagatgatcatagctgggagagaacccaaagagacccttcgagaagtgctccatttactgagaagcacaggtaacacccaagtagaatacatgatccggatcatgaagaaatgggccaaagaaaacagagtgtccatctaaaatagcgccagcgtcctaggaaccagcttctactttgacataaaactggaaatcattttcactccagtttaatctgtgatacagggctctgttttattgacattttccttccttgctctttaagcctcaaggtcagagactgacttgctgagacttagtctcctggctgaacagagtgccatagtctgtgaccctgtatgatcctagtagcaataagattttggacttatctggtgcctttcttccaaaaatgctcagagtacttttatgcaatttactgactttaaggaaaacagtataacttttttttgttagcattttatggcattgtctcctggctgcaataacaaacatctttgatgttcaagaatcagcatcattgtatcatttaactttaaggcgtctctgtacgttatcccattttattggggaattccataaagggttttataacgtcatctctgaatcttgggagaataactagctatgtgtttctaagaaaggcagtaagctactttatcaaactgtccagtcattaataggatagatttatgggattactctttcagtaattaaattgttgatgataataacatgttacagcgcagtaagatgagtattgcaatgttttaaaaggtgagtactatgaaaaaaattgtagtacctctaaaggtattcaagaaacaatgtttatgaatctcactagtccattatagtttggtaccataattattttaggtaacaaagcaggttaggtttttgttaatgtatcttgcttaacaaac

SEQ ID NO: 68377 - DNA, 1525 bp, Homo sapiens
tgctgatacaatcagctctgtaccctcaggagtatattctcaaagggagtggtcagcagccctggccaggaaatgggtcaagggatcatatgaaaattgcccagcagttcttccagttggtgggaggatcagctagtgaatgtgatacaataccagggaggcagtgcatggcttcctgtttcttcctgcttaagcaatttgatgatgttttgatttacctcaactcatttaagagttacttctataatgatgacatctttaactttaattatgcccaagccaaagctgcaacaggcaataccagtgagggcgaagaggcgttcctcttgatccaaagtgagaagatgaaaaatgattacatttacctcagctggttagctcggtgctatattatgaataagaaaccaagactagcctgggaactttatcttaagatggaaacctccggcgagtccttcagtctcttacagctcattgctaatgactgctacaagatgggccagttttactattctgccaaagcttttgatgtccttgagaggctggatcctaaccctgaatattgggaaggcaaacggggtgcctgtgtgggcattttccagatgatcatagctgggagagaacccaaagagacccttcgagaagtgctccatttactgagaagcacaggtaacacccaagtagaatacatgatccggatcatgaagaaatgggccaaagaaaacagagtgtccatctaaaatagcgccagcgtcctaggaaccagcttctactttgacataaaactggaaatcattttcactccagtttaatctgtgatacagggctctgttttattgacattttccttccttgctctttaagcctcaaggtcagagactgacttgctgagacttagtctcctggctgaacagagtgccatagtctgtgaccctgtatgatcctagtagcaataagattttggacttatctggtgcctttcttccaaaaatgctcagagtacttttatgcaatttactgactttaaggaaaacagtataacttttttttgttagcattttatggcattgtctcctggctgcaataacaaacatctttgatgttcaagaatcagcatcattgtatcatttaactttaaggcgtctctgtacgttatcccattttattggggaattccataaagggttttataacgtcatctctgaatcttgggagaataactagctatgtgtttctaagaaaggcagtaagctactttatcaaactgtccagtcattaataggatagatttatgggattactctttcagtaattaaattgttgatgataataacatgttacagcgcagtaagatgagtattgcaatgttttaaaaggtgagtactatgaaaaaaattgtagtacctctaaaggtattcaagaaacaatgtttatgaatctcactagtccattatagtttggtaccataattattttaggtaacaaagcaggttaggtttttgttaatgtatcttgcttaacaaac

SEQ ID NO: 68378 - DNA, 462 bp, Homo sapiens
tgtgtttatctggtataactgatggttatattttatatgttaattctcagtgtgacctgttcttgggatgtttttcagagttacttctataatgatgacatctttaactttaattatgcccaagccaaagctgcaacaggcaataccagtgagggcgaagaggtgggtatctgcttttgagagcatttgaatgattctatctaaaaacatccttatctttttctcactggaataaaatggtcaagggttaaggattattaaagattcctctgttcttaggatgcatgaataagtacactgtggagaaggtgcagtgacacacacctgtagtcccagctacttgggaggctgaggcaggacaatggcttgagcctggaagttttaagctgcagtgcactatgatcgtgcctgtgaatagccactacactccagcctgggcaacatagcaagaccctgtctctt

SEQ ID NO: 68379 - DNA, 549 bp, Homo sapiens
aattattatatcaacattttacttttttttccatagaattgaaataaaatgaaacttatctgctggagcttccactaaattatttttgcttaagattgagaatttacaaatatggtaaattttgttatatagatacttggctgctggaaactaaatgagtgtctcctaattcttttattcaagccagggatagaacagagaaaagtaactgtgggtaatctttgatactttatataaagtattgagttaatgcaaggagttaatttgaaaatgatctcatagctccacattcctcttaatcagtgttattccatgtttctaggagtatattctcaaaggagtggtcaatgcagcccttggccaggaaatgggttcagtgagtatgaaatcactgataatctataggttgcaaagttataagtgtatggaagagaacaaaatgactatcaaagtgcaagcagcaataggctctcctgtagctccttttatttctccatatcccccaatccagactccactgagaaaagaatgttatgttatttagagaca

SEQ ID NO: 68380 - DNA, 2533 bp, Homo sapiens
  misc_feature (2)..(3): n is a, c, g, or t
gnnagaacgtgctgtgtggatgcggcgaaacgctgaggcgcggccttcgctgtgtggtggggactcacaagaccgacgtcaagatgatgctttcaagggccaaacctgctgtaggcagaggcgtacagcacactgacaaaagaaagaagaaaggtaggaagattccaaaactagaggagctactttcaaaaagagatttcactggagctattaccctgttggagttcaaacgtcatgttggggaagaagaagaggatactaatttgtggattggatattgtgcctttcacctgggtgactacaagagagctctggaggaatacgaaaatgctacaaaagaggaaaattgtaattctgaagtctgggtgaacctagcttgcacctacttctttcttgggatgtataaacaagctgaagcagctggatttaaagcttcaaaaagccgactccaaaaccgcctcctcttccacttggctcacaagtttaatgatgagaaaaaattgatgagctttcatcaaaatcttcaggatgtcacagaagatcaactcagtttggcctcaatccactatatgcgatctcactaccaagaagctatagatatatataagcgaatactgctagataacagggaataccttgcccttaatgtttatgtggccctctgctactacaagttggattactatgatgtgtctcaagaagttttggctgtttaccttcagcaaattcctgatagtaccatcgcactcaatcttaaagcctgtaaccattttcgcctttacaatggcagagcagctgaggcagaactcaaaagcttgatggacaatgcttcttcatcctttgaatttgctaaagaactcatcaggcacaatctggttgttttccgaggaggtgaaggggctttgcaggttttacctcccctagttgatgtcattcctgaagctaggctaaacttggtgatttactaccttcgtcaagatgatgtacaagaagcttataacttaattaaggatctggaacctactactcctcaggagtatattctcaaaggagtggtcaatgcagcccttggccaggaaatgggttcaagggatcatatgaaaattgcccagcagttcttccagttggtgggaggatcagctagtgaatgtgatacaataccagggaggcagtgcatggcttcctgtttcttcctgcttaagcaatttgatgatgttttgatttacctcaactcatttaagagttacttctataatgatgacatctttaactttaattatgcccaagccaaagctgcaacaggcaataccagtgagggcgaagaggcgttcctcttgatccaaagtgagaagatgaaaaatgattacatttacctcagctggttagctcggtgctatattatgaataagaaaccaagactagcctgggaactttatcttaagatggaaacctccggcgagtccttcagtctcttacagctcattgctaatgactgctacaagatgggccagttttactattctgccaaagcttttgatgtccttgagaggctggatcctaaccctgaatattgggaaggcaaacggggtgcctgtgtgggcattttccagatgatcatagctgggagagaacccaaagagacccttcgagaagtgctccatttactgagaagcacaggtaacacccaagtagaatacatgatccggatcatgaagaaatgggccaaagaaaacagagtgtccatctaaaatagcgccagcgtcctaggaaccagcttctactttgacataaaactggaaatcattttcactccagtttaatctgtgatacagggctctgttttattgacattttccttccttgctctttaagcctcaaggtcagagactgacttgctgagacttagtctcctggctgaacagagtgccatagtctgtgaccctgtatgatcctagtagcaataagattttggacttatctggtgcctttcttccaaaaatgctcagagtacttttatgcaatttactgactttaaggaaaacagtataacttttttttgttagcattttatggcattgtctcctggctgcaataacaaacatctttgatgttcaagaatcagcatcattgtatcatttaactttaaggcgtctctgtacgttatcccattttattggggaattccataaagggttttataacgtcatctctgaatcttgggagaataactagctatgtgtttctaagaaaggcagtaagctactttatcaaactgtccagtcattaataggatagatttatgggattactctttcagtaattaaattgttgatgataataacatgttacagcgcagtaagatgagtattgcaatgttttaaaaggtgagtactatgaaaaaaattgtagtacctctaaaggtattcaagaaacaatgtttatgaatctcactagtccattatagtttggtaccataattattttaggtaacaaagcaggttaggtttttgttaatgtatcttgcttaacaaac

SEQ ID NO: 68381 - DNA, 1197 bp, Homo sapiens
  misc_feature (2)..(3): n is a, c, g, or t
  misc_feature (1197)..(1197): n is a, c, g, or t
gnnagaacgtgctgtgtggatgcggcgaaacgctgaggcgcggccttcgctgtgtggtggggactcacaagaccgacgtcaagatgatgctttcaagggccaaacctgctgtaggcagaggcgtacagcacactgacaaaagaaagaagaaaggtaggaagattccaaaactagaggagctactttcaaaaagagatttcactggagctattaccctgttggagttcaaacgtcatgttggggaagaagaagaggatactaatttgtggattggatattgtgcctttcacctgggtgactacaagagagctctggaggaatacgaaaatgctacaaaagaggaaaattgtaattctgaagtctgggtgaacctagcttgcacctacttctttcttgggatgtataaacaagctgaagcagctggatttaaagcttcaaaaagccgactccaaaaccgcctcctcttccacttggctcacaagtttaatgatgagaaaaaattgatgagctttcatcaaaatcttcaggatgtcacagaagatcaactcagtttggcctcaatccactatatgcgatctcactaccaagaagctatagatatatataagcgaatactgctagataacagggaataccttgcccttaatgtttatgtggccctctgctactacaagttggattactatgatgtgtctcaagaagttttggctgtttaccttcagcaaattcctgatagtaccatcgcactcaatcttaaagcctgtaaccattttcgcctttacaatggcagagcagctgaggcagaactcaaaagcttgatggacaatgcttcttcatcctttgaatttgctaaagaactcatcaggcacaatctggtgaataacgatttcccgtcttgactgagttcagtcctactctgctttggtacatcacagcaattagaaagattaataaaaggagatgcgccagcaagtaatgctttactccaagggaacccctcctcactgtggaggagataagttttaaagtactaatctgtttccttaaggaaatccttgttgggagaacaggaatatatttaatatttggaaagaagcacaaggcagtgtagatccaggtgtctgtttttttgagaaagacaaaggaacgtatccctctgtggtttaaaataaatgggaaatatttttgcatctttgn

SEQ ID NO: 68382 - DNA, 573 bp, Homo sapiens
  misc_feature (2)..(3): n is a, c, g, or t
gnnagaacgtgctgtgtggatgcggcgaaacgctgaggcgcggccttcgctgtgtggtggggactcacaagaccgacgtcaagatgatgctttcaagggccaaacctgctgtaggcagaggcgtacagcacactgacaaaagaaagaagaaaggtaggaagattccaaaactagaggagctactttcaaaaagagatttcactggagctattaccctgttggagttcaaacgtcatgttggggaagaagaagaggatactaatttgtggattggatattgtgcctttcacctgggtgactacaagagagctctggagcgaatacaaaaatgctacagtcgagagaaagagcttatgggttacaccggatgagccaatgaagcacgttcaaagatggatgtagcccagacaaaacttgatatctatctcagtcggcataatactgcagtgtctcaattaactaaggctaaggaagctctaattgcagcttctgagactctcaaagaaaggaaagctgctatcagagatatagaaggaaaactccctcaaactgaacaagaattaaaggagaaag

SEQ ID NO: 68383 - DNA, 1510 bp, Homo sapiens
ccctggaagctgcttcctcagacatgccgctgctgctactgctgcccctgctgtgggcaggtgagtggctgtggggagaggggttgtcgggctgggccgagctgaccctcgtttccccacaggggccctggctatggatccaaatttctggctgcaagtgcaggagtcagtgacggtacaggagggtttgtgcgtcctcgtgccctgcactttcttccatcccataccctactacgacaagaactccccagttcatggttactggttccgggaaggagccattatatccggggactctccagtggccacaaacaagctagatcaagaagtacaggaggagactcagggcagattccgcctccttggggatcccagtaggaacaactgctccctgagcatcgtagacgccaggaggagggataatggttcatacttctttcggatggagagaggaagtaccaaatacagttacaaatctccccagctctctgtgcatgtgacagacttgacccacaggcccaaaatcctcatccctggcactctagaacccggccactccaaaaacctgacctgctctgtgtcctgggcctgtgagcagggaacacccccgatcttctcctggttgtcagctgcccccacctccctgggccccaggactactcactcctcggtgctcataatcaccccacggccccaggaccacggcaccaacctgacctgtcaggtgaagttcgctggagctggtgtgactacggagagaaccatccagctcaacgtcacctatgttccacagaacccaacaactggtatctttccaggagatggctcagggaaacaagagaccagagcaggagtggttcatggggccattggaggagctggtgttacagccctgctcgctctttgtctctgcctcatcttcttcatagtgaagacccacaggaggaaagcagccaggacagcagtgggcaggaatgacacccaccctaccacagggtcagcctccccgaaacaccagaagaactccaagttacatggccccactgaaacctcaagctgttcaggtgccgcccctactgtggagatggatgaggagctgcattatgcttccctcaactttcatgggatgaatccttccaaggacacctccaccgaatactcagaggtcaggacccagtgaggaaccctcaagagcatcaggctcagctagaagatccacatcctctacaggtcggggaccaaaggctgattcttggagatttaactccccacaggcaatgggtttatagacattatgtgagtttcctgctatattaacatcatcttgagactttgcaagcagagagtcgtggaatcaaatctgtgctctttcatttgctaagtgtatgatgtcacacaagctccttaaccttccatgtctccattttcttctctgtgaagtaggtataagaagtcctatctcatagggatgctgtgagcattaaataaaggtacacatggaaaacaccag

SEQ ID NO: 68384 - DNA, 1448 bp, Homo sapiens
ccctggaagctgcttcctcagacatgccgctgctgctactgctgcccctgctgtgggcaggggccctggctatggatccaaatttctggctgcaagtgcaggagtcagtgacggtacaggagggtttgtgcgtcctcgtgccctgcactttcttccatcccataccctactacgacaagaactccccagttcatggttactggttccgggaaggagccattatatccggggactctccagtggccacaaacaagctagatcaagaagtacaggaggagactcagggcagattccgcctccttggggatcccagtaggaacaactgctccctgagcatcgtagacgccaggaggagggataatggttcatacttctttcggatggagagaggaagtaccaaatacagttacaaatctccccagctctctgtgcatgtgacagacttgacccacaggcccaaaatcctcatccctggcactctagaacccggccactccaaaaacctgacctgctctgtgtcctgggcctgtgagcagggaacacccccgatcttctcctggttgtcagctgcccccacctccctgggccccaggactactcactcctcggtgctcataatcaccccacggccccaggaccacggcaccaacctgacctgtcaggtgaagttcgctggagctggtgtgactacggagagaaccatccagctcaacgtcacctatgttccacagaacccaacaactggtatctttccaggagatggctcagggaaacaagagaccagagcaggagtggttcatggggccattggaggagctggtgttacagccctgctcgctctttgtctctgcctcatcttcttcatagtgaagacccacaggaggaaagcagccaggacagcagtgggcaggaatgacacccaccctaccacagggtcagcctccccgaaacaccagaagaactccaagttacatggccccactgaaacctcaagctgttcaggtgccgcccctactgtggagatggatgaggagctgcattatgcttccctcaactttcatgggatgaatccttccaaggacacctccaccgaatactcagaggtcaggacccagtgaggaaccctcaagagcatcaggctcagctagaagatccacatcctctacaggtcggggaccaaaggctgattcttggagatttaactccccacaggcaatgggtttatagacattatgtgagtttcctgctatattaacatcatcttgagactttgcaagcagagagtcgtggaatcaaatctgtgctctttcatttgctaagtgtatgatgtcacacaagctccttaaccttccatgtctccattttcttctctgtgaagtaggtataagaagtcctatctcatagggatgctgtgagcattaaataaaggtacacatggaaaacaccag

SEQ ID NO: 68385 - DNA, 1067 bp, Homo sapiens
ccctggaagctgcttcctcagacatgccgctgctgctactgctgcccctgctgtgggcagacttgacccacaggcccaaaatcctcatccctggcactctagaacccggccactccaaaaacctgacctgctctgtgtcctgggcctgtgagcagggaacacccccgatcttctcctggttgtcagctgcccccacctccctgggccccaggactactcactcctcggtgctcataatcaccccacggccccaggaccacggcaccaacctgacctgtcaggtgaagttcgctggagctggtgtgactacggagagaaccatccagctcaacgtcacctatgttccacagaacccaacaactggtatctttccaggagatggctcagggaaacaagagaccagagcaggagtggttcatggggccattggaggagctggtgttacagccctgctcgctctttgtctctgcctcatcttcttcatagtgaagacccacaggaggaaagcagccaggacagcagtgggcaggaatgacacccaccctaccacagggtcagcctccccgaaacaccagaagaactccaagttacatggccccactgaaacctcaagctgttcaggtgccgcccctactgtggagatggatgaggagctgcattatgcttccctcaactttcatgggatgaatccttccaaggacacctccaccgaatactcagaggtcaggacccagtgaggaaccctcaagagcatcaggctcagctagaagatccacatcctctacaggtcggggaccaaaggctgattcttggagatttaactccccacaggcaatgggtttatagacattatgtgagtttcctgctatattaacatcatcttgagactttgcaagcagagagtcgtggaatcaaatctgtgctctttcatttgctaagtgtatgatgtcacacaagctccttaaccttccatgtctccattttcttctctgtgaagtaggtataagaagtcctatctcatagggatgctgtgagcattaaataaaggtacacatggaaaacaccag

SEQ ID NO: 68386 - DNA, 3413 bp, Homo sapiens
taagaatatgtatttataatcccagcactttgggaggccaacgcaggcggatcactcctgacctcatgtgatctgcctgcctcagcctcccaaagtactgggattacaggcatgagctaatttttttttttttttttaattaaaggaagacataggccaaggagccagacttcctgtgttaactccttcctctgccactttttaccttggggacctcagttaatatgatcctctgttgaagcaagaagacaaactgtatggtggagaaagaagtgggaaggatctgcgcggaagaagcctgagaagatgatgcacagatagagaggcaccaggacttgagaggcaccaggacttgggaggcatgttgatccatctccaggaaagactgagaaaaagagcgttgaatataagaaaaaatacttcctctgttctcagatcgtatttgttttaaggccacacctttttgaagttttcagtttgaaacacaacctggactgaaatcatgagggaggttgtgtaggaaagaatcatcaagggacttagttgggagcttctctaccacagcttactccttatggtattaaccccctttaagtgtaaatgtctttggtttaaaacgtttgtacctcatctgttaccagagtgttcatactggagagaaaccctatgaatttactgaatgtgggggaactgttactcatatgttgcatttcgtcgaacgtgcaagtcatgctgaagagaaaccctgtgcttctaaggagtattgacaagcccttagctagatgacaatctcattgagaagcagaaaattcatgctggagagaaactagtgaaggtagcaatacttcattgaatattagaaaatttttctagagagaaagcattgaatatactgagtatgataacatttcctctcaaaccttatcccttactctgcatttgggagatcatacacagagaagccttataaatgtaagagatgtggaaatatcttcagccaaaagtaaatcctcactcatcaagaaatttttactggagagaaaccttgtgaatgtgggaaagcttccattcagatgtcacacctcagccagcagaaaatttacagtggggaaaacccctttgcctgtaaggtatgtggaaaagtcttcagccacaaatcaaacctcactgagcatgagcattttcacacgagagagaaaccttttgaatgtaacgagtgtggaaaagcctttagccaaaagcagtatgtcattaaacatcagaacacccatactggcgagaagcttttcgaatgtaatgaatgtggaaaatcatttagccagaaggaaaacctccttacgcaccagaaaattcacactggagaaaaaccttttgagtgtaaagattgcgggaaagctttcattcagaagtcaaacctcatcagacaccagagaactcacacaggagagaagccctttgtatgtaaggagtgtggaaaaaccttcagtggcaaatccaaccttactgagcatgagaaaatccatattggagagaagccttttaaatgtagtgaatgtggaacagcctttggccagaagaagtacctcataaaacatcagaacattcacactggagagaaaccctatgaatgtaacgaatgtggaaaagccttctctcagcgaacatcacttattgtacatgtgaggattcattcaggtgataaaccttacgaatgcaatgtttgtggaaaagccttctctcagagctcatctctcactgtgcatgtgagaagccatacaggggagaagccctatggttgtaatgaatgtgggaaagctttctctcagttctcaacccttgctctgcatttgagaatacacacaggtaagaagccttatcagtgcagtgaatgtgggaaagctttcagccagaagtcacaccacattagacaccagaaaattcatactcactaaaaaccccatgaaagccttgaaagtgggaaagctttcattagaaatttgcacctcatcatgccccagaaataatccttctgaagcaaagcaccacgaatgaggttaactttaacaagtactaaaaacttaagggacaccagaaaatttgtactgaagagaaagacatgcatatgattaaaaccctgtgtccaacagagaaacctgcagcagagataatggtgaaagtttaggcacattttcactaaaagtgggaacagaaaatggaggcctgttttttattgctaccaccatagatctggagatcttcgccagtaacaagaaaaattaagttgtaaatattggaaaggaacagacaaaaatagatgacatggtcatctacaactaatattaagactcctgtggtattgattgagcagagcagaagagatttcaaaaaaagacctatgcatttattagaatttggaatatgatacaagtggcatcaggaaatgaggaaataatggaactattttttttaagtggaggtagtttgttctccaagggggaaaaatagaccatgaactatacacaaaagtgaatccagagattaaaaacagaaatatggaaaagctatgtactaaaatgcatatgaccttgggaatagggaaacattccttggaacaatttgagaaatacttagcggttctacttatgagtatgaatgctcaggaaatacgcactaggatatttactgtggcttgatttgtagtagccaaaaattagaaacaactgagaaagcccatcacgaacaatatgggaaattcttatgtaatactatatatctgtaaaatgcaacaaatgaaatccacatgtattaacagaaagatcccagaattgttgaggggggatcaagttgcagaatgatacagatagtacaatgacttttttgtaaatttgaattaaaagtttcctcataaaactcagtactatctattggtaatggatgcatatatgtatgtacatgtttttgaaacggattggaaggatacagaccaaactcttgatagtggtcacctgtgaagagtggagaagggaaaataatgagtgtgggaggtgggatgggtattggttaaaggggacttcagctttttatataaacatccacttctctttcaaaagacttcaagtaaatataagaagatactgattgattctggattgtggtatagggatatcttgtcttattttttgtacttttctgtatttttaaaatttctcaaaataggaatgggagtgaggatgggaatgctgtatctgtggaagtcatgttatactggattcatttccaattaaatactaaacattttatagaaaatatttctaaaattttatcacggatgaatggatggacttgctctctatgtaatatgaaattaatctattttattaaaatttaaaaggacagcacaatccaaatctgtt

SEQ ID NO: 68387 - DNA, 3319 bp, Homo sapiens
cgagtgcgcaagcgcagcgcaccgagtggacattttggtctttgtccgcgggaagacataggccaaggagccagacttcctgtgttaactccttcctctgccactttttaccttggggacctcagttaatatgatcctctgttgaagcaagaagacaaactgtatggtggagaaagaagtgggaaggatctgcgcggaagaagcctgagaagatgatgcacagatagagaggcaccaggacttgagaggcaccaggacttgggaggcatgttgatccatctccaggaaagactgagaaaaagagcgttgaatataagaaaaaatacttcctctgttctcagatcgtatttgttttaaggccacacctttttgaagttttcagtttgaaacacaacctggactgaaatcatgagggaggttgtgtaggaaagaatcatcaagggacttagttgggagcttctctaccacagcttactccttatggtattaaccccctttaagtgtaaatgtctttggtttaaaacgtttgtacctcatctgttaccagagtgttcatactggagagaaaccctatgaatttactgaatgtgggggaactgttactcatatgttgcatttcgtcgaacgtgcaagtcatgctgaagagaaaccctgtgcttctaaggagtattgacaagcccttagctagatgacaatctcattgagaagcagaaaattcatgctggagagaaactagtgaaggtagcaatacttcattgaatattagaaaatttttctagagagaaagcattgaatatactgagtatgataacatttcctctcaaaccttatcccttactctgcatttgggagatcatacacagagaagccttataaatgtaagagatgtggaaatatcttcagccaaaagtaaatcctcactcatcaagaaatttttactggagagaaaccttgtgaatgtgggaaagcttccattcagatgtcacacctcagccagcagaaaatttacagtggggaaaacccctttgcctgtaaggtatgtggaaaagtcttcagccacaaatcaaacctcactgagcatgagcattttcacacgagagagaaaccttttgaatgtaacgagtgtggaaaagcctttagccaaaagcagtatgtcattaaacatcagaacacccatactggcgagaagcttttcgaatgtaatgaatgtggaaaatcatttagccagaaggaaaacctccttacgcaccagaaaattcacactggagaaaaaccttttgagtgtaaagattgcgggaaagctttcattcagaagtcaaacctcatcagacaccagagaactcacacaggagagaagccctttgtatgtaaggagtgtggaaaaaccttcagtggcaaatccaaccttactgagcatgagaaaatccatattggagagaagccttttaaatgtagtgaatgtggaacagcctttggccagaagaagtacctcataaaacatcagaacattcacactggagagaaaccctatgaatgtaacgaatgtggaaaagccttctctcagcgaacatcacttattgtacatgtgaggattcattcaggtgataaaccttacgaatgcaatgtttgtggaaaagccttctctcagagctcatctctcactgtgcatgtgagaagccatacaggggagaagccctatggttgtaatgaatgtgggaaagctttctctcagttctcaacccttgctctgcatttgagaatacacacaggtaagaagccttatcagtgcagtgaatgtgggaaagctttcagccagaagtcacaccacattagacaccagaaaattcatactcactaaaaaccccatgaaagccttgaaagtgggaaagctttcattagaaatttgcacctcatcatgccccagaaataatccttctgaagcaaagcaccacgaatgaggttaactttaacaagtactaaaaacttaagggacaccagaaaatttgtactgaagagaaagacatgcatatgattaaaaccctgtgtccaacagagaaacctgcagcagagataatggtgaaagtttaggcacattttcactaaaagtgggaacagaaaatggaggcctgttttttattgctaccaccatagatctggagatcttcgccagtaacaagaaaaattaagttgtaaatattggaaaggaacagacaaaaatagatgacatggtcatctacaactaatattaagactcctgtggtattgattgagcagagcagaagagatttcaaaaaaagacctatgcatttattagaatttggaatatgatacaagtggcatcaggaaatgaggaaataatggaactattttttttaagtggaggtagtttgttctccaagggggaaaaatagaccatgaactatacacaaaagtgaatccagagattaaaaacagaaatatggaaaagctatgtactaaaatgcatatgaccttgggaatagggaaacattccttggaacaatttgagaaatacttagcggttctacttatgagtatgaatgctcaggaaatacgcactaggatatttactgtggcttgatttgtagtagccaaaaattagaaacaactgagaaagcccatcacgaacaatatgggaaattcttatgtaatactatatatctgtaaaatgcaacaaatgaaatccacatgtattaacagaaagatcccagaattgttgaggggggatcaagttgcagaatgatacagatagtacaatgacttttttgtaaatttgaattaaaagtttcctcataaaactcagtactatctattggtaatggatgcatatatgtatgtacatgtttttgaaacggattggaaggatacagaccaaactcttgatagtggtcacctgtgaagagtggagaagggaaaataatgagtgtgggaggtgggatgggtattggttaaaggggacttcagctttttatataaacatccacttctctttcaaaagacttcaagtaaatataagaagatactgattgattctggattgtggtatagggatatcttgtcttattttttgtacttttctgtatttttaaaatttctcaaaataggaatgggagtgaggatgggaatgctgtatctgtggaagtcatgttatactggattcatttccaattaaatactaaacattttatagaaaatatttctaaaattttatcacggatgaatggatggacttgctctctatgtaatatgaaattaatctattttattaaaatttaaaaggacagcacaatccaaatctgtt

SEQ ID NO: 68388 - DNA, 3528 bp, Homo sapiens
cgagtgcgcaagcgcagcgcaccgagtggacattttggtctttgtccgcgggtcagtacggcccctgggtccacgtggcgcgaaagtaggaggaagacataggccaaggagccagacttcctgtgttaactccttcctctgccactttttaccttggggacctcagagatggggtcttgccatgttgcctaggctggtcttgaacttctgagctcaagtgatcctgcccacctcagcttcccaaagtgctgggattagtggcatgagccactgcgtccagcccacggtaacatttctccctgtgtcttcagcagcagtaatagtctgacaactgttaatatgatcctctgttgaagcaagaagacaaactgtatggtggagaaagaagtgggaaggatctgcgcggaagaagcctgagaagatgatgcacagatagagaggcaccaggacttgagaggcaccaggacttgggaggcatgttgatccatctccaggaaagactgagaaaaagagcgttgaatataagaaaaaatacttcctctgttctcagatcgtatttgttttaaggccacacctttttgaagttttcagtttgaaacacaacctggactgaaatcatgagggaggttgtgtaggaaagaatcatcaagggacttagttgggagcttctctaccacagcttactccttatggtattaaccccctttaagtgtaaatgtctttggtttaaaacgtttgtacctcatctgttaccagagtgttcatactggagagaaaccctatgaatttactgaatgtgggggaactgttactcatatgttgcatttcgtcgaacgtgcaagtcatgctgaagagaaaccctgtgcttctaaggagtattgacaagcccttagctagatgacaatctcattgagaagcagaaaattcatgctggagagaaactagtgaaggtagcaatacttcattgaatattagaaaatttttctagagagaaagcattgaatatactgagtatgataacatttcctctcaaaccttatcccttactctgcatttgggagatcatacacagagaagccttataaatgtaagagatgtggaaatatcttcagccaaaagtaaatcctcactcatcaagaaatttttactggagagaaaccttgtgaatgtgggaaagcttccattcagatgtcacacctcagccagcagaaaatttacagtggggaaaacccctttgcctgtaaggtatgtggaaaagtcttcagccacaaatcaaacctcactgagcatgagcattttcacacgagagagaaaccttttgaatgtaacgagtgtggaaaagcctttagccaaaagcagtatgtcattaaacatcagaacacccatactggcgagaagcttttcgaatgtaatgaatgtggaaaatcatttagccagaaggaaaacctccttacgcaccagaaaattcacactggagaaaaaccttttgagtgtaaagattgcgggaaagctttcattcagaagtcaaacctcatcagacaccagagaactcacacaggagagaagccctttgtatgtaaggagtgtggaaaaaccttcagtggcaaatccaaccttactgagcatgagaaaatccatattggagagaagccttttaaatgtagtgaatgtggaacagcctttggccagaagaagtacctcataaaacatcagaacattcacactggagagaaaccctatgaatgtaacgaatgtggaaaagccttctctcagcgaacatcacttattgtacatgtgaggattcattcaggtgataaaccttacgaatgcaatgtttgtggaaaagccttctctcagagctcatctctcactgtgcatgtgagaagccatacaggggagaagccctatggttgtaatgaatgtgggaaagctttctctcagttctcaacccttgctctgcatttgagaatacacacaggtaagaagccttatcagtgcagtgaatgtgggaaagctttcagccagaagtcacaccacattagacaccagaaaattcatactcactaaaaaccccatgaaagccttgaaagtgggaaagctttcattagaaatttgcacctcatcatgccccagaaataatccttctgaagcaaagcaccacgaatgaggttaactttaacaagtactaaaaacttaagggacaccagaaaatttgtactgaagagaaagacatgcatatgattaaaaccctgtgtccaacagagaaacctgcagcagagataatggtgaaagtttaggcacattttcactaaaagtgggaacagaaaatggaggcctgttttttattgctaccaccatagatctggagatcttcgccagtaacaagaaaaattaagttgtaaatattggaaaggaacagacaaaaatagatgacatggtcatctacaactaatattaagactcctgtggtattgattgagcagagcagaagagatttcaaaaaaagacctatgcatttattagaatttggaatatgatacaagtggcatcaggaaatgaggaaataatggaactattttttttaagtggaggtagtttgttctccaagggggaaaaatagaccatgaactatacacaaaagtgaatccagagattaaaaacagaaatatggaaaagctatgtactaaaatgcatatgaccttgggaatagggaaacattccttggaacaatttgagaaatacttagcggttctacttatgagtatgaatgctcaggaaatacgcactaggatatttactgtggcttgatttgtagtagccaaaaattagaaacaactgagaaagcccatcacgaacaatatgggaaattcttatgtaatactatatatctgtaaaatgcaacaaatgaaatccacatgtattaacagaaagatcccagaattgttgaggggggatcaagttgcagaatgatacagatagtacaatgacttttttgtaaatttgaattaaaagtttcctcataaaactcagtactatctattggtaatggatgcatatatgtatgtacatgtttttgaaacggattggaaggatacagaccaaactcttgatagtggtcacctgtgaagagtggagaagggaaaataatgagtgtgggaggtgggatgggtattggttaaaggggacttcagctttttatataaacatccacttctctttcaaaagacttcaagtaaatataagaagatactgattgattctggattgtggtatagggatatcttgtcttattttttgtacttttctgtatttttaaaatttctcaaaataggaatgggagtgaggatgggaatgctgtatctgtggaagtcatgttatactggattcatttccaattaaatactaaacattttatagaaaatatttctaaaattttatcacggatgaatggatggacttgctctctatgtaatatgaaattaatctattttattaaaatttaaaaggacagcacaatccaaatctgtt

SEQ ID NO: 68389 - DNA, 3245 bp, Homo sapiens
cgagtgcgcaagcgcagcgcaccgagtggacattttggtctttgtccgcggttaatatgatcctctgttgaagcaagaagacaaactgtatggtggagaaagaagtgggaaggatctgcgcggaagaagcctgagaagatgatgcacagatagagaggcaccaggacttgagaggcaccaggacttgggaggcatgttgatccatctccaggaaagactgagaaaaagagcgttgaatataagaaaaaatacttcctctgttctcagatcgtatttgttttaaggccacacctttttgaagttttcagtttgaaacacaacctggactgaaatcatgagggaggttgtgtaggaaagaatcatcaagggacttagttgggagcttctctaccacagcttactccttatggtattaaccccctttaagtgtaaatgtctttggtttaaaacgtttgtacctcatctgttaccagagtgttcatactggagagaaaccctatgaatttactgaatgtgggggaactgttactcatatgttgcatttcgtcgaacgtgcaagtcatgctgaagagaaaccctgtgcttctaaggagtattgacaagcccttagctagatgacaatctcattgagaagcagaaaattcatgctggagagaaactagtgaaggtagcaatacttcattgaatattagaaaatttttctagagagaaagcattgaatatactgagtatgataacatttcctctcaaaccttatcccttactctgcatttgggagatcatacacagagaagccttataaatgtaagagatgtggaaatatcttcagccaaaagtaaatcctcactcatcaagaaatttttactggagagaaaccttgtgaatgtgggaaagcttccattcagatgtcacacctcagccagcagaaaatttacagtggggaaaacccctttgcctgtaaggtatgtggaaaagtcttcagccacaaatcaaacctcactgagcatgagcattttcacacgagagagaaaccttttgaatgtaacgagtgtggaaaagcctttagccaaaagcagtatgtcattaaacatcagaacacccatactggcgagaagcttttcgaatgtaatgaatgtggaaaatcatttagccagaaggaaaacctccttacgcaccagaaaattcacactggagaaaaaccttttgagtgtaaagattgcgggaaagctttcattcagaagtcaaacctcatcagacaccagagaactcacacaggagagaagccctttgtatgtaaggagtgtggaaaaaccttcagtggcaaatccaaccttactgagcatgagaaaatccatattggagagaagccttttaaatgtagtgaatgtggaacagcctttggccagaagaagtacctcataaaacatcagaacattcacactggagagaaaccctatgaatgtaacgaatgtggaaaagccttctctcagcgaacatcacttattgtacatgtgaggattcattcaggtgataaaccttacgaatgcaatgtttgtggaaaagccttctctcagagctcatctctcactgtgcatgtgagaagccatacaggggagaagccctatggttgtaatgaatgtgggaaagctttctctcagttctcaacccttgctctgcatttgagaatacacacaggtaagaagccttatcagtgcagtgaatgtgggaaagctttcagccagaagtcacaccacattagacaccagaaaattcatactcactaaaaaccccatgaaagccttgaaagtgggaaagctttcattagaaatttgcacctcatcatgccccagaaataatccttctgaagcaaagcaccacgaatgaggttaactttaacaagtactaaaaacttaagggacaccagaaaatttgtactgaagagaaagacatgcatatgattaaaaccctgtgtccaacagagaaacctgcagcagagataatggtgaaagtttaggcacattttcactaaaagtgggaacagaaaatggaggcctgttttttattgctaccaccatagatctggagatcttcgccagtaacaagaaaaattaagttgtaaatattggaaaggaacagacaaaaatagatgacatggtcatctacaactaatattaagactcctgtggtattgattgagcagagcagaagagatttcaaaaaaagacctatgcatttattagaatttggaatatgatacaagtggcatcaggaaatgaggaaataatggaactattttttttaagtggaggtagtttgttctccaagggggaaaaatagaccatgaactatacacaaaagtgaatccagagattaaaaacagaaatatggaaaagctatgtactaaaatgcatatgaccttgggaatagggaaacattccttggaacaatttgagaaatacttagcggttctacttatgagtatgaatgctcaggaaatacgcactaggatatttactgtggcttgatttgtagtagccaaaaattagaaacaactgagaaagcccatcacgaacaatatgggaaattcttatgtaatactatatatctgtaaaatgcaacaaatgaaatccacatgtattaacagaaagatcccagaattgttgaggggggatcaagttgcagaatgatacagatagtacaatgacttttttgtaaatttgaattaaaagtttcctcataaaactcagtactatctattggtaatggatgcatatatgtatgtacatgtttttgaaacggattggaaggatacagaccaaactcttgatagtggtcacctgtgaagagtggagaagggaaaataatgagtgtgggaggtgggatgggtattggttaaaggggacttcagctttttatataaacatccacttctctttcaaaagacttcaagtaaatataagaagatactgattgattctggattgtggtatagggatatcttgtcttattttttgtacttttctgtatttttaaaatttctcaaaataggaatgggagtgaggatgggaatgctgtatctgtggaagtcatgttatactggattcatttccaattaaatactaaacattttatagaaaatatttctaaaattttatcacggatgaatggatggacttgctctctatgtaatatgaaattaatctattttattaaaatttaaaaggacagcacaatccaaatctgtt

SEQ ID NO: 68390 - DNA, 3356 bp, Homo sapiens
cgagtgcgcaagcgcagcgcaccgagtggacattttggtctttgtccgcgggtcagtacggcccctgggtccacgtggcgcgaaagtaggaggaagacataggccaaggagccagacttcctgtgttaactccttcctctgccactttttaccttggggacctcagttaatatgatcctctgttgaagcaagaagacaaactgtatggtggagaaagaagtgggaaggatctgcgcggaagaagcctgagaagatgatgcacagatagagaggcaccaggacttgagaggcaccaggacttgggaggcatgttgatccatctccaggaaagactgagaaaaagagcgttgaatataagaaaaaatacttcctctgttctcagatcgtatttgttttaaggccacacctttttgaagttttcagtttgaaacacaacctggactgaaatcatgagggaggttgtgtaggaaagaatcatcaagggacttagttgggagcttctctaccacagcttactccttatggtattaaccccctttaagtgtaaatgtctttggtttaaaacgtttgtacctcatctgttaccagagtgttcatactggagagaaaccctatgaatttactgaatgtgggggaactgttactcatatgttgcatttcgtcgaacgtgcaagtcatgctgaagagaaaccctgtgcttctaaggagtattgacaagcccttagctagatgacaatctcattgagaagcagaaaattcatgctggagagaaactagtgaaggtagcaatacttcattgaatattagaaaatttttctagagagaaagcattgaatatactgagtatgataacatttcctctcaaaccttatcccttactctgcatttgggagatcatacacagagaagccttataaatgtaagagatgtggaaatatcttcagccaaaagtaaatcctcactcatcaagaaatttttactggagagaaaccttgtgaatgtgggaaagcttccattcagatgtcacacctcagccagcagaaaatttacagtggggaaaacccctttgcctgtaaggtatgtggaaaagtcttcagccacaaatcaaacctcactgagcatgagcattttcacacgagagagaaaccttttgaatgtaacgagtgtggaaaagcctttagccaaaagcagtatgtcattaaacatcagaacacccatactggcgagaagcttttcgaatgtaatgaatgtggaaaatcatttagccagaaggaaaacctccttacgcaccagaaaattcacactggagaaaaaccttttgagtgtaaagattgcgggaaagctttcattcagaagtcaaacctcatcagacaccagagaactcacacaggagagaagccctttgtatgtaaggagtgtggaaaaaccttcagtggcaaatccaaccttactgagcatgagaaaatccatattggagagaagccttttaaatgtagtgaatgtggaacagcctttggccagaagaagtacctcataaaacatcagaacattcacactggagagaaaccctatgaatgtaacgaatgtggaaaagccttctctcagcgaacatcacttattgtacatgtgaggattcattcaggtgataaaccttacgaatgcaatgtttgtggaaaagccttctctcagagctcatctctcactgtgcatgtgagaagccatacaggggagaagccctatggttgtaatgaatgtgggaaagctttctctcagttctcaacccttgctctgcatttgagaatacacacaggtaagaagccttatcagtgcagtgaatgtgggaaagctttcagccagaagtcacaccacattagacaccagaaaattcatactcactaaaaaccccatgaaagccttgaaagtgggaaagctttcattagaaatttgcacctcatcatgccccagaaataatccttctgaagcaaagcaccacgaatgaggttaactttaacaagtactaaaaacttaagggacaccagaaaatttgtactgaagagaaagacatgcatatgattaaaaccctgtgtccaacagagaaacctgcagcagagataatggtgaaagtttaggcacattttcactaaaagtgggaacagaaaatggaggcctgttttttattgctaccaccatagatctggagatcttcgccagtaacaagaaaaattaagttgtaaatattggaaaggaacagacaaaaatagatgacatggtcatctacaactaatattaagactcctgtggtattgattgagcagagcagaagagatttcaaaaaaagacctatgcatttattagaatttggaatatgatacaagtggcatcaggaaatgaggaaataatggaactattttttttaagtggaggtagtttgttctccaagggggaaaaatagaccatgaactatacacaaaagtgaatccagagattaaaaacagaaatatggaaaagctatgtactaaaatgcatatgaccttgggaatagggaaacattccttggaacaatttgagaaatacttagcggttctacttatgagtatgaatgctcaggaaatacgcactaggatatttactgtggcttgatttgtagtagccaaaaattagaaacaactgagaaagcccatcacgaacaatatgggaaattcttatgtaatactatatatctgtaaaatgcaacaaatgaaatccacatgtattaacagaaagatcccagaattgttgaggggggatcaagttgcagaatgatacagatagtacaatgacttttttgtaaatttgaattaaaagtttcctcataaaactcagtactatctattggtaatggatgcatatatgtatgtacatgtttttgaaacggattggaaggatacagaccaaactcttgatagtggtcacctgtgaagagtggagaagggaaaataatgagtgtgggaggtgggatgggtattggttaaaggggacttcagctttttatataaacatccacttctctttcaaaagacttcaagtaaatataagaagatactgattgattctggattgtggtatagggatatcttgtcttattttttgtacttttctgtatttttaaaatttctcaaaataggaatgggagtgaggatgggaatgctgtatctgtggaagtcatgttatactggattcatttccaattaaatactaaacattttatagaaaatatttctaaaattttatcacggatgaatggatggacttgctctctatgtaataagccatgtctatttatattaacccgcgctcggtgggggtgcggtcggctg

SEQ ID NO: 68391 - DNA, 3299 bp, Homo sapiens
cgagtgcgcaagcgcagcgcaccgagtggacattttggtctttgtccgcgggtcagtacggcccctgggtccacgtggcgcgaaagtaggaggaagacataggccaaggagccagacttcctgtgttaactccttcctctgccactttttaccttggggacctcagttaatatgatcctctgttgaagcaagaagacaaactgtatggtggagaaagaagtgggaaggatctgcgcggaagaagcctgagaagatgatgcacagatagagaggcaccaggacttgagaggcaccaggacttgggaggcatgttgatccatctccaggaaagactgagaaaaagagcgttgaatataagaaaaaatacttcctctgttctcagatcgtatttgttttaaggccacacctttttgaagttttcagtttgaaacacaacctggactgaaatcatgagggaggttgtgtaggaaagaatcatcaagggacttagttgggagcttctctaccacagcttactccttatggtattaaccccctttaagtgtaaatgtctttggtttaaaacgtttgtacctcatctgttaccagagtgttcatactggagagaaaccctatgaatttactgaatgtgggggaactgttactcatatgttgcatttcgtcgaacgtgcaagtcatgctgaagagaaaccctgtgcttctaaggagtattgacaagcccttagctagatgacaatctcattgagaagcagaaaattcatgctggagagaaactagtgaaggtagcaatacttcattgaatattagaaaatttttctagagagaaagcattgaatatactgagtatgataacatttcctctcaaaccttatcccttactctgcatttgggagatcatacacagagaagccttataaatgtaagagatgtggaaatatcttcagccaaaagtaaatcctcactcatcaagaaatttttactggagagaaaccttgtgaatgtgggaaagcttccattcagatgtcacacctcagccagcagaaaatttacagtggggaaaacccctttgcctgtaaggtatgtggaaaagtcttcagccacaaatcaaacctcactgagcatgagcattttcacacgagagagaaaccttttgaatgtaacgagtgtggaaaagcctttagccaaaagcagtatgtcattaaacatcagaacacccatactggcgagaagcttttcgaatgtaatgaatgtggaaaatcatttagccagaaggaaaacctccttacgcaccagaaaattcacactggagaaaaaccttttgagtgtaaagattgcgggaaagctttcattcagaagtcaaacctcatcagacaccagagaactcacacaggagagaagccctttgtatgtaaggagtgtggaaaaaccttcagtggcaaatccaaccttactgagcatgagaaaatccatattggagagaagccttttaaatgtagtgaatgtggaacagcctttggccagaagaagtacctcataaaacatcagaacattcacactggagagaaaccctatgaatgtaacgaatgtggaaaagccttctctcagcgaacatcacttattgtacatgtgaggattcattcaggtgataaaccttacgaatgcaatgtttgtggaaaagccttctctcagagctcatctctcactgtgcatgtgagaagccatacaggggagaagccctatggttgtaatgaatgtgggaaagctttctctcagttctcaacccttgctctgcatttgagaatacacacaggtaagaagccttatcagtgcagtgaatgtgggaaagctttcagccagaagtcacaccacattagacaccagaaaattcatactcactaaaaaccccatgaaagccttgaaagtgggaaagctttcattagaaatttgcacctcatcatgccccagaaataatccttctgaagcaaagcaccacgaatgaggttaactttaacaagtactaaaaacttaagggacaccagaaaatttgtactgaagagaaagacatgcatatgattaaaaccctgtgtccaacagagaaacctgcagcagagataatggtgaaagtttaggcacattttcactaaaagtgggaacagaaaatggaggcctgttttttattgctaccaccatagatctggagatcttcgccagtaacaagaaaaattaagttgtaaatattggaaaggaacagacaaaaatagatgacatggtcatctacaactaatattaagactcctgtggtattgattgagcagagcagaagagatttcaaaaaaagacctatgcatttattagaatttggaatatgatacaagtggcatcaggaaatgaggaaataatggaactattttttttaagtggaggtagtttgttctccaagggggaaaaatagaccatgaactatacacaaaagtgaatccagagattaaaaacagaaatatggaaaagctatgtactaaaatgcatatgaccttgggaatagggaaacattccttggaacaatttgagaaatacttagcggttctacttatgagtatgaatgctcaggaaatacgcactaggatatttactgtggcttgatttgtagtagccaaaaattagaaacaactgagaaagcccatcacgaacaatatgggaaattcttatgtaatactatatatctgtaaaatgcaacaaatgaaatccacatgtattaacagaaagatcccagaattgttgaggggggatcaagttgcagaatgatacagatagtacaatgacttttttgtaaatttgaattaaaagtttcctcataaaactcagtactatctattggtaatggatgcatatatgtatgtacatgtttttgaaacggattggaaggatacagaccaaactcttgatagtggtcacctgtgaagagtggagaagggaaaataatgagtgtgggaggtgggatgggtattggttaaaggggacttcagctttttatataaacatccacttctctttcaaaagacttcaagtaaatataagaagatactgattgattctggattgtggtatagggatatcttgtcttattttttgtacttttctgtatttttaaaatttctcaaaataggaatgggagtgaggatgggaatgctgtatctgtggaagtcatgttatactggattcatttccaattaaatactaaacattttatagaaaatatttctaaaatttatcgccgtgaattagccatctcggaagggacc

SEQ ID NO: 68392 - DNA, 727 bp, Homo sapiens
cgagtgcgcaagcgcagcgcaccgagtggacattttggtctttgtccgcgggtcagtacggcccctgggtccacgtggcgcgaaagtaggagagatggggtcttgccatgttgcctaggctggtcttgaacttctgagctcaagtgatcctgcccacctcagcttcccaaagtgctgggattagtggcatgagccactgcgtccagcccacgttaatatgatcctctgttgaagcaagaagacaaactgtatggtggagaaagaagtgggaaggatctgcgcgggtgagtaaatgacaggcaggccacagtttttcagtcagcattgagtcctctgaagtgcttcaaaggatgttttcttccaggctgtagacatatagagtattgcttggtatgagatttttagattcctgaatgacgcttccagtcatcatttttgtgtgtttcattattcttcttgtttcaccagattctagaggggccaggcgcccctcctgttgctgttctgacgtcagccttcctgcttcgtctgtgccgccactgtggtggctgttctccttcatccacataccttttcctgtcctcacacattgtcctttatactttgtaaaaccttacatattgtctgatattcaggttcctttttgttactaccttctctcatcctttctagtggctgaatgcctcagaattatattttacacctgttctcacacttcccgttgtct

SEQ ID NO: 68393 - DNA, 992 bp, Homo sapiens
cgagtgcgcaagcgcagcgcaccgagtggacattttggtctttgtccgcgggtcagtacggcccctgggtccacgtggcgcgaaagtaggaggaagacataggccaaggagccagacttcctgtgttaactccttcctctgccactttttaccttggggacctcagagatggggtcttgccatgttgcctaggctggtcttgaacttctgagctcaagtgatcctgcccacctcagcttcccaaagtgctgggattagtggcatgagccactgcgtccagcccacggtaacatttctccctgtgtcttcagcagcagtaatagtctgacaactggcaagttcccatttctgttctagccctattctgagctcctgatctgtatatccaactgcctaatcgatctctctgcctgcatgtgttcagaaacctacactctgaatgtatagagtctcaaacttgatctccctcctgcaagttgcttccagccaactcaccttctcgtgtttctgtcatgtatgtttcggtttaaatcatgctctaagccttatatctctgacacaccccattaggaattgggtgatcaagctttttcaacatacatagtggatggggggtatatatgtgaaacttaaattttttatgattatgcttttttatatgattacaactttatagaagagttggaatagtacagagaagtcccatgtatcctttacccaatttcaccaatcatttacattttggttgttttatttttccttctctctttctccaaatgtgtatgatttttttttcctgaacgatttgaaaccagttgtggacatgcttcctttatctataaatacttcagcatgcattttgcaagaacaaaaacattctttttcataactacagtacagtgatcaaaatcgggaagtttaacattgatacattagtattatttaatccaaagtccatattcaaatttggtcagtcatcccaataatgtctg

SEQ ID NO: 68394 - DNA, 612 bp, Homo sapiens
taagaatatgtatttataatcccagcactttgggaggccaacgcaggcggatcactcctgacctcatgtgatctgcctgcctcagcctcccaaagtactgggattacaggcatgagctaatttttttttttttttttaattaaaggaagacataggccaaggagccagacttcctgtgttaactccttcctctgccactttttaccttggggacctcagttaatatgatcctctgttgaagcaagaagacaaactgtatggtggagaaagaagtgggaaggatctgcgcggaagaagcctgagaagatgatgcacagatagagaggcaccaggacttgagaggcaccaggacttgggaggcatgttgatccatctccaggaaagactgagaaaaagagcgttgaatataagaaaaaatacttcctctgttctcagatcgtatttgttttaaggccacacctttttgaagttttcagtttgaaacacaacctggactgaaatcatgagggaggttgtgtaggaaagaatcatcaagggacttagttgggagcttctctaccacagctcatcagggacagcttcttctaagggatccactggaccctaggaaaa

SEQ ID NO: 68395 - DNA, 3360 bp, Homo sapiens
cgagtgcgcaagcgcagcgcaccgagtggacattttggtctttgtccgcgggtcagtacggcccctgggtccacgtggcgcgaaagtaggaggaagacataggccaaggagccagacttcctgtgttaactccttcctctgccactttttaccttggggacctcagttaatatgatcctctgttgaagcaagaagacaaactgtatggtggagaaagaagtgggaaggatctgcgcggaagaagcctgagaagatgatgcacagatagagaggcaccaggacttgagaggcaccaggacttgggaggcatgttgatccatctccaggaaagactgagaaaaagagcgttgaatataagaaaaaatacttcctctgttctcagatcgtatttgttttaaggccacacctttttgaagttttcagtttgaaacacaacctggactgaaatcatgagggaggttgtgtaggaaagaatcatcaagggacttagttgggagcttctctaccacagcttactccttatggtattaaccccctttaagtgtaaatgtctttggtttaaaacgtttgtacctcatctgttaccagagtgttcatactggagagaaaccctatgaatttactgaatgtgggggaactgttactcatatgttgcatttcgtcgaacgtgcaagtcatgctgaagagaaaccctgtgcttctaaggagtattgacaagcccttagctagatgacaatctcattgagaagcagaaaattcatgctggagagaaactagtgaaggtagcaatacttcattgaatattagaaaatttttctagagagaaagcattgaatatactgagtatgataacatttcctctcaaaccttatcccttactctgcatttgggagatcatacacagagaagccttataaatgtaagagatgtggaaatatcttcagccaaaagtaaatcctcactcatcaagaaatttttactggagagaaaccttgtgaatgtgggaaagcttccattcagatgtcacacctcagccagcagaaaatttacagtggggaaaacccctttgcctgtaaggtatgtggaaaagtcttcagccacaaatcaaacctcactgagcatgagcattttcacacgagagagaaaccttttgaatgtaacgagtgtggaaaagcctttagccaaaagcagtatgtcattaaacatcagaacacccatactggcgagaagcttttcgaatgtaatgaatgtggaaaatcatttagccagaaggaaaacctccttacgcaccagaaaattcacactggagaaaaaccttttgagtgtaaagattgcgggaaagctttcattcagaagtcaaacctcatcagacaccagagaactcacacaggagagaagccctttgtatgtaaggagtgtggaaaaaccttcagtggcaaatccaaccttactgagcatgagaaaatccatattggagagaagccttttaaatgtagtgaatgtggaacagcctttggccagaagaagtacctcataaaacatcagaacattcacactggagagaaaccctatgaatgtaacgaatgtggaaaagccttctctcagcgaacatcacttattgtacatgtgaggattcattcaggtgataaaccttacgaatgcaatgtttgtggaaaagccttctctcagagctcatctctcactgtgcatgtgagaagccatacaggggagaagccctatggttgtaatgaatgtgggaaagctttctctcagttctcaacccttgctctgcatttgagaatacacacaggtaagaagccttatcagtgcagtgaatgtgggaaagctttcagccagaagtcacaccacattagacaccagaaaattcatactcactaaaaaccccatgaaagccttgaaagtgggaaagctttcattagaaatttgcacctcatcatgccccagaaataatccttctgaagcaaagcaccacgaatgaggttaactttaacaagtactaaaaacttaagggacaccagaaaatttgtactgaagagaaagacatgcatatgattaaaaccctgtgtccaacagagaaacctgcagcagagataatggtgaaagtttaggcacattttcactaaaagtgggaacagaaaatggaggcctgttttttattgctaccaccatagatctggagatcttcgccagtaacaagaaaaattaagttgtaaatattggaaaggaacagacaaaaatagatgacatggtcatctacaactaatattaagactcctgtggtattgattgagcagagcagaagagatttcaaaaaaagacctatgcatttattagaatttggaatatgatacaagtggcatcaggaaatgaggaaataatggaactattttttttaagtggaggtagtttgttctccaagggggaaaaatagaccatgaactatacacaaaagtgaatccagagattaaaaacagaaatatggaaaagctatgtactaaaatgcatatgaccttgggaatagggaaacattccttggaacaatttgagaaatacttagcggttctacttatgagtatgaatgctcaggaaatacgcactaggatatttactgtggcttgatttgtagtagccaaaaattagaaacaactgagaaagcccatcacgaacaatatgggaaattcttatgtaatactatatatctgtaaaatgcaacaaatgaaatccacatgtattaacagaaagatcccagaattgttgaggggggatcaagttgcagaatgatacagatagtacaatgacttttttgtaaatttgaattaaaagtttcctcataaaactcagtactatctattggtaatggatgcatatatgtatgtacatgtttttgaaacggattggaaggatacagaccaaactcttgatagtggtcacctgtgaagagtggagaagggaaaataatgagtgtgggaggtgggatgggtattggttaaaggggacttcagctttttatataaacatccacttctctttcaaaagacttcaagtaaatataagaagatactgattgattctggattgtggtatagggatatcttgtcttattttttgtacttttctgtatttttaaaatttctcaaaataggaatgggagtgaggatgggaatgctgtatctgtggaagtcatgttatactggattcatttccaattaaatactaaacattttatagaaaatatttctaaaattttatcacggatgaatggatggacttgctctctatgtaatatgaaattaatctattttattaaaatttaaaaggacagcacaatccaaatctgtt

SEQ ID NO: 68396 - DNA, 3286 bp, Homo sapiens
cgagtgcgcaagcgcagcgcaccgagtggacattttggtctttgtccgcgggtcagtacggcccctgggtccacgtggcgcgaaagtaggagttaatatgatcctctgttgaagcaagaagacaaactgtatggtggagaaagaagtgggaaggatctgcgcggaagaagcctgagaagatgatgcacagatagagaggcaccaggacttgagaggcaccaggacttgggaggcatgttgatccatctccaggaaagactgagaaaaagagcgttgaatataagaaaaaatacttcctctgttctcagatcgtatttgttttaaggccacacctttttgaagttttcagtttgaaacacaacctggactgaaatcatgagggaggttgtgtaggaaagaatcatcaagggacttagttgggagcttctctaccacagcttactccttatggtattaaccccctttaagtgtaaatgtctttggtttaaaacgtttgtacctcatctgttaccagagtgttcatactggagagaaaccctatgaatttactgaatgtgggggaactgttactcatatgttgcatttcgtcgaacgtgcaagtcatgctgaagagaaaccctgtgcttctaaggagtattgacaagcccttagctagatgacaatctcattgagaagcagaaaattcatgctggagagaaactagtgaaggtagcaatacttcattgaatattagaaaatttttctagagagaaagcattgaatatactgagtatgataacatttcctctcaaaccttatcccttactctgcatttgggagatcatacacagagaagccttataaatgtaagagatgtggaaatatcttcagccaaaagtaaatcctcactcatcaagaaatttttactggagagaaaccttgtgaatgtgggaaagcttccattcagatgtcacacctcagccagcagaaaatttacagtggggaaaacccctttgcctgtaaggtatgtggaaaagtcttcagccacaaatcaaacctcactgagcatgagcattttcacacgagagagaaaccttttgaatgtaacgagtgtggaaaagcctttagccaaaagcagtatgtcattaaacatcagaacacccatactggcgagaagcttttcgaatgtaatgaatgtggaaaatcatttagccagaaggaaaacctccttacgcaccagaaaattcacactggagaaaaaccttttgagtgtaaagattgcgggaaagctttcattcagaagtcaaacctcatcagacaccagagaactcacacaggagagaagccctttgtatgtaaggagtgtggaaaaaccttcagtggcaaatccaaccttactgagcatgagaaaatccatattggagagaagccttttaaatgtagtgaatgtggaacagcctttggccagaagaagtacctcataaaacatcagaacattcacactggagagaaaccctatgaatgtaacgaatgtggaaaagccttctctcagcgaacatcacttattgtacatgtgaggattcattcaggtgataaaccttacgaatgcaatgtttgtggaaaagccttctctcagagctcatctctcactgtgcatgtgagaagccatacaggggagaagccctatggttgtaatgaatgtgggaaagctttctctcagttctcaacccttgctctgcatttgagaatacacacaggtaagaagccttatcagtgcagtgaatgtgggaaagctttcagccagaagtcacaccacattagacaccagaaaattcatactcactaaaaaccccatgaaagccttgaaagtgggaaagctttcattagaaatttgcacctcatcatgccccagaaataatccttctgaagcaaagcaccacgaatgaggttaactttaacaagtactaaaaacttaagggacaccagaaaatttgtactgaagagaaagacatgcatatgattaaaaccctgtgtccaacagagaaacctgcagcagagataatggtgaaagtttaggcacattttcactaaaagtgggaacagaaaatggaggcctgttttttattgctaccaccatagatctggagatcttcgccagtaacaagaaaaattaagttgtaaatattggaaaggaacagacaaaaatagatgacatggtcatctacaactaatattaagactcctgtggtattgattgagcagagcagaagagatttcaaaaaaagacctatgcatttattagaatttggaatatgatacaagtggcatcaggaaatgaggaaataatggaactattttttttaagtggaggtagtttgttctccaagggggaaaaatagaccatgaactatacacaaaagtgaatccagagattaaaaacagaaatatggaaaagctatgtactaaaatgcatatgaccttgggaatagggaaacattccttggaacaatttgagaaatacttagcggttctacttatgagtatgaatgctcaggaaatacgcactaggatatttactgtggcttgatttgtagtagccaaaaattagaaacaactgagaaagcccatcacgaacaatatgggaaattcttatgtaatactatatatctgtaaaatgcaacaaatgaaatccacatgtattaacagaaagatcccagaattgttgaggggggatcaagttgcagaatgatacagatagtacaatgacttttttgtaaatttgaattaaaagtttcctcataaaactcagtactatctattggtaatggatgcatatatgtatgtacatgtttttgaaacggattggaaggatacagaccaaactcttgatagtggtcacctgtgaagagtggagaagggaaaataatgagtgtgggaggtgggatgggtattggttaaaggggacttcagctttttatataaacatccacttctctttcaaaagacttcaagtaaatataagaagatactgattgattctggattgtggtatagggatatcttgtcttattttttgtacttttctgtatttttaaaatttctcaaaataggaatgggagtgaggatgggaatgctgtatctgtggaagtcatgttatactggattcatttccaattaaatactaaacattttatagaaaatatttctaaaattttatcacggatgaatggatggacttgctctctatgtaatatgaaattaatctattttattaaaatttaaaaggacagcacaatccaaatctgtt

SEQ ID NO: 68397 - DNA, 3406 bp, Homo sapiens
cgagtgcgcaagcgcagcgcaccgagtggacattttggtctttgtccgcgggtcagtacggcccctgggtccacgtggcgcgaaagtaggagagatggggtcttgccatgttgcctaggctggtcttgaacttctgagctcaagtgatcctgcccacctcagcttcccaaagtgctgggattagtggcatgagccactgcgtccagcccacgttaatatgatcctctgttgaagcaagaagacaaactgtatggtggagaaagaagtgggaaggatctgcgcggaagaagcctgagaagatgatgcacagatagagaggcaccaggacttgagaggcaccaggacttgggaggcatgttgatccatctccaggaaagactgagaaaaagagcgttgaatataagaaaaaatacttcctctgttctcagatcgtatttgttttaaggccacacctttttgaagttttcagtttgaaacacaacctggactgaaatcatgagggaggttgtgtaggaaagaatcatcaagggacttagttgggagcttctctaccacagcttactccttatggtattaaccccctttaagtgtaaatgtctttggtttaaaacgtttgtacctcatctgttaccagagtgttcatactggagagaaaccctatgaatttactgaatgtgggggaactgttactcatatgttgcatttcgtcgaacgtgcaagtcatgctgaagagaaaccctgtgcttctaaggagtattgacaagcccttagctagatgacaatctcattgagaagcagaaaattcatgctggagagaaactagtgaaggtagcaatacttcattgaatattagaaaatttttctagagagaaagcattgaatatactgagtatgataacatttcctctcaaaccttatcccttactctgcatttgggagatcatacacagagaagccttataaatgtaagagatgtggaaatatcttcagccaaaagtaaatcctcactcatcaagaaatttttactggagagaaaccttgtgaatgtgggaaagcttccattcagatgtcacacctcagccagcagaaaatttacagtggggaaaacccctttgcctgtaaggtatgtggaaaagtcttcagccacaaatcaaacctcactgagcatgagcattttcacacgagagagaaaccttttgaatgtaacgagtgtggaaaagcctttagccaaaagcagtatgtcattaaacatcagaacacccatactggcgagaagcttttcgaatgtaatgaatgtggaaaatcatttagccagaaggaaaacctccttacgcaccagaaaattcacactggagaaaaaccttttgagtgtaaagattgcgggaaagctttcattcagaagtcaaacctcatcagacaccagagaactcacacaggagagaagccctttgtatgtaaggagtgtggaaaaaccttcagtggcaaatccaaccttactgagcatgagaaaatccatattggagagaagccttttaaatgtagtgaatgtggaacagcctttggccagaagaagtacctcataaaacatcagaacattcacactggagagaaaccctatgaatgtaacgaatgtggaaaagccttctctcagcgaacatcacttattgtacatgtgaggattcattcaggtgataaaccttacgaatgcaatgtttgtggaaaagccttctctcagagctcatctctcactgtgcatgtgagaagccatacaggggagaagccctatggttgtaatgaatgtgggaaagctttctctcagttctcaacccttgctctgcatttgagaatacacacaggtaagaagccttatcagtgcagtgaatgtgggaaagctttcagccagaagtcacaccacattagacaccagaaaattcatactcactaaaaaccccatgaaagccttgaaagtgggaaagctttcattagaaatttgcacctcatcatgccccagaaataatccttctgaagcaaagcaccacgaatgaggttaactttaacaagtactaaaaacttaagggacaccagaaaatttgtactgaagagaaagacatgcatatgattaaaaccctgtgtccaacagagaaacctgcagcagagataatggtgaaagtttaggcacattttcactaaaagtgggaacagaaaatggaggcctgttttttattgctaccaccatagatctggagatcttcgccagtaacaagaaaaattaagttgtaaatattggaaaggaacagacaaaaatagatgacatggtcatctacaactaatattaagactcctgtggtattgattgagcagagcagaagagatttcaaaaaaagacctatgcatttattagaatttggaatatgatacaagtggcatcaggaaatgaggaaataatggaactattttttttaagtggaggtagtttgttctccaagggggaaaaatagaccatgaactatacacaaaagtgaatccagagattaaaaacagaaatatggaaaagctatgtactaaaatgcatatgaccttgggaatagggaaacattccttggaacaatttgagaaatacttagcggttctacttatgagtatgaatgctcaggaaatacgcactaggatatttactgtggcttgatttgtagtagccaaaaattagaaacaactgagaaagcccatcacgaacaatatgggaaattcttatgtaatactatatatctgtaaaatgcaacaaatgaaatccacatgtattaacagaaagatcccagaattgttgaggggggatcaagttgcagaatgatacagatagtacaatgacttttttgtaaatttgaattaaaagtttcctcataaaactcagtactatctattggtaatggatgcatatatgtatgtacatgtttttgaaacggattggaaggatacagaccaaactcttgatagtggtcacctgtgaagagtggagaagggaaaataatgagtgtgggaggtgggatgggtattggttaaaggggacttcagctttttatataaacatccacttctctttcaaaagacttcaagtaaatataagaagatactgattgattctggattgtggtatagggatatcttgtcttattttttgtacttttctgtatttttaaaatttctcaaaataggaatgggagtgaggatgggaatgctgtatctgtggaagtcatgttatactggattcatttccaattaaatactaaacattttatagaaaatatttctaaaattttatcacggatgaatggatggacttgctctctatgtaatatgaaattaatctattttattaaaatttaaaaggacagcacaatccaaatctgtt

SEQ ID NO: 68398 - DNA, 2854 bp, Homo sapiens
cgagtgcgcaagcgcagcgcaccgagtggacattttggtctttgtccgcgggtcagtacggcccctgggtccacgtggcgcgaaagtaggaggaagacataggccaaggagccagacttcctgtgttaactccttcctctgccactttttaccttggggacctcagttaatatgatcctctgttgaagcaagaagacaaactgtatggtggagaaagaagtgggaaggatctgcgcggaagaagcctgagaagatgatgcacagatagagaggcaccaggacttgagaggcaccaggacttgggaggcatgttgatccatctccaggaaagactgagaaaaagagcgttgaatataagaaaaaatacttcctctgttctcagatcgtatttgttttaaggccacacctttttgaagttttcagtttgaaacacaacctggactgaaatcatgagggaggttgtgtaggaaagaatcatcaagggacttagttgggagcttctctaccacagcttactccttatggtattaaccccctttaagtgtaaatgtctttggtttaaaacgtttgtacctcatctgttaccagagtgttcatactggagagaaaccctatgaatttactgaatgtgggggaactgttactcatatgttgcatttcgtcgaacgtgcaagtcatgctgaagagaaaccctgtgcttctaaggagtattgacaagcccttagctagatgacaatctcattgagaagcagaaaattcatgctggagagaaactagtgaaggtagcaatacttcattgaatattagaaaatttttctagagagaaagcattgaatatactgagtatgataacatttcctctcaaaccttatcccttactctgcatttgggagatcatacacagagaagccttataaatgtaagagatgtggaaatatcttcagccaaaagtaaatcctcactcatcaagaaatttttactggagagaaaccttgtgaatgtgggaaagcttccattcagatgtcacacctcagccagcagaaaatttacagtggggaaaacccctttgcctgtaaggtatgtggaaaagtcttcagccacaaatcaaacctcactgagcatgagcattttcacacgagagagaaaccttttgaatgtaacgagtgtggaaaagcctttagccaaaagcagtatgtcattaaacatcagaacacccatactggcgagaagcttttcgaatgtaatgaatgtggaaaatcatttagccagaaggaaaacctccttacgcaccagaaaattcacactggagaaaaaccttttgagtgtaaagattgcgggaaagctttcattcagaagtcaaacctcatcagacaccagagaactcacacaggagagaagccctttgtatgtaaggagtgtggaaaaaccttcagtggcaaatccaaccttactgagcatgagaaaatccatattggagagaagccttttaaatgtagtgaatgtggaacagcctttggccagaagaagtacctcataaaacatcagaacattcacactggagagaaaccctatgaatgtaacgaatgtggaaaagccttctctcagcgaacatcacttattgtacatgtgaggattcattcaggtgataaaccttacgaatgcaatgtttgtggaaaagccttctctcagagctcatctctcactgtgcatgtgagaagccatacaggggagaagccctatggttgtaatgaatgtgggaaagctttctctcagttctcaacccttgctctgcatttgagaatacacacaggtaagaagccttatcagtgcagtgaatgtgggaaagctttcagccagaagtcacaccacattagacaccagaaaattcatactcactaaaaaccccatgaaagccttgaaagtgggaaagctttcattagaaatttgcacctcatcatgccccagaaataatccttctgaagcaaagcaccacgaatgaggttaactttaacaagtactaaaaacttaagggacaccagaaaatttgtactgaagagaaagacatgcatatgattaaaaccctgtgtccaacagagaaacctgcagcagagataatggtgaaagtttaggcacattttcactaaaagtgggaacagaaaatggaggcctgttttttattgctaccaccatagatctggagatcttcgccagtaacaagaaaaattaagttgtaaatattggaaaggaacagacaaaaatagatgacatggtcatctacaactaatattaagactcctgtggtattgattgagcagagcagaagagatttcaaaaaaagacctatgcatttattagaatttggaatatgatacaagtggcatcaggaaatgaggaaataatggaactattttttttaagtggaggtagtttgttctccaagggggaaaaatagaccatgaactatacacaaaagtgaatccagagattaaaaacagaaatatggaaaagctatgtactaaaatgcatatgaccttgggaatagggaaacattccttggaacaatttgagaaatacttagcggttctacttatgagtatgaatgctcaggaaatacgcactaggatatttactgtggcttgatttgtagtagccaaaaattagaaacaactgagaaagcccatcacgaacaatatgggaaattcttatgtaatactatatatctgtaaaatgcaacaaatgaaatccacatgtattaacagaaagatcccagaattgttgaggggggatcaagttgcagaatgatacagatagtacaatgacttttttgtaaatttgaattaaaagtttcctcata

SEQ ID NO: 68399 - DNA, 3890 bp, Homo sapiens
actcgggtttctgtgtaaacttggccgcggttgccgcaggaaggctagccagagggtaattacacagcattttgaaagcgaagcagaagccgtagaatcagcggcgagcctgttgaaagaacccacaggtgcatttcacagcactctgggcgaaaattggatgtgaaaatgaagccagaccgagatactctggatgaatattttgaatatgatgcagaggagttcttggtctctttggccttgctgataacagaaggacgaacacctgaatgttctgtaaaaggtcgaacagaaagctttcattgccctccagcacagtcttgttacccagtaactaccaaacatgaatgtagtgacaagctggcccagtgccgccaagccagacgaactaggtctgaggtcacattgttgtggaagaataaccttccaatcatggtggaaatgatgctactaccagactgctgctacagcgatgatgggcccaccacagagggaattgatctaaatgatcctgcgattaagcaagatgcattattattagaaagatggatcttggagccagttcctcgacagaatggtgaccgatttattgaagagaagacgcttctgttggctgtccgctcatttgtgtttttttctcagttaagtgcatggctgagtgtttctcatggtgctattccacgaaatattctctacagaatcagtgctgctgatgtagacctacagtggaatttttcacagactccaattgagcatgtgtttcctgttcccaatgtttctcacaatgttgccttgaaagtcagtgttcagtccttgcccagacaatctaattatccagttttgacgtgcagtattcacactaatattggcctttatgagaaaagaattcaacaacataaacttaaaactcatcagcaccataacccaaatgaagcagaacaatgtggtacaaacagttcacagcgtctgtgtagcaaacaaacttggaccatggcacctgaaagtgtgttacatgcaaaaagtggcccaagtccagaatatactgcagctgtcaaaaatatcaaactatatccaggcactggcagtaaatctgaccatgggacatctcaagccaatattctaggctttagtggtataggtgatataaaatcacaagaaacatcagtgagaactttaaaatcattttcaatggttgattccagtatctctaaccgccagagtttctggcagtcagctggtgagactaaccctttaataggctctttaattcaggagcggcaagaaatcattgcaagaattgctcaacatttgattcattgtgatccaagcacttcacatgtttctggacgtccatttaatactcaagagtctagttcactccattcaaaacttttccgggtttcacaagaaaatgagaacgtgggaaaaggtaaagaagctttctccatgacttttggtagtccagagtttagttccccagaagacaccaatgaggggaaaattcgactaaaaccagaaactcctcgaagtgaaacttgtatttctaatgacttttattctcatatgcctgttggagagactaatcctttgataggctctttactccaggagcggcaagatgttattgcaaggattgctcagcacttggagcacattgatccaacagcatcacatatcccccggcagtcattcaacatgcatgactccagttcggttgcatctaaagtgtttaggagttcatatgaagacaaaaatttgttgaagaaaaataaggatgagtcctcagtttccatttctcacacaaaatgttccttgttaggagacatcagtgatgggaaaaacttaatacctaataaatgttttacttcttttaaaaataatagtaaagaaaagtgttctttgaaacatcaaacaagaaatcagtgtcagaacaatcctagtgaaatcatccaaagtacgtatcaggagacacagaacaaaagttctagtttatcaacttcctcaattttgtctcagcacaaagaaaataacttagatttgacaagcagattcaaggagcaagaaatgagcaatggaattgataaacagtattcaaattgcaccactattgacaaacagatttgtacaaataagtataaggaaaaaataataaatgagaactataatccaaaattctttggcaatcttcagtctgatgattccaaaaaaaatgactcaaaaataaaagttactgtgttggaaatgtctgaatatttgaacaaatatgaaagcatgtcctcaaataaagactcaaaaaggcctaagacatgtgagcaaaatactcaacttaatagcatagagaattatctcaataaagataatgaaggtttcaaatgtaaaaagtcagaccaattaaaaaatgaacaagataagcaagaagatccaactaatgaaaaatcccaaaactattctcagagaagaagtataaaagactgtttgtctacatgtgagcaaccaaaaaatacagaggtattgaggactacactgaaacattcaaatgtgtggcgaaaacataattttcattccttggatggaacttcaaccagagcctttcatcctcaaactggattgcctcttctttcaagccctgttcctcaaagaaaaacacaatcaggttgctttgatctggattcttcattactacatctgaaaagcttctcatctagaagtcctcgaccatgtttaaacattgaagatgatccagatattcatgaaaaaccatttttgagttctagtgctccacctataacaagtcttagtctcctaggaaattttgaggaatctgtcttgaactatcgtttcgatcctctcggcattgttgatggttttactgccgaggtaggggcaagtggtgctttctgccccacacatttgactcttccagttgaagtgtcattctacagtgtttcagatgacaatgctccctctccttatatgggtgtgattactttagagtcccttggtaaaaggggttatcgagtacctccttcaggaacaatacaagtgaccttatttaatcctaataagactgtggtgaagatgtttgttgtgatatatgatttacgagatatgccagccaatcatcagacattcctacgacaaagaactttttctgtacctgttaaacaagaagtgaagagaagtgttaataaagagaacatccgacacacagaagaacggttattacgctacctcatacatctgaggttccagagttctaaatctggaaagatctacctccatagagacgtacggctcctgttctctagaaagtcaatggaggttgatagcggtgctgcatatgaactcaaatcttacactgaatcaccaacaaaccctcagttttcaccaagatgttgataaggagtgatgatttaaagtatttactcagtacccaagtttgcaagtaaaaattagcatagaatggagtgtaccaaattaacaatcaggagagtggattctctcctgttatcctggaccagtttttatgaaaggattcctgaaatgaaatccatatattccatgtagactggaaaaactcatgtcctaatcctttttgtactgttgaaaccacttcattggacatgttgcaatagcaaaacccccagttagattagtgtttacacattttctcagttatttaatatttaatgttttccttaatactcaagtgatgtttgtctctagtgttctaatgtagcacaaatcctatgtaaaatcatactatgtatttttgacattaatgttgaaatcaaatatatgcacaagtctttaattttgtgtaatgtgttaagtgctgttcatttaagttattgaaaatgagaataaaatgttgagcttctttaaaagta

SEQ ID NO: 68400 - DNA, 4032 bp, Homo sapiens
actcgggtttctgtgtaaacttggccgcggttgccgcaggaaggctagccagagggtaattacacaggtgaggcccggcggggcgggcggagggctcgggaggcgcaggggactggaagagttggctgcgcccaggcaccaggtggaagaatttccataccagccctgcggaggtgcctctgtttccagaggcgtttttgtacgaagggcattttgaaagcgaagcagaagccgtagaatcagcggcgagcctgttgaaagaacccacaggtgcatttcacagcactctgggcgaaaattggatgtgaaaatgaagccagaccgagatactctggatgaatattttgaatatgatgcagaggagttcttggtctctttggccttgctgataacagaaggacgaacacctgaatgttctgtaaaaggtcgaacagaaagctttcattgccctccagcacagtcttgttacccagtaactaccaaacatgaatgtagtgacaagctggcccagtgccgccaagccagacgaactaggtctgaggtcacattgttgtggaagaataaccttccaatcatggtggaaatgatgctactaccagactgctgctacagcgatgatgggcccaccacagagggaattgatctaaatgatcctgcgattaagcaagatgcattattattagaaagatggatcttggagccagttcctcgacagaatggtgaccgatttattgaagagaagacgcttctgttggctgtccgctcatttgtgtttttttctcagttaagtgcatggctgagtgtttctcatggtgctattccacgaaatattctctacagaatcagtgctgctgatgtagacctacagtggaatttttcacagactccaattgagcatgtgtttcctgttcccaatgtttctcacaatgttgccttgaaagtcagtgttcagtccttgcccagacaatctaattatccagttttgacgtgcagtattcacactaatattggcctttatgagaaaagaattcaacaacataaacttaaaactcatcagcaccataacccaaatgaagcagaacaatgtggtacaaacagttcacagcgtctgtgtagcaaacaaacttggaccatggcacctgaaagtgtgttacatgcaaaaagtggcccaagtccagaatatactgcagctgtcaaaaatatcaaactatatccaggcactggcagtaaatctgaccatgggacatctcaagccaatattctaggctttagtggtataggtgatataaaatcacaagaaacatcagtgagaactttaaaatcattttcaatggttgattccagtatctctaaccgccagagtttctggcagtcagctggtgagactaaccctttaataggctctttaattcaggagcggcaagaaatcattgcaagaattgctcaacatttgattcattgtgatccaagcacttcacatgtttctggacgtccatttaatactcaagagtctagttcactccattcaaaacttttccgggtttcacaagaaaatgagaacgtgggaaaaggtaaagaagctttctccatgacttttggtagtccagagtttagttccccagaagacaccaatgaggggaaaattcgactaaaaccagaaactcctcgaagtgaaacttgtatttctaatgacttttattctcatatgcctgttggagagactaatcctttgataggctctttactccaggagcggcaagatgttattgcaaggattgctcagcacttggagcacattgatccaacagcatcacatatcccccggcagtcattcaacatgcatgactccagttcggttgcatctaaagtgtttaggagttcatatgaagacaaaaatttgttgaagaaaaataaggatgagtcctcagtttccatttctcacacaaaatgttccttgttaggagacatcagtgatgggaaaaacttaatacctaataaatgttttacttcttttaaaaataatagtaaagaaaagtgttctttgaaacatcaaacaagaaatcagtgtcagaacaatcctagtgaaatcatccaaagtacgtatcaggagacacagaacaaaagttctagtttatcaacttcctcaattttgtctcagcacaaagaaaataacttagatttgacaagcagattcaaggagcaagaaatgagcaatggaattgataaacagtattcaaattgcaccactattgacaaacagatttgtacaaataagtataaggaaaaaataataaatgagaactataatccaaaattctttggcaatcttcagtctgatgattccaaaaaaaatgactcaaaaataaaagttactgtgttggaaatgtctgaatatttgaacaaatatgaaagcatgtcctcaaataaagactcaaaaaggcctaagacatgtgagcaaaatactcaacttaatagcatagagaattatctcaataaagataatgaaggtttcaaatgtaaaaagtcagaccaattaaaaaatgaacaagataagcaagaagatccaactaatgaaaaatcccaaaactattctcagagaagaagtataaaagactgtttgtctacatgtgagcaaccaaaaaatacagaggtattgaggactacactgaaacattcaaatgtgtggcgaaaacataattttcattccttggatggaacttcaaccagagcctttcatcctcaaactggattgcctcttctttcaagccctgttcctcaaagaaaaacacaatcaggttgctttgatctggattcttcattactacatctgaaaagcttctcatctagaagtcctcgaccatgtttaaacattgaagatgatccagatattcatgaaaaaccatttttgagttctagtgctccacctataacaagtcttagtctcctaggaaattttgaggaatctgtcttgaactatcgtttcgatcctctcggcattgttgatggttttactgccgaggtaggggcaagtggtgctttctgccccacacatttgactcttccagttgaagtgtcattctacagtgtttcagatgacaatgctccctctccttatatgggtgtgattactttagagtcccttggtaaaaggggttatcgagtacctccttcaggaacaatacaagtgaccttatttaatcctaataagactgtggtgaagatgtttgttgtgatatatgatttacgagatatgccagccaatcatcagacattcctacgacaaagaactttttctgtacctgttaaacaagaagtgaagagaagtgttaataaagagaacatccgacacacagaagaacggttattacgctacctcatacatctgaggttccagagttctaaatctggaaagatctacctccatagagacgtacggctcctgttctctagaaagtcaatggaggttgatagcggtgctgcatatgaactcaaatcttacactgaatcaccaacaaaccctcagttttcaccaagatgttgataaggagtgatgatttaaagtatttactcagtacccaagtttgcaagtaaaaattagcatagaatggagtgtaccaaattaacaatcaggagagtggattctctcctgttatcctggaccagtttttatgaaaggattcctgaaatgaaatccatatattccatgtagactggaaaaactcatgtcctaatcctttttgtactgttgaaaccacttcattggacatgttgcaatagcaaaacccccagttagattagtgtttacacattttctcagttatttaatatttaatgttttccttaatactcaagtgatgtttgtctctagtgttctaatgtagcacaaatcctatgtaaaatcatactatgtatttttgacattaatgttgaaatcaaatatatgcacaagtctttaattttgtgtaatgtgttaagtgctgttcatttaagttattgaaaatgagaataaaatgttgagcttctttaaaagta

SEQ ID NO: 68401 - DNA, 1794 bp, Homo sapiens
actgaagaattgactttatttttggccaaggcttactttcctacacttgtgactttttacatgcccgaagaccaataaattacttgcttcttcatttcccctctccctcaagatacatgggaagggtcctattaccttcctttatttcctttttagttaggaacttctttcttttattcctatatcttaatagtaattttgagtgctgtggccattgatgttatatattctttatagcgacatcaccaggaggaacagtaaaatgtttccttaggggtagaaacatagaatgtatctctattaattcaatatgaatgtttttccatagaaatagaattctgaaattttaataaattacatgagttattcttattttagtcttttatgtacatatgcatcagtttgtactcaatttgtcttcttttatttcaagggtgtgattactttagagtcccttggtaaaaggggttatcgagtacctccttcaggaacaatacaagtggtatgtgttttatagcctacaattgcaataatcattctctcacatacatatagaacttagccctttctcctgctactgctgctgcaacaactttgaccttatttaatcctaataagactgtggtgaagatgtttgttgtgatatatgatttacgagatatgccagccaatcatcagacattcctacgacaaagaactttttctgtacctgttaaacaagaagtgaagagaagtgttaataaagagaacatccgacacacagaagaacggttattacgctacctcatacatctgaggttccagagttctaaatctggaaagatctacctccatagagacgtacggctcctgttctctagaaagtcaatggaggttgatagcggtgctgcatatgaactcaaatcttacactgaatcaccaacaaaccctcagttttcaccaagatgttgataaggagtgatgatttaaagtatttactcagtacccaagtttgcaagtaaaaattagcatagaatggagtgtaccaaattaacaatcaggagagtggattctctcctgttatcctggaccagtttttatgaaaggattcctgaaatgaaatccatatattccatgtagactggaaaaactcatgtcctaatcctttttgtactgttgaaaccacttcattggacatgttgcaatagcaaaacccccagttagattagtgtttacacattttctcagttatttaatatttaatgttttccttaatactcaagtgatgtttgtctctagtgttctaatgtagcacaaatcctatgtaaaatcatactatgtatttttgacattaatgttgaaatcaaatatatgcacaagtctttaattttgtgtaatgtgttaagtgctgttcatttaagttattgaaaatgagaataaaatgttgagcttctttaaaagtaacacactatgcaagcatgtgtactttttatatctctcatgtttagtttttataacaccatatccaggttgctatctcacatagtagtcctttaacatattgtattagcagtgcaatgtggactaagctgcttcactttccctttgcaagttcagatcatcatgcccattcatagccaggattccttatccccaaaacagttctatttttccttaatcactactatagagtctttacattaaattactgtcgtatgctagataattttctcaaattgttaaaagaatatgtactttggaaacaaattagtatttatattgtaaatatattcaaaaaaaactaaaaaaaatgta

SEQ ID NO: 68402 - DNA, 1472 bp, Homo sapiens
gctgattatagcagttttttatcatctaccccaaatcatgggaggctaagctgtgtgaaatgggtcagtctatggtagctagaaagatgccagtggctacatgagcccaaatgtaatgttattgagtaatgtgagtgaactgccacgtgaacctgcagatgaggaaaggtgcatgtactgtggagtcagggaggaaaagtaagatttatttgacactcagatttacaggaagaagcatctcaggcactgagggaaggaaaaggagtatgagttatttagggaatggtaagagagcagcatttaaataaaagcatatgctttggtctttagaaagatcttaaatatcatgttaaagagttagtgttgacctaatattgtagcaagatttgttcttcctactttcaaattttaattattctagtttcttttaaagactcgttctctgaaatgttttatattttgtttatttgtttaggttccagagttctaaatctggaaagatctacctccatagagacgtacggctcctgttctctagaaagtcaatggaggttgatagcggtgctgcatatgaactcaaatcttacactgaatcaccaacaaaccctcagttttcaccaagatgttgataaggagtgatgatttaaagtatttactcagtacccaagtttgcaagtaaaaattagcatagaatggagtgtaccaaattaacaatcaggagagtggattctctcctgttatcctggaccagtttttatgaaaggattcctgaaatgaaatccatatattccatgtagactggaaaaactcatgtcctaatcctttttgtactgttgaaaccacttcattggacatgttgcaatagcaaaacccccagttagattagtgtttacacattttctcagttatttaatatttaatgttttccttaatactcaagtgatgtttgtctctagtgttctaatgtagcacaaatcctatgtaaaatcatactatgtatttttgacattaatgttgaaatcaaatatatgcacaagtctttaattttgtgtaatgtgttaagtgctgttcatttaagttattgaaaatgagaataaaatgttgagcttctttaaaagtaacacactatgcaagcatgtgtactttttatatctctcatgtttagtttttataacaccatatccaggttgctatctcacatagtagtcctttaacatattgtattagcagtgcaatgtggactaagctgcttcactttccctttgcaagttcagatcatcatgcccattcatagccaggattccttatccccaaaacagttctatttttccttaatcactactatagagtctttacattaaattactgtcgtatgctagataattttctcaaattgttaaaagaatatgtactttggaaacaaattagtatttatattgtaaatatattcaaaaaaaactaaaaaaaatgta

SEQ ID NO: 68403 - DNA, 689 bp, Homo sapiens
ctgaagtgggggttttgctattgcaacatgtccaatgaagtggtttcaacagtacaaaaaggattaggacatgttgcaatagcaaaacccccagttagattagtgtttacacattttctcagttatttaatatttaatgttttccttaatactcaagtgatgtttgtctctagtgttctaatgtagcacaaatcctatgtaaaatcatactatgtatttttgacattaatgttgaaatcaaatatatgcacaagtctttaattttgtgtaatgtgttaagtgctgttcatttaagttattgaaaatgagaataaaatgttgagcttctttaaaagtaacacactatgcaagcatgtgtactttttatatctctcatgtttagtttttataacaccatatccaggttgctatctcacatagtagtcctttaacatattgtattagcagtgcaatgtggactaagctgcttcactttccctttgcaagttcagatcatcatgcccattcatagccaggattccttatccccaaaacagttctatttttccttaatcactactatagagtctttacattaaattactgtcgtatgctagataattttctcaaattgttaaaagaatatgtactttggaaacaaattagtatttatattgtaaatatattcaaaaaaaactaaaaaaaatgta

SEQ ID NO: 68404 - DNA, 3153 bp, Homo sapiens
  misc_feature (3129)..(3129): n is a, c, g, or t
  misc_feature (3141)..(3141): n is a, c, g, or t
actcgggtttctgtgtaaacttggccgcggttgccgcaggaaggctagccagagggtaattacacaggtgaggcccggcggggcgggcggagggctcgggaggcgcaggggactggaagagttggctgcgcccaggcaccaggtggaagaatttccataccagccctgcggaggtgcctctgtttccagaggcgtttttgtacgaagggcattttgaaagcgaagcagaagccgtagaatcagcggcgagcctgttgaaagaacccacaggtgcatttcacagcactctgggcgaaaattggatgtgaaaatgaagccagaccgagatactctggatgaatattttgaatatgatgcagaggagttcttggtctctttggccttgctgataacagaaggacgaacacctgaatgttctgtaaaaggtcgaacagaaagctttcattgccctccagcacagtcttgttacccagtaactaccaaacatgaatgtagtgacaagctggcccagtgccgccaagccagacgaactaggtctgaggtcacattgttgtggaagaataaccttccaatcatggtggaaatgatgctactaccagactgctgctacagcgatgatgggcccaccacagagggaattgatctaaatgatcctgcgattaagcaagatgcattattattagaaagatggatcttggagccagttcctcgacagaatggtgaccgatttattgaagagaagacgcttctgttggctgtccgctcatttgtgtttttttctcagttaagtgcatggctgagtgtttctcatggtgctattccacgaaatattctctacagaatcagtgctgctgatgtagacctacagtggaatttttcacagactccaattgagcatgtgtttcctgttcccaatgtttctcacaatgttgccttgaaagtcagtgttcagtccttgcccagacaatctaattatccagttttgacgtgcagtattcacactaatattggcctttatgagaaaagaattcaacaacataaacttaaaactcatcagcaccataacccaaatgaagcagaacaatgtggtacaaacagttcacagcgtctgtgtagcaaacaaacttggaccatggcacctgaaagtgtgttacatgcaaaaagtggcccaagtccagaatatactgcagctgtcaaaaatatcaaactatatccaggcactggcagtaaatctgaccatgggacatctcaagccaatattctaggctttagtggtataggtgatataaaatcacaagaaacatcagtgagaactttaaaatcattttcaatggttgattccagtatctctaaccgccagagtttctggcagtcagctggtgagactaaccctttaataggctctttaattcaggagcggcaagaaatcattgcaagaattgctcaacatttgattcattgtgatccaagcacttcacatgtttctggacgtccatttaatactcaagagtctagttcactccattcaaaacttttccgggtttcacaagaaaatgagaacgtgggaaaaggtaaagaagctttctccatgacttttggtagtccagagtttagttccccagaagacaccaatgaggggaaaattcgactaaaaccagaaactcctcgaagtgaaacttgtatttctaatgacttttattctcatatgcctgttggagagactaatcctttgataggctctttactccaggagcggcaagatgttattgcaaggattgctcagcacttggagcacattgatccaacagcatcacatatcccccggcagtcattcaacatgcatgactccagttcggttgcatctaaagtgtttaggagttcatatgaagacaaaaatttgttgaagaaaaataaggatgagtcctcagtttccatttctcacacaaaatgttccttgttaggagacatcagtgatgggaaaaacttaatacctaataaatgttttacttcttttaaaaataatagtaaagaaaagtgttctttgaaacatcaaacaagaaatcagtgtcagaacaatcctagtgaaatcatccaaagtacgtatcaggagacacagaacaaaagttctagtttatcaacttcctcaattttgtctcagcacaaagaaaataacttagatttgacaagcagattcaaggagcaagaaatgagcaatggaattgataaacagtattcaaattgcaccactattgacaaacagatttgtacaaataagtataaggaaaaaataataaatgagaactataatccaaaattctttggcaatcttcagtctgatgattccaaaaaaaatgactcaaaaataaaagttactgtgttggaaatgtctgaatatttgaacaaatatgaaagcatgtcctcaaataaagactcaaaaaggcctaagacatgtgagcaaaatactcaacttaatagcatagagaattatctcaataaagataatgaaggtttcaaatgtaaaaagtcagaccaattaaaaaatgaacaagataagcaagaagatccaactaatgaaaaatcccaaaactattctcagagaagaagtataaaagactgtttgtctacatgtgagcaaccaaaaaatacagaggtattgaggactacactgaaacattcaaatgtgtggcgaaaacataattttcattccttggatggaacttcaaccagagcctttcatcctcaaactggattgcctcttctttcaagccctgttcctcaaagaaaaacacaatcaggttgctttgatctggattcttcattactacatctgaaaagcttctcatctagaagtcctcgaccatgtttaaacattgaagatgatccagatattcatgaaaaaccatttttgagttctagtgctccacctataacaagtcttagtctcctaggaaattttgaggaatctgtcttgaactatcgtttcgatcctctcggcattgttgatggttttactgccgaggtaggggcaagtggtgctttctgccccacacatttgactcttccagttgaagtgtcattctacagtgtttcagatgacaatgctccctctccttatatgggggtggggantaactttaaaangtccccttgggg

SEQ ID NO: 68405 - DNA, 2933 bp, Homo sapiens
  misc_feature (2906)..(2906): n is a, c, g, or t
actcgggtttctgtgtaaacttggccgcggttgccgcaggaaggctagccagagggtaattacacaggtgaggcccggcggggcgggcggagggctcgggaggcgcaggggactggaagagttggctgcgcccaggcaccaggtggaagaatttccataccagccctgcggaggtgcctctgtttccagaggcgtttttgtacgaagggcattttgaaagcgaagcagaagccgtagaatcagcggcgagcctgttgaaagaacccacaggtgcatttcacagcactctgggcgaaaattggatgtgaaaatgaagccagaccgagatactctggatgaatattttgaatatgatgcagaggagttcttggtctctttggccttgctgataacagaaggacgaacacctgaatgttctgtaaaaggtcgaacagaaagctttcattgccctccagcacagtcttgttacccagtaactaccaaacatgaatgtagtgacaagctggcccagtgccgccaagccagacgaactaggtctgaggtcacattgttgtggaagaataaccttccaatcatggtggaaatgatgctactaccagactgctgctacagcgatgatgggcccaccacagagggaattgatctaaatgatcctgcgattaagcaagatgcattattattagaaagatggatcttggagccagttcctcgacagaatggtgaccgatttattgaagagaagacgcttctgttggctgtccgctcatttgtgtttttttctcagttaagtgcatggctgagtgtttctcatggtgctattccacgaaatattctctacagaatcagtgctgctgatgtagacctacagtggaatttttcacagactccaattgagcatgtgtttcctgttcccaatgtttctcacaatgttgccttgaaagtcagtgttcagtccttgcccagacaatctaattatccagttttgacgtgcagtattcacactaatattggcctttatgagaaaagaattcaacaacataaacttaaaactcatcagcaccataacccaaatgaagcagaacaatgtggtacaaacagttcacagcgtctgtgtagcaaacaaacttggaccatggcacctgaaagtgtgttacatgcaaaaagtggcccaagtccagaatatactgcagctgtcaaaaatatcaaactatatccaggcactggcagtaaatctgaccatgggacatctcaagccaatattctaggctttagtggtataggtgatataaaatcacaagaaacatcagtgagaactttaaaatcattttcaatggttgattccagtatctctaaccgccagagtttctggcagtcagctggtgagactaaccctttaataggctctttaattcaggagcggcaagaaatcattgcaagaattgctcaacatttgattcattgtgatccaagcacttcacatgtttctggacgtccatttaatactcaagagtctagttcactccattcaaaacttttccgggtttcacaagaaaatgagaacgtgggaaaaggtaaagaagctttctccatgacttttggtagtccagagtttagttccccagaagacaccaatgaggggaaaattcgactaaaaccagaaactcctcgaagtgaaacttgtatttctaatgacttttattctcatatgcctgttggagagactaatcctttgataggctctttactccaggagcggcaagatgttattgcaaggattgctcagcacttggagcacattgatccaacagcatcacatatcccccggcagtcattcaacatgcatgactccagttcggttgcatctaaagtgtttaggagttcatatgaagacaaaaatttgttgaagaaaaataaggatgagtcctcagtttccatttctcacacaaaatgttccttgttaggagacatcagtgatgggaaaaacttaatacctaataaatgttttacttcttttaaaaataatagtaaagaaaagtgttctttgaaacatcaaacaagaaatcagtgtcagaacaatcctagtgaaatcatccaaagtacgtatcaggagacacagaacaaaagttctagtttatcaacttcctcaattttgtctcagcacaaagaaaataacttagatttgacaagcagattcaaggagcaagaaatgagcaatggaattgataaacagtattcaaattgcaccactattgacaaacagatttgtacaaataagtataaggaaaaaataataaatgagaactataatccaaaattctttggcaatcttcagtctgatgattccaaaaaaaatgactcaaaaataaaagttactgtgttggaaatgtctgaatatttgaacaaatatgaaagcatgtcctcaaataaagactcaaaaaggcctaagacatgtgagcaaaatactcaacttaatagcatagagaattatctcaataaagataatgaaggtttcaaatgtaaaaagtcagaccaattaaaaaatgaacaagataagcaagaagatccaactaatgaaaaatcccaaaactattctcagagaagaagtataaaagactgtttgtctacatgtgagcaaccaaaaaatacagaggtattggtaagtaacatctaatatgtcaaatgtaagtctcaaatatttgttatggtttaaattttgttcacaggagatctggttataaaggcccaaggttccattatctataggacacacagtctgatagaataataaacctacagaactagtattaacatccttgcaaataacccactctcctaagaacaaatgctaagtaaatggaggaaataaagatcatgctgtttaaaaaataggaagtggtacggagggnatcctctagaatcagctatcaccatgg

SEQ ID NO: 68406 - DNA, 404 bp, Homo sapiens
ccattatctataggacacacagtctgatagaataataaacctacagaactagtattaacatccttgcaaataacccactctcctaagaacaaatgctaagtaaatggaggaaataaagatcatgctgtttaaaaaataggaagtggtacctttttaaaaaactgttaataggacagtaattgttttcatgacatgttaggtctattatttaggtcttttagctctgttctccccctgctcccccatcttaaaggcctctttttcttctagtcagaagcacccaggccaggcacaatggctcacagcctataattgcaacactttgggaggccaaggcagaaggatcacttgagctcaggagttggagactagcctgggcaacatagtgagactctgtctctaca

SEQ ID NO: 68407 - DNA, 4384 bp, Homo sapiens
actcgggtttctgtgtaaacttggccgcggttgccgcaggaaggctagccagagggtaattacacaggtgaggcccggcggggcgggcggagggctcgggaggcgcaggggactggaagagttggctgcgcccaggcaccaggtggaagaatttccataccagccctgcggaggtgcctctgtttccagaggcgtttttgtacgaagggcattttgaaagcgaagcagaagccgtagaatcagcggcgagcctgttgaaagaacccacaggtgcatttcacagcactctgggcgaaaattggatgtgaaaatgaagccagaccgagatactctggatgaatattttgaatatgatgcagaggagttcttggtctctttggccttgctgataacagaaggacgaacacctgaatgttctgtaaaaggtcgaacagaaagctttcattgccctccagcacagtcttgttacccagtaactaccaaacatgaatgtagtgacaagctggcccagtgccgccaagccagacgaactaggtctgaggtcacattgttgtggaagaataaccttccaatcatggtggaaatgatgctactaccagactgctgctacagcgatgatgggcccaccacagagggaattgatctaaatgatcctgcgattaagcaagatgcattattattagaaagatggatcttggagccagttcctcgacagaatggtgaccgatttattgaagagaagacgcttctgttggctgtccgctcatttgtgtttttttctcagttaagtgcatggctgagtgtttctcatggtgctattccacgaaatattctctacagaatcagtgctgctgatgtagacctacagtggaatttttcacagactccaattgagcatgtgtttcctgttcccaatgtttctcacaatgttgccttgaaagtcagtgttcagtccttgcccagacaatctaattatccagttttgacgtgcagtattcacactaatattggcctttatgagaaaagaattcaacaacataaacttaaaactcatcagcaccataacccaaatgaagcagaacaatgtggtacaaacagttcacagcgtctgtgtagcaaacaaacttggaccatggcacctgaaagtgtgttacatgcaaaaagtggcccaagtccagaatatactgcagctgtcaaaaatatcaaactatatccaggcactggcagtaaatctgaccatgggacatctcaagccaatattctaggctttagtggtataggtgatataaaatcacaagaaacatcagtgagaactttaaaatcattttcaatggttgattccagtatctctaaccgccagagtttctggcagtcagctggtgagactaaccctttaataggctctttaattcaggagcggcaagaaatcattgcaagaattgctcaacatttgattcattgtgatccaagcacttcacatgtttctggacgtccatttaatactcaagagtctagttcactccattcaaaacttttccgggtttcacaagaaaatgagaacgtgggaaaaggtaaagaagctttctccatgacttttggtagtccagagtttagttccccagaagacaccaatgaggggaaaattcgactaaaaccagaaactcctcgaagtgaaacttgtatttctaatgacttttattctcatatgcctgttggagagactaatcctttgataggctctttactccaggagcggcaagatgttattgcaaggattgctcagcacttggagcacattgatccaacagcatcacatatcccccggcagtcattcaacatgcatgactccagttcggttgcatctaaagtgtttaggagttcatatgaagacaaaaatttgttgaagaaaaataaggatgagtcctcagtttccatttctcacacaaaatgttccttgttaggagacatcagtgatgggaaaaacttaatacctaataaatgttttacttcttttaaaaataatagtaaagaaaagtgttctttgaaacatcaaacaagaaatcagtgtcagaacaatcctagtgaaatcatccaaagtacgtatcaggagacacagaacaaaagttctagtttatcaacttcctcaattttgtctcagcacaaagaaaataacttagatttgacaagcagattcaaggagcaagaaatgagcaatggaattgataaacagtattcaaattgcaccactattgacaaacagatttgtacaaataagtataaggaaaaaataataaatgagaactataatccaaaattctttggcaatcttcagtctgatgattccaaaaaaaatgactcaaaaataaaagttactgtgttggaaatgtctgaatatttgaacaaatatgaaagcatgtcctcaaataaagactcaaaaaggcctaagacatgtgagcaaaatactcaacttaatagcatagagaattatctcaataaagataatgaaggtttcaaatgtaaaaagtcagaccaattaaaaaatgaacaagataagcaagaagatccaactaatgaaaaatcccaaaactattctcagagaagaagtataaaagactgtttgtctacatgtgagcaaccaaaaaatacagaggtattgaggactacactgaaacattcaaatgtgtggcgaaaacataattttcattccttggatggaacttcaaccagagcctttcatcctcaaactggattgcctcttctttcaagccctgttcctcaaagaaaaacacaatcaggttgctttgatctggattcttcattactacatctgaaaagcttctcatctagaagtcctcgaccatgtttaaacattgaagatgatccagatattcatgaaaaaccatttttgagttctagtgctccacctataacaagtcttagtctcctaggaaattttgaggaatctgtcttgaactatcgtttcgatcctctcggcattgttgatggttttactgccgaggtaggggcaagtggtgctttctgccccacacatttgactcttccagttgaagtgtcattctacagtgtttcagatgacaatgctccctctccttatatgggtgtgattactttagagtcccttggtaaaaggggttatcgagtacctccttcaggaacaatacaagtgaccttatttaatcctaataagactgtggtgaagatgtttgttgtgatatatgatttacgagatatgccagccaatcatcagacattcctacgacaaagaactttttctgtacctgttaaacaagaagtgaagagaagtgttaataaagagaacatccgacacacagaagaacggttattacgctacctcatacatctgaggttccagagttctaaatctggaaagatctacctccatagagacgtacggctcctgttctctagaaagtcaatggaggttgatagcggtgctgcatatgaactcaaatcttacactgaatcaccaacaaaccctcagttttcaccaagatgttgataaggagtgatgatttaaagtatttactcagtacccaagtttgcaagtaaaaattagcatagaatggagtgtaccaaattaacaatcaggagagtggattctctcctgttatcctggaccagtttttatgaaaggattcctgaaatgaaatccatatattccatgtagactggaaaaactcatgtcctaatcctttttgtactgttgaaaccacttcattggacatgttgcaatagcaaaacccccagttagattagtgtttacacattttctcagttatttaatatttaatgttttccttaatactcaagtgatgtttgtctctagtgttctaatgtagcacaaatcctatgtaaaatcatactatgtatttttgacattaatgttgaaatcaaatatatgcacaagtctttaattttgtgtaatgtgttaagtgctgttcatttaagttattgaaaatgagaataaaatgttgagcttctttaaaagtaacacactatgcaagcatgtgtactttttatatctctcatgtttagtttttataacaccatatccaggttgctatctcacatagtagtcctttaacatattgtattagcagtgcaatgtggactaagctgcttcactttccctttgcaagttcagatcatcatgcccattcatagccaggattccttatccccaaaacagttctatttttccttaatcactactatagagtctttacattaaattactgtcgtatgctagataattttctcaaattgttaaaagaatatgtactttggaaacaaattagtatttatattgtaaatatattcaaaaaaaactaaaaaaaatgta

SEQ ID NO: 68408 - DNA, 4479 bp, Homo sapiens
actcgggtttctgtgtaaacttggccgcggttgccgcaggaaggctagccagagggtaattacacaggtgaggcccggcggggcgggcggagggctcgggaggcgcaggggactggaagagttggctgcgcccaggcaccaggtggaagaatttccataccagccctgcggaggtgcctctgtttccagaggcgtttttgtacgaagggcattttgaaagcgaagcagaagccgtagaatcagcggcgagcctgttgaaagaacccacaggtgcatttcacagcactctgggcgaaaattggatgtgaaaatgaagccagaccgagatactctggatgaatattttgaatatgatgcagaggagttcttggtctctttggccttgctgataacagaaggacgaacacctgaatgttctgtaaaaggtcgaacagaaagctttcattgccctccagcacagtcttgttacccagtaactaccaaacatgaatgtagtgacaagctggcccagtgccgccaagccagacgaactaggtctgaggtcacattgttgtggaagaataaccttccaatcatggtggaaatgatgctactaccagactgctgctacagcgatgatgggcccaccacagagggaattgatctaaatgatcctgcgattaagcaagatgcattattattagaaagatggatcttggagccagttcctcgacagaatggtgaccgatttattgaagagaagacgcttctgttggctgtccgctcatttgtgtttttttctcagttaagtgcatggctgagtgtttctcatggtgctattccacgaaatattctctacagaatcagtgctgctgatgtagacctacagtggaatttttcacagactccaattgagcatgtgtttcctgttcccaatgtttctcacaatgttgccttgaaagtcagtgttcagtccttgcccagacaatctaattatccagttttgacgtgcagtattcacactaatattggcctttatgagaaaagaattcaacaacataaacttaaaactcatcagcaccataacccaaatgaagcagaacaatgtggtacaaacagttcacagcgtctgtgtagcaaacaaacttggaccatggcacctgaaagtgtgttacatgcaaaaagtggcccaagtccagaatatactgcagctgtcaaaaatatcaaactatatccaggcactggcagtaaatctgaccatgggacatctcaagccaatattctaggctttagtggtataggtgatataaaatcacaagaaacatcagtgagaactttaaaatcattttcaatggttgattccagtatctctaaccgccagagtttctggcagtcagctggtgagactaaccctttaataggctctttaattcaggagcggcaagaaatcattgcaagaattgctcaacatttgattcattgtgatccaagcacttcacatgtttctggacgtccatttaatactcaagagtctagttcactccattcaaaacttttccgggtttcacaagaaaatgagaacgtgggaaaaggtaaagaagctttctccatgacttttggtagtccagagtttagttccccagaagacaccaatgaggggaaaattcgactaaaaccagaaactcctcgaagtgaaacttgtatttctaatgacttttattctcatatgcctgttggagagactaatcctttgataggctctttactccaggagcggcaagatgttattgcaaggattgctcagcacttggagcacattgatccaacagcatcacatatcccccggcagtcattcaacatgcatgactccagttcggttgcatctaaagtgtttaggagttcatatgaagacaaaaatttgttgaagaaaaataaggatgagtcctcagtttccatttctcacacaaaatgttccttgttaggagacatcagtgatgggaaaaacttaatacctaataaatgttttacttcttttaaaaataatagtaaagaaaagtgttctttgaaacatcaaacaagaaatcagtgtcagaacaatcctagtgaaatcatccaaagtacgtatcaggagacacagaacaaaagttctagtttatcaacttcctcaattttgtctcagcacaaagaaaataacttagatttgacaagcagattcaaggagcaagaaatgagcaatggaattgataaacagtattcaaattgcaccactattgacaaacagatttgtacaaataagtataaggaaaaaataataaatgagaactataatccaaaattctttggcaatcttcagtctgatgattccaaaaaaaatgactcaaaaataaaagttactgtgttggaaatgtctgaatatttgaacaaatatgaaagcatgtcctcaaataaagactcaaaaaggcctaagacatgtgagcaaaatactcaacttaatagcatagagaattatctcaataaagataatgaaggtttcaaatgtaaaaagtcagaccaattaaaaaatgaacaagataagcaagaagatccaactaatgaaaaatcccaaaactattctcagagaagaagtataaaagactgtttgtctacatgtgagcaaccaaaaaatacagaggtattgaggactacactgaaacattcaaatgtgtggcgaaaacataattttcattccttggatggaacttcaaccagagcctttcatcctcaaactggattgcctcttctttcaagccctgttcctcaaagaaaaacacaatcaggttgctttgatctggattcttcattactacatctgaaaagcttctcatctagaagtcctcgaccatgtttaaacattgaagatgatccagatattcatgaaaaaccatttttgagttctagtgctccacctataacaagtcttagtctcctaggaaattttgaggaatctgtcttgaactatcgtttcgatcctctcggcattgttgatggttttactgccgaggtaggggcaagtggtgctttctgccccacacatttgactcttccagttgaagtgtcattctacagtgtttcagatgacaatgctccctctccttatatgggtgtgattactttagagtcccttggtaaaaggggttatcgagtacctccttcaggaacaatacaagtggtatgtgttttatagcctacaattgcaataatcattctctcacatacatatagaacttagccctttctcctgctactgctgctgcaacaactttgaccttatttaatcctaataagactgtggtgaagatgtttgttgtgatatatgatttacgagatatgccagccaatcatcagacattcctacgacaaagaactttttctgtacctgttaaacaagaagtgaagagaagtgttaataaagagaacatccgacacacagaagaacggttattacgctacctcatacatctgaggttccagagttctaaatctggaaagatctacctccatagagacgtacggctcctgttctctagaaagtcaatggaggttgatagcggtgctgcatatgaactcaaatcttacactgaatcaccaacaaaccctcagttttcaccaagatgttgataaggagtgatgatttaaagtatttactcagtacccaagtttgcaagtaaaaattagcatagaatggagtgtaccaaattaacaatcaggagagtggattctctcctgttatcctggaccagtttttatgaaaggattcctgaaatgaaatccatatattccatgtagactggaaaaactcatgtcctaatcctttttgtactgttgaaaccacttcattggacatgttgcaatagcaaaacccccagttagattagtgtttacacattttctcagttatttaatatttaatgttttccttaatactcaagtgatgtttgtctctagtgttctaatgtagcacaaatcctatgtaaaatcatactatgtatttttgacattaatgttgaaatcaaatatatgcacaagtctttaattttgtgtaatgtgttaagtgctgttcatttaagttattgaaaatgagaataaaatgttgagcttctttaaaagtaacacactatgcaagcatgtgtactttttatatctctcatgtttagtttttataacaccatatccaggttgctatctcacatagtagtcctttaacatattgtattagcagtgcaatgtggactaagctgcttcactttccctttgcaagttcagatcatcatgcccattcatagccaggattccttatccccaaaacagttctatttttccttaatcactactatagagtctttacattaaattactgtcgtatgctagataattttctcaaattgttaaaagaatatgtactttggaaacaaattagtatttatattgtaaatatattcaaaaaaaactaaaaaaaatgta

SEQ ID NO: 68409 - DNA, 4275 bp, Homo sapiens
actcgggtttctgtgtaaacttggccgcggttgccgcaggaaggctagccagagggtaattacacaggtgaggcccggcggggcgggcggagggctcgggaggcgcaggggactggaagagttggctgcgcccaggcaccaggtggaagaatttccataccagccctgcggaggtgcctctgtttccagaggcgtttttgtacgaagggcattttgaaagcgaagcagaagccgtagaatcagcggcgagcctgttgaaagaacccacaggtgcatttcacagcactctgggcgaaaattggatgtgaaaatgaagccagaccgagatactctggatgaatattttgaatatgatgcagaggagttcttggtctctttggccttgctgataacagaaggacgaacacctgaatgttctgtaaaaggtcgaacagaaagctttcattgccctccagcacagtcttgttacccagtaactaccaaacatgaatgtagtgacaagctggcccagtgccgccaagccagacgaactaggtctgaggtcacattgttgtggaagaataaccttccaatcatggtggaaatgatgctactaccagactgctgctacagcgatgatgggcccaccacagagggaattgatctaaatgatcctgcgattaagcaagatgcattattattagaaagatggatcttggagccagttcctcgacagaatggtgaccgatttattgaagagaagacgcttctgttggctgtccgctcatttgtgtttttttctcagttaagtgcatggctgagtgtttctcatggtgctattccacgaaatattctctacagaatcagtgctgctgatgtagacctacagtggaatttttcacagactccaattgagcatgtgtttcctgttcccaatgtttctcacaatgttgccttgaaagtcagtgttcagtccttgcccagacaatctaattatccagttttgacgtgcagtattcacactaatattggcctttatgagaaaagaattcaacaacataaacttaaaactcatcagcaccataacccaaatgaagcagaacaatgtggtacaaacagttcacagcgtctgtgtagcaaacaaacttggaccatggcacctgaaagtgtgttacatgcaaaaagtggcccaagtccagaatatactgcagctgtcaaaaatatcaaactatatccaggcactggcagtaaatctgaccatgggacatctcaagccaatattctaggctttagtggtataggtgatataaaatcacaagaaacatcagtgagaactttaaaatcattttcaatggttgattccagtatctctaaccgccagagtttctggcagtcagctggtgagactaaccctttaataggctctttaattcaggagcggcaagaaatcattgcaagaattgctcaacatttgattcattgtgatccaagcacttcacatgtttctggacgtccatttaatactcaagagtctagttcactccattcaaaacttttccgggtttcacaagaaaatgagaacgtgggaaaaggtaaagaagctttctccatgacttttggtagtccagagtttagttccccagaagacaccaatgaggggaaaattcgactaaaaccagaaactcctcgaagtgaaacttgtatttctaatgacttttattctcatatgcctgttggagagactaatcctttgataggctctttactccaggagcggcaagatgttattgcaaggattgctcagcacttggagcacattgatccaacagcatcacatatcccccggcagtcattcaacatgcatgactccagttcggttgcatctaaagtgtttaggagttcatatgaagacaaaaatttgttgaagaaaaataaggatgagtcctcagtttccatttctcacacaaaatgttccttgttaggagacatcagtgatgggaaaaacttaatacctaataaatgttttacttcttttaaaaataatagtaaagaaaagtgttctttgaaacatcaaacaagaaatcagtgtcagaacaatcctagtgaaatcatccaaagtacgtatcaggagacacagaacaaaagttctagtttatcaacttcctcaattttgtctcagcacaaagaaaataacttagatttgacaagcagattcaaggagcaagaaatgagcaatggaattgataaacagtattcaaattgcaccactattgacaaacagatttgtacaaataagtataaggaaaaaataataaatgagaactataatccaaaattctttggcaatcttcagtctgatgattccaaaaaaaatgactcaaaaataaaagttactgtgttggaaatgtctgaatatttgaacaaatatgaaagcatgtcctcaaataaagactcaaaaaggcctaagacatgtgagcaaaatactcaacttaatagcatagagaattatctcaataaagataatgaaggtttcaaatgtaaaaagtcagaccaattaaaaaatgaacaagataagcaagaagatccaactaatgaaaaatcccaaaactattctcagagaagaagtataaaagactgtttgtctacatgtgagcaaccaaaaaatacagaggtattgaggactacactgaaacattcaaatgtgtggcgaaaacataattttcattccttggatggaacttcaaccagagcctttcatcctcaaactggattgcctcttctttcaagccctgttcctcaaagaaaaacacaatcaggttgctttgatctggattcttcattactacatctgaaaagcttctcatctagaaggaatctgtcttgaactatcgtttcgatcctctcggcattgttgatggttttactgccgaggtaggggcaagtggtgctttctgccccacacatttgactcttccagttgaagtgtcattctacagtgtttcagatgacaatgctccctctccttatatgggtgtgattactttagagtcccttggtaaaaggggttatcgagtacctccttcaggaacaatacaagtgaccttatttaatcctaataagactgtggtgaagatgtttgttgtgatatatgatttacgagatatgccagccaatcatcagacattcctacgacaaagaactttttctgtacctgttaaacaagaagtgaagagaagtgttaataaagagaacatccgacacacagaagaacggttattacgctacctcatacatctgaggttccagagttctaaatctggaaagatctacctccatagagacgtacggctcctgttctctagaaagtcaatggaggttgatagcggtgctgcatatgaactcaaatcttacactgaatcaccaacaaaccctcagttttcaccaagatgttgataaggagtgatgatttaaagtatttactcagtacccaagtttgcaagtaaaaattagcatagaatggagtgtaccaaattaacaatcaggagagtggattctctcctgttatcctggaccagtttttatgaaaggattcctgaaatgaaatccatatattccatgtagactggaaaaactcatgtcctaatcctttttgtactgttgaaaccacttcattggacatgttgcaatagcaaaacccccagttagattagtgtttacacattttctcagttatttaatatttaatgttttccttaatactcaagtgatgtttgtctctagtgttctaatgtagcacaaatcctatgtaaaatcatactatgtatttttgacattaatgttgaaatcaaatatatgcacaagtctttaattttgtgtaatgtgttaagtgctgttcatttaagttattgaaaatgagaataaaatgttgagcttctttaaaagtaacacactatgcaagcatgtgtactttttatatctctcatgtttagtttttataacaccatatccaggttgctatctcacatagtagtcctttaacatattgtattagcagtgcaatgtggactaagctgcttcactttccctttgcaagttcagatcatcatgcccattcatagccaggattccttatccccaaaacagttctatttttccttaatcactactatagagtctttacattaaattactgtcgtatgctagataattttctcaaattgttaaaagaatatgtactttggaaacaaattagtatttatattgtaaatatattcaaaaaaaactaaaaaaaatgta

SEQ ID NO: 68410 - DNA, 4422 bp, Homo sapiens
actcgggtttctgtgtaaacttggccgcggttgccgcaggaaggctagccagagggtaattacacaggtgaggcccggcggggcgggcggagggctcgggaggcgcaggggactggaagagttggctgcgcccaggcaccaggtggaagaatttccataccagccctgcggaggtgcctctgtttccagaggcgtttttgtacgaagggcattttgaaagcgaagcagaagccgtagaatcagcggcgagcctgttgaaagaacccacaggtgcatttcacagcactctgggcgaaaattggatgtgaaaatgaagccagaccgagatactctggatgaatattttgaatatgatgcagaggagttcttggtctctttggccttgctgataacagaaggacgaacacctgaatgttctgtaaaaggtcgaacagaaagctttcattgccctccagcacagtcttgttacccagtaactaccaaacatgaatgtagtgacaagctggcccagtgccgccaagccagacgaactaggtctgaggtcacattgttgtggaagaataaccttccaatcatggtggaaatgatgctactaccagactgctgctacagcgatgatgggcccaccacagagggaattgatctaaatgatcctgcgattaagcaagatgcattattattagaaagatggatcttggagccagttcctcgacagaatggtgaccgatttattgaagagaagacgcttctgttggctgtccgctcatttgtgtttttttctcagttaagtgcatggctgagtgtttctcatggtgctattccacgaaatattctctacagaatcagtgctgctgatgtagacctacagtggaatttttcacagactccaattgagcatgtgtttcctgttcccaatgtttctcacaatgttgccttgaaagtcagtgttcagtccttgcccagacaatctaattatccagttttgacgtgcagtattcacactaatattggcctttatgagaaaagaattcaacaacataaacttaaaactcatcagcaccataacccaaatgaagcagaacaatgtggtacaaacagttcacagcgtctgtgtagcaaacaaacttggaccatggcacctgaaagtgtgttacatgcaaaaagtggcccaagtccagaatatactgcagctgtcaaaaatatcaaactatatccaggcactggcagtaaatctgaccatgggacatctcaagccaatattctaggctttagtggtataggtgatataaaatcacaagaaacatcagtgagaactttaaaatcattttcaatggttgattccagtatctctaaccgccagagtttctggcagtcagctggtgagactaaccctttaataggctctttaattcaggagcggcaagaaatcattgcaagaattgctcaacatttgattcattgtgatccaagcacttcacatgtttctggacgtccatttaatactcaagagtctagttcactccattcaaaacttttccgggtttcacaagaaaatgagaacgtgggaaaaggtaaagaagctttctccatgacttttggtagtccagagtttagttccccagaagacaccaatgaggggaaaattcgactaaaaccagaaactcctcgaagtgaaacttgtatttctaatgacttttattctcatatgcctgttggagagactaatcctttgataggctctttactccaggagcggcaagatgttattgcaaggattgctcagcacttggagcacattgatccaacagcatcacatatcccccggcagtcattcaacatgcatgactccagttcggttgcatctaaagtgtttaggagttcatatgaagacaaaaatttgttgaagaaaaataaggatgagtcctcagtttccatttctcacacaaaatgttccttgttaggagacatcagtgatgggaaaaacttaatacctaataaatgttttacttcttttaaaaataatagtaaagaaaagtgttctttgaaacatcaaacaagaaatcagtgtcagaacaatcctagtgaaatcatccaaagtacgtatcaggagacacagaacaaaagttctagtttatcaacttcctcaattttgtctcagcacaaagaaaataacttagatttgacaagcagattcaaggagcaagaaatgagcaatggaattgataaacagtattcaaattgcaccactattgacaaacagatttgtacaaataagtataaggaaaaaataataaatgagaactataatccaaaattctttggcaatcttcagtctgatgattccaaaaaaaatgactcaaaaataaaagttactgtgttggaaatgtctgaatatttgaacaaatatgaaagcatgtcctcaaataaagactcaaaaaggcctaagacatgtgagcaaaatactcaacttaatagcatagagaattatctcaataaagataatgaaggtttcaaatgtaaaaagtcagaccaattaaaaaatgaacaagataagcaagaagatccaactaatgaaaaatcccaaaactattctcagagaagaagtataaaagactgtttgtctacatgtgagcaaccaaaaaatacagaggtattgaggactacactgaaacattcaaatgtgtggcgaaaacataattttcattccttggatggaacttcaaccagagcctttcatcctcaaactggattgcctcttctttcaagccctgttcctcaaagaaaaacacaatcaggttgctttgatctggattcttcattactacatctgaaaagcttctcatctagaagtcctcgaccatgtttaaacattgaagatgatccagatattcatgaaaaaccatttttgagttctagtgctccacctataacaagtcttagtctcctaggaaattttgaggaatctgtcttgaactatcgtttcgatcctctcggcattgttgatggttttactgccgaggtaggggcaagtggtgctttctgccccacacatttgactcttccagttgaagtgtcattctacagtgtttcagatgacaatgctccctctccttatatgggtgtgattactttagagtcccttggtaaaaggggttatcgagtacctccttcaggaacaatacaagtggtatgtgttttatagcctacaattgcaataatcattctctcacatacatatagaacttagccctttctcctgctactgctgctgcaacaactttgaccttatttaatcctaataagactgtggtgaagatgtttgttgtgatatatgatttacgagatatgccagccaatcatcagacattcctacgacaaagaactttttctgtacctgttaaacaagaagtgaagagaagtgttaataaagagaacatccgacacacagaagaacggttattacgctacctcatacatctgaggttccagagttctaaatctggaaagatctacctccatagagacgtacggctcctgttctctagaaagtcaatggaggttgatagcggtgctgcatatgaactcaaatcttacactgaatcaccaacaaaccctcagttttcaccaagatgttgataaggagtgatgatttaaagtatttactcagtacccaagtttgcaagtaaaaattagcatagaatggagtgtaccaaattaacaatcaggagagtggattctctcctgttatcctggaccagtttttatgaaaggattcctgaaatgaaatccatatattccatgtagactggaaaaactcatgtcctaatcctttttgtactgttgaaaccacttcattggacatgttgcaatagctttccttaatactcaagtgatgtttgtctctagtgttctaatgtagcacaaatcctatgtaaaatcatactatgtatttttgacattaatgttgaaatcaaatatatgcacaagtctttaattttgtgtaatgtgttaagtgctgttcatttaagttattgaaaatgagaataaaatgttgagcttctttaaaagtaacacactatgcaagcatgtgtactttttatatctctcatgtttagtttttataacaccatatccaggttgctatctcacatagtagtcctttaacatattgtattagcagtgcaatgtggactaagctgcttcactttccctttgcaagttcagatcatcatgcccattcatagccaggattccttatccccaaaacagttctatttttccttaatcactactatagagtctttacattaaattactgtcgtatgctagataattttctcaaattgttaaaagaatatgtactttggaaacaaattagtatttatattgtaaatatattcaaaaaaaactaaaaaaaatgta

SEQ ID NO: 68411 - DNA, 3279 bp, Homo sapiens
actcgggtttctgtgtaaacttggccgcggttgccgcaggaaggctagccagagggtaattacacaggtgaggcccggcggggcgggcggagggctcgggaggcgcaggggactggaagagttggctgcgcccaggcaccaggtggaagaatttccataccagccctgcggaggtgcctctgtttccagaggcgtttttgtacgaagggcattttgaaagcgaagcagaagccgtagaatcagcggcgagcctgttgaaagaacccacaggtgcatttcacagcactctgggcgaaaattggatgtgaaaatgaagccagaccgagatactctggatgaatattttgaatatgatgcagaggagttcttggtctctttggccttgctgataacagaaggacgaacacctgaatgttctgtaaaaggtcgaacagaaagctttcattgccctccagcacagtcttgttacccagtaactaccaaacatgaatgtagtgacaagctggcccagtgccgccaagccagacgaactaggtctgaggtcacattgttgtggaagaataaccttccaatcatggtggaaatgatgctactaccagactgctgctacagcgatgatgggcccaccacagagggaattgatctaaatgatcctgcgattaagcaagatgcattattattagaaagatggatcttggagccagttcctcgacagaatggtgaccgatttattgaagagaagacgcttctgttggctgtccgctcatttgtgtttttttctcagttaagtgcatggctgagtgtttctcatggtgctattccacgaaatattctctacagaatcagtgctgctgatgtagacctacagtggaatttttcacagactccaattgagcatgtgtttcctgttcccaatgtttctcacaatgttgccttgaaagtcagtgttcagtccttgcccagacaatctaattatccagttttgacgtgcagtattcacactaatattggcctttatgagaaaagaattcaacaacataaacttaaaactcatcagcaccataacccaaatgaagcagaacaatgtggtacaaacagttcacagcgtctgtgtagcaaacaaacttggaccatggcacctgaaagtgtgttacatgcaaaaagtggcccaagtccagaatatactgcagctgtcaaaaatatcaaactatatccaggcactggcagtaaatctgaccatgggacatctcaagccaatattctaggctttagtggtataggtgatataaaatcacaagaaacatcagtgagaactttaaaatcattttcaatggttgattccagtatctctaaccgccagagtttctggcagtcagctggtgagactaaccctttaataggctctttaattcaggagcggcaagaaatcattgcaagaattgctcaacatttgattcattgtgatccaagcacttcacatgtttctggacgtccatttaatactcaagagtctagttcactccattcaaaacttttccgggtttcacaagaaaatgagaacgtgggaaaaggtaaagaagctttctccatgacttttggtagtccagagtttagttccccagaagacaccaatgaggggaaaattcgactaaaaccagaaactcctcgaagtgaaacttgtatttctaatgacttttattctcatatgcctgttggagagactaatcctttgataggctctttactccaggagcggcaagatgttattgcaaggattgctcagcacttggagcacattgatccaacagcatcacatatcccccggcagtcattcaacatgcatgactccagttcggttgcatctaaagtgtttaggagttcatatgaagacaaaaatttgttgaagaaaaataaggatgagtcctcagtttccatttctcacacaaaatgttccttgttaggagacatcagtgatgggaaaaacttaatacctaataaatgttttacttcttttaaaaataatagtaaagaaaagtgttctttgaaacatcaaacaagaaatcagtgtcagaacaatcctagtgaaatcatccaaagtacgtatcaggagacacagaacaaaagttctagtttatcaacttcctcaattttgtctcagcacaaagaaaataacttagatttgacaagcagattcaaggagcaagaaatgagcaatggaattgataaacagtattcaaattgcaccactattgacaaacagatttgtacaaataagtataaggaaaaaataataaatgagaactataatccaaaattctttggcaatcttcagtctgatgattccaaaaaaaatgactcaaaaataaaagttactgtgttggaaatgtctgaatatttgaacaaatatgaaagcatgtcctcaaataaagactcaaaaaggcctaagacatgtgagcaaaatactcaacttaatagcatagagaattatctcaataaagataatgaaggtttcaaatgtaaaaagtcagaccaattaaaaaatgaacaagataagcaagaagatccaactaatgaaaaatcccaaaactattctcagagaagaagtataaaagactgtttgtctacatgtgagcaaccaaaaaatacagaggtattgaggactacactgaaacattcaaatgtgtggcgaaaacataattttcattccttggatggaacttcaaccagagcctttcatcctcaaactggattgcctcttctttcaagccctgttcctcaaagaaaaacacaatcaggttgctttgatctggattcttcattactacatctgaaaagcttctcatctagaagtcctcgaccatgtttaaacattgaagatgatccagatattcatgaaaaaccatttttgagttctagtgctccacctataacaagtcttagtctcctaggaaattttgaggaatctgtcttgaactatcgtttcgatcctctcggcattgttgatggttttactgccgaggtaggggcaagtggtgctttctgccccacacatttgactcttccagttgaagtgtcattctacagtgtttcagatgacaatgctccctctccttatatggcaagtattttttatattgtatgttttcctgccaaatcaaccaacttaatgacaaatttaagtgctttgatgcagtacttgaaaatataaatcatttcctaacagctgaatacaaactaatatgccaaaatattacctcacaacttctttctaagctagtt

SEQ ID NO: 68412 - DNA, 2190 bp, Homo sapiens
tcgggcgggcgggcgggcgggacggcgccccccgcggccgggcctggccgggctgcgctaggctgggctcgggcagggtcgcaggggcgggggtggcaggggagcgggtggcagccccgcgggtcacagcgccgccgccgcccatgctgctgcccctagcctgcctgcacggccgcgtcgctcagtgcctgacctccttgcttttgcttgcagagccgctcccgaggccccggcgcggcgcgagggcgcggggcgcggcgtccacaggcgccgaggctgcccccgccgccccgcccgcgaagatggcggcggaactctacgctcccgccagcgccgcggccgcggacctagccaacagcaacgccggcgccgccgtgggcaggaaggccgggccgcgcagcccgcccagcgcccccgcgccagcgccgccgccgcccgcgcccgcgccgcccacactcggcaacaaccaccaggagagccccggctggcggtgctgccgccccacgctgcgcgagaggaacgcgctcatgttcaacaacgagctcatggccgacgtgcacttcgtcgtggggcccccgggggcgaccaggacggtgcccgcccacaagtacgtcttggctgtcggcagctccgtcttctatgccatgttctacggagacctggcggaagtcaaatctgaaattcacattccagacgtggagcccgcagcctttctgatcctcttaaagtacatgtacagtgatgagatcgatctggaagccgacacggtgctggccactctgtacgctgctaagaagtacatcgtcccagcattggcaaaagcctgtgtcaactttctggagacaagtttggaagccaagaacgcctgcgtcctgctgtcccagagccggctgtttgaggagcccgagctgacgcagcgctgctgggaggtcattgacgcacaggccgagatggccctacggtccgaaggcttctgtgagatagaccggcagacgctggagatcattgtcactcgggaggccctcaacaccaaagaggcggtggtcttcgaggccgtcctgaactgggccgaggcggagtgcaagaggcaggggctgccaatcaccccacgaaacaagaggcatgttctggggcgagccctctatctggtccgaattccaaccatgaccctagaggagtttgccaacggcgctgcccagtcagacatcctgactctggaggagacccacagcatcttcctgtggtacacggccaccaacaagccccgcctggactttcccctgaccaagaggaagggcctcgccccgcagaggtgccaccgattccagtcttctgcctaccgcagcaaccagtggcggtaccgcgggcgctgcgacagcatccagtttgcagtggacagaagggtatttattgcagggctgggcctgtatggctccagctctgggaaggctgagtacagcgtgaagattgagctcaagcggctcggggtggttctggctcagaacttgaccaagttcatgtcagacggatccagtaacaccttcccggtctggtttgaacacccggtccaggttgaacaagacaccttctacacggccagtgccgtcctggacggcagcgaactcagctactttgggcaggaggggatgacggaagtgcagtgtggaaaggtggccttccagttccagtgctcctcggacagcaccaacgggactggggtccagggtgggcagatccctgagctcattttctatgcctgaggtgcccggggaggctgcagcaggtcagcgagtgagtggaggggaagtcaagatgctaactgcttcttgacaccatgaaaggctgctcttaactttgtctctctttgacatgtagtcagctgaagcttgactgtgtagagacattttccacacagccagaacccagggattggagtcttaggcatctctggtacagtggggtgcacgtctcaggtggaggaagatttacggctcaagacaggccccagatcccctcccagtggcacccatgccacctgctttgaggggttggatcttcctgctaccctcttggattctaagtggttccaagcttaacttgagaccttcccttcaaatctaaaattggcaaaaagtcacttaaaatagtggacttctgtaataaaggttgcctaaaataacaaaaaaaagt

SEQ ID NO: 68413 - DNA, 2421 bp, Homo sapiens
tcgggcgggcgggcgggcgggacggcgccccccgcggccgggcctggccgggctgcgctaggctgggctcgggcagggtcgcaggggcgggggtggcaggggagcgggtggcagccccgcgggtcacagcgccgccgccgcccatgctgctgcccctagcctgcctgcacggccgcgtcgctcagtgcctgacctccttgcttttgcttgcagagccgctcccgaggccccggcgcggcgcgagggcgcggggcgcggcgtccacaggcgccgaggctgcccccgccgccccgcccgcgaagatggcggcggaactctacgctcccgccagcgccgcggccgcggacctagccaacagcaacgccggcgccgccgtgggcaggaaggccgggccgcgcagcccgcccagcgcccccgcgccagcgccgccgccgcccgcgcccgcgccgcccacactcggcaacaaccaccaggagagccccggctggcggtgctgccgccccacgctgcgcgagaggtgagcccgtgccccgcggcccccgcgcccgcgcgcgcccacgcccccagcccgtgcctctacctttgcaggaacgcgctcatgttcaacaacgagctcatggccgacgtgcacttcgtcgtggggcccccgggggcgaccaggacggtgcccgcccacaagtacgtcttggctgtcggcagctccgtcttctatgccatgttctacggagacctggcggaagtcaaatctgaaattcacattccagacgtggagcccgcagcctttctgatcctcttaaagtaagtccactctactggggagggacgggtgggtccgttttaggcggcctccggaggcttctgaagggaagcacacaggagctgatggactcctctcccaggcccagccccgcgatgggtgcttgggagccagccctgacgcgggccctgcctcgcctaggtacatgtacagtgatgagatcgatctggaagccgacacggtgctggccactctgtacgctgctaagaagtacatcgtcccagcattggcaaaagcctgtgtcaactttctggagacaagtttggaagccaagaacgcctgcgtcctgctgtcccagagccggctgtttgaggagcccgagctgacgcagcgctgctgggaggtcattgacgcacaggccgagatggccctacggtccgaaggcttctgtgagatagaccggcagacgctggagatcattgtcactcgggaggccctcaacaccaaagaggcggtggtcttcgaggccgtcctgaactgggccgaggcggagtgcaagaggcaggggctgccaatcaccccacgaaacaagaggcatgttctggggcgagccctctatctggtccgaattccaaccatgaccctagaggagtttgccaacggcgctgcccagtcagacatcctgactctggaggagacccacagcatcttcctgtggtacacggccaccaacaagccccgcctggactttcccctgaccaagaggaagggcctcgccccgcagaggtgccaccgattccagtcttctgcctaccgcagcaaccagtggcggtaccgcgggcgctgcgacagcatccagtttgcagtggacagaagggtatttattgcagggctgggcctgtatggctccagctctgggaaggctgagtacagcgtgaagattgagctcaagcggctcggggtggttctggctcagaacttgaccaagttcatgtcagacggatccagtaacaccttcccggtctggtttgaacacccggtccaggttgaacaagacaccttctacacggccagtgccgtcctggacggcagcgaactcagctactttgggcaggaggggatgacggaagtgcagtgtggaaaggtggccttccagttccagtgctcctcggacagcaccaacgggactggggtccagggtgggcagatccctgagctcattttctatgcctgaggtgcccggggaggctgcagcaggtcagcgagtgagtggaggggaagtcaagatgctaactgcttcttgacaccatgaaaggctgctcttaactttgtctctctttgacatgtagtcagctgaagcttgactgtgtagagacattttccacacagccagaacccagggattggagtcttaggcatctctggtacagtggggtgcacgtctcaggtggaggaagatttacggctcaagacaggccccagatcccctcccagtggcacccatgccacctgctttgaggggttggatcttcctgctaccctcttggattctaagtggttccaagcttaacttgagaccttcccttcaaatctaaaattggcaaaaagtcacttaaaatagtggacttctgtaataaaggttgcctaaaataacaaaaaaaagt

SEQ ID NO: 68414 - DNA, 2261 bp, Homo sapiens
tcgggcgggcgggcgggcgggacggcgccccccgcggccgggcctggccgggctgcgctaggctgggctcgggcagggtcgcaggggcgggggtggcaggggagcgggtggcagccccgcgggtcacagcgccgccgccgcccatgctgctgcccctagcctgcctgcacggccgcgtcgctcagtgcctgacctccttgcttttgcttgcagagccgctcccgaggccccggcgcggcgcgagggcgcggggcgcggcgtccacaggcgccgaggctgcccccgccgccccgcccgcgaagatggcggcggaactctacgctcccgccagcgccgcggccgcggacctagccaacagcaacgccggcgccgccgtgggcaggaaggccgggccgcgcagcccgcccagcgcccccgcgccagcgccgccgccgcccgcgcccgcgccgcccacactcggcaacaaccaccaggagagccccggctggcggtgctgccgccccacgctgcgcgagaggtgagcccgtgccccgcggcccccgcgcccgcgcgcgcccacgcccccagcccgtgcctctacctttgcaggaacgcgctcatgttcaacaacgagctcatggccgacgtgcacttcgtcgtggggcccccgggggcgaccaggacggtgcccgcccacaagtacgtcttggctgtcggcagctccgtcttctatgccatgttctacggagacctggcggaagtcaaatctgaaattcacattccagacgtggagcccgcagcctttctgatcctcttaaagtacatgtacagtgatgagatcgatctggaagccgacacggtgctggccactctgtacgctgctaagaagtacatcgtcccagcattggcaaaagcctgtgtcaactttctggagacaagtttggaagccaagaacgcctgcgtcctgctgtcccagagccggctgtttgaggagcccgagctgacgcagcgctgctgggaggtcattgacgcacaggccgagatggccctacggtccgaaggcttctgtgagatagaccggcagacgctggagatcattgtcactcgggaggccctcaacaccaaagaggcggtggtcttcgaggccgtcctgaactgggccgaggcggagtgcaagaggcaggggctgccaatcaccccacgaaacaagaggcatgttctggggcgagccctctatctggtccgaattccaaccatgaccctagaggagtttgccaacggcgctgcccagtcagacatcctgactctggaggagacccacagcatcttcctgtggtacacggccaccaacaagccccgcctggactttcccctgaccaagaggaagggcctcgccccgcagaggtgccaccgattccagtcttctgcctaccgcagcaaccagtggcggtaccgcgggcgctgcgacagcatccagtttgcagtggacagaagggtatttattgcagggctgggcctgtatggctccagctctgggaaggctgagtacagcgtgaagattgagctcaagcggctcggggtggttctggctcagaacttgaccaagttcatgtcagacggatccagtaacaccttcccggtctggtttgaacacccggtccaggttgaacaagacaccttctacacggccagtgccgtcctggacggcagcgaactcagctactttgggcaggaggggatgacggaagtgcagtgtggaaaggtggccttccagttccagtgctcctcggacagcaccaacgggactggggtccagggtgggcagatccctgagctcattttctatgcctgaggtgcccggggaggctgcagcaggtcagcgagtgagtggaggggaagtcaagatgctaactgcttcttgacaccatgaaaggctgctcttaactttgtctctctttgacatgtagtcagctgaagcttgactgtgtagagacattttccacacagccagaacccagggattggagtcttaggcatctctggtacagtggggtgcacgtctcaggtggaggaagatttacggctcaagacaggccccagatcccctcccagtggcacccatgccacctgctttgaggggttggatcttcctgctaccctcttggattctaagtggttccaagcttaacttgagaccttcccttcaaatctaaaattggcaaaaagtcacttaaaatagtggacttctgtaataaaggttgcctaaaataacaaaaaaaagt

SEQ ID NO: 68415 - DNA, 2425 bp, Homo sapiens
tcgggcgggcgggcgggcgggacggcgccccccgcggccgggcctggccgggctgcgctaggctgggctcgggcagggtcgcaggggcgggggtggcaggggagcgggtggcagccccgcgggtcacagcgccgccgccgcccatgctgctgcccctagcctgcctgcacggccgcgtcgctcagtgcctgacctccttgcttttgcttgcagagccgctcccgaggccccggcgcggcgcgagggcgcggggcgcggcgtccacaggcgccgaggctgcccccgccgccccgcccgcgaagatggcggcggaactctacgctcccgccagcgccgcggccgcggacctagccaacagcaacgccggcgccgccgtgggcaggaaggccgggccgcgcagcccgcccagcgcccccgcgccagcgccgccgccgcccgcgcccgcgccgcccacactcggcaacaaccaccaggagagccccggctggcggtgctgccgccccacgctgcgcgagaggaacgcgctcatgttcaacaacgagctcatggccgacgtgcacttcgtcgtggggcccccgggggcgaccaggacggtgcccgcccacaagtacgtcttggctgtcggcagctccgtcttctatgccatgttctacggagacctggcggaagtcaaatctgaaattcacattccagacgtggagcccgcagcctttctgatcctcttaaagtacatgtacagtgatgagatcgatctggaagccgacacggtgctggccactctgtacgctgctaagaagtacatcgtcccagcattggcaaaagcctgtgtcaactttctggagacaagtttggaagccaagaacgcctgcgtcctgctgtcccagagccggctgtttgaggagcccgagctgacgcagcgctgctgggaggtcattgacgcacaggccgagatggccctacggtccgaaggcttctgtgagatagaccggcagacgctggagatcattgtcactcgggaggccctcaacaccaaagaggcggtggtcttcgaggccgtcctgaactgggccgaggcggagtgcaagaggcaggggctgccaatcaccccacgaaacaagaggcatgttctggggcgagccctctatctggtccgaattccaaccatgaccctagaggagtttgccaacggcgctgcccagtcagacatcctgactctggaggagacccacagcatcttcctgtggtacacggccaccaacaagccccgcctggactttcccctgaccaagaggaagggcctcgccccgcagaggtgccaccgattccagtcttctgcctaccgcagcaaccagtggcggtaccgcgggcgctgcgacagcatccagtttgcagtggacagaagggtatttattgcagggctgggcctgtatggctccagctctgggaaggctgagtacagcgtgaagattgagctcaagcggctcggggtggttctggctcagaacttgaccaagttcatgtcagacggatccagtaacaccttcccggtctggtttgaacacccggtccaggttgaacaagacaccttctacacggccagtgccgtcctggacggcagcgaactcagctactttgggcaggaggggatgacggaagtgcagtgtggaaaggtggccttccagttccagtgctcctcggacagcaccaacgggactggggtccagggtgggcagatccctgagctcattttctatgcctgaggtgcccggggaggctgcagcaggtcagcgagtgagtggaggggaagtcaagatgctaactgcttcttgacaccatgaaaggctgctcttaactttgtctctctttgacatgtagtcagctgaagcttgactgtgtagagacattttccacacagccagaacccagggattggagtcttaggcatctctggtacagtggggtgcacgtctcaggtggaggaagatttacggctcaagacaggccccagatcccctcccagtggcacccatgccacctgctttgaggggttggatcttcctgctaccctcttggattctaagtggttccaagcttaacttgagaccttcccttcaaatctaaaattggcaaaaagtcacttaaaatagtggacctcgtgccgaattcggcacgagcccaaaagggcgtgaccgtaaaaacccgcgaaaccacaaaggccaacaagcctgctgctctcgcggcttaatgaccgcgacctcgcccggtggccctgccgggggctcaccggatgcggggacacaaacccggctagcctggggccacgccccctaaccccaggcgaagcgcaagggggctcgcccctggccgcccgtccgcgggctaagccagggggacacctaaaacgcggactacgcgcgctcgtgcc

SEQ ID NO: 68416 - DNA, 600 bp, Homo sapiens
  misc_feature (50)..(50): n is a, c, g, or t
gcactctagagatcgcttaccggatctgggtaggaaaatgcggaaactgngaggggatgacggaagtgcagtgtggaaaggtggccttccagttccagtgctcctcggacagcaccaacgggactggggtccagggtgggcagatccctgagctcattttctatgcctgaggtgcccggggaggctgcagcaggtcagcgagtgagtggaggggaagtcaagatgctaactgcttcttgacaccatgaaaggctgctcttaactttgtctctctttgacatgtagtcagctgaagcttgactgtgtagagacattttccacacagccagaacccagggattggagtcttaggcatctctggtacagtggggtgcacgtctcaggtggaggaagatttacggctcaagacaggccccagatcccctcccagtggcacccatgccacctgctttgaggggttggatcttcctgctaccctcttggattctaagtggttccaagcttaacttgagaccttcccttcaaatctaaaattggcaaaaagtcacttaaaatagtggacttctgtaataaaggttgcctaaaataacaaaaaaaagt

SEQ ID NO: 68417 - DNA, 888 bp, Homo sapiens
gacagggtctagctctgttggtctggagtgcagtggtgcagaggttgcagtgagctgagattacaccactgcactccagcctgggtgacagagtgagactccatctcaaaaactgaaaataaaaataaaaatatgtattctcctaactgaaatatttacttaatctggaaaacaatgtaactatttttaaagtggttacatctattcttgctgaagaacaataaacagaattttttgactaagcataaccaaatttcagaacagtctaatcaatgccaagtatccaaggcaaactctaatacccatccattgtgcaaaaccacaagcacgcaagtattaaataagagcaagctgtcctgagcccatacctaatagttaaaagcaagttgagacaaaccaggcagattcagtgtgtggaacaggaaggatgtgctttaaaaaaaggtggaatccctcaaaaaattctatagggagacagcagccttaatctacataattcttcatctcgccaattcagccgcagcctttaaagagttagtgttaatggctttctggtttgaaaacaaaaatgcatctatgtggttgaaagtttgggaggagattcaccaatatctgaggagaagatggagtgaagggaattcttactttttgctttatacctttctataatatttagatttttttttactgtaagtatggatcaaattgcaaaataaagaaaaatgccaaccttagaaaagacaataaatgcacaaaagatataaacaggaacagcaaatatttatattttttccattttgctctttttaaatctatgtttagaactttatatcttgggacttatgtatatatataccttttaaataaaataaattttctaaataaaaa

SEQ ID NO: 68418 - DNA, 188 bp, Homo sapiens
  misc_feature (13)..(13): n is a, c, g, or t
atatggagtggcnccagatttaacctatttaaaataaaagacaataaatgcacaaaagatataaacaggaacagcaaatatttatattttttccattttgctctttttaaatctatgtttagaactttatatcttgggacttatgtatatatataccttttaaataaaataaattttctaaataaaaa

SEQ ID NO: 68419 - DNA, 3372 bp, Homo sapiens
  misc_feature (3)..(3): n is a, c, g, or t
gcntgcactatagccaagtttgttcaaacagccggctggtaccggtcggaattccgggataaatgatctcctctctattcagggaaatacagggccttcctggatcaataaaacagagagagctttcttcagaggtagagacagccgagaggagaggctccagttggtacagctgtccaaagaaaatcctcagctactagatgcaggaattacaggatatttctttttccaagagaaagaaaaggagcttggaaaagccaagttgatgggtttctttgatttctttaagtacaagtatcaagtaaatgtggatgggaccgtggctgcttacagatatccatatctcatgctgggcgacagtctggttttaaagcaggactcgccatattatgaacatttctacatggcactagaaccttggaagcattatgttccaattaaaagaaatctgagtgatttattagagaaagttaaatgggctaaggaaaatgatgaagaagccaagaagattgcaaaagaaggacagttgatggctagggacctactacagccacacaggctttactgctactattaccaagtactgcagaaatatgccgagcgccagtccagcaaacccgaagtacgtgatggaatggaacttgttcctcagccagaagatagcacagccatctgccagtgccacaggaaaaagccttcaagagaagaactttgagtcagcccagaatcacactcctgtgtatcccggctacactttaaggaaagattgaatctaagctgtgaaggacagtatagaagactgcaccaagtggactagttctcccggtggctttatatatgtagatggatatagcagtactggttgagtatccctcatctgaaatgcttaggaccaggagtgtttcaggcttcagattttttaagatttgggaatatttgcatgtacataatgaggtatcttggggatgagatccaagtctaaacacaaaattcatttatattttatatataccttgttcacataccctgaaggtaattttatataatatttttaataatttgtgcatgaaacaaagtttgtatacattgaactgtcagaaagcaaaggtgtcactatcttagcgacccaagtggtggtgtcagcactcaaaaagttttggattttggggtatttcagattttagatttttgtatgaggaatgttcaacctgtatttgaacaagcattaccaaatatcattgaatattaatatcttttgcgtaaaaactgctattatcagcatcatagtttctctaaaaagaaaacttggggatcatagccgatagagagacttgctaaaatataaatcagcctctgcaaaactgtttacatatttattggtttacatattttattggtttatttctatcccctgttcactttttctcttccacttccaattatgaagagaaaatatttgttcagggttgtccccccgccccccgtcactgcataatttctcctcttacaagctgcttttggctttcattaataacagcttccttttagaaggtctgataaggatatttaaggaagaagagaatgactctgttattaaaggtggcatggagactgtggagggaatattttttaaagcactactcatatcctttaaactaaattttgccaaagcccgagacaacattaaggagaaattgtaccttaagttagtaattccaaatctatctgagttgtatacccatcaaagacaatacagttattaacatagatgaaggtatgctataggcatcattcattatctctatattgaataggtgaaagataactgtagtcaggtgaaaggcattcattatttttaagctgaaaaggggatccttgaaaacactgaaaacctctacaacaatcttcaggaagcctgctatcttgggattcactaataataggccaagaacaaaggcaagcatccattcctcactccaccacttttctatttcagtgggtgtcgttgctacgatgaagactttggaaatttcctttctcttttaggacagggtcaggatttaggactcatagcctgaaagctcattacatactccttgtaaccatcagtccaaggttcagttcactaaagtgcatgttctaaaacaagagctatcctcattccaaattttaaaatatgtactctggccggttgcagtggctcacgcctgtaatcccagcactttggcaggccgagatgggcggatcttttgaggtcaggagtttgagaccagcctggccaacatggtgaaaccccgtctctactaaaaatacaaaaattagccaggcatggtggcatttgcctgtaatcccagctactcgggaggctgaggcaggagaatcacttgaacctgggaggcagaggttgcagtgagctgagattacaccactgcactccagcctgggtgacagagtgagactccatctcaaaaactgaaaataaaaataaaaatatgtattctcctaactgaaatatttacttaatctggaaacagaattttttgactaagcataaccaaatttcagaacagtctaatcaatgccaagtatccaaggcaaactctaatacccatccattgtgcaaaaccacaagcacgcaagtattaaataagagcaagctgtcctgagcccatacctaatgaatttgtgtcttaaatattgtacattgtgtttgaggcttgtcaaaactgggattatggcaagaaaggttgcctaactcatacctttctgcctcaaattccaggtgctaaaggctaatggcattttaaacatcttacatttttaaaaatttatattgcctctgccaaacaggcctaatagttaaaagcaagttgagacaaaccaggcagattcagtgtgtggaacaggaaggatgtgctttaaaaaaaggtggaatccctcaaaaaattctatagggagacagcagccttaatctacataattcttcatctcgccaattcagccgcagcctttaaagagttagtgttaatggctttctggtttgaaaacaaaaatgcatctatgtggttgaaagtttgggaggagattcaccaatatctgaggagaagatggagtgaagggaattcttactttttgctttatacctttctataatatttagatttttttttactgtaagtatggatcaaattgcaaaataaagaaaaatgccaaccttagaaaagacaataaatgcacaaaagatataaacaggaacagcaaatatttatattttttccattttgctctttttaaatctatgtttagaactttatatcttgggacttatgtatatatataccttttaaataaaataaattttctaaataaaaa

SEQ ID NO: 68420 - DNA, 3451 bp, Homo sapiens
  misc_feature (3)..(3): n is a, c, g, or t
gcntgcactatagccaagtttgttcaaacagccggctggtaccggtcggaattccgggataaatgatctcctctctattcagggaaatacagggccttcctggatcaataaaacagagagagctttcttcagaggtagagacagccgagaggagaggctccagttggtacagctgtccaaagaaaatcctcagctactagatgcaggaattacaggatatttctttttccaagagaaagaaaaggagcttggaaaagccaagttgatgggtttctttgatttctttaagtacaagtatcaagtaaatgtggatgggaccgtggctgcttacagatatccatatctcatgctgggcgacagtctggttttaaagcaggactcgccatattatgaacatttctacatggcactagaaccttggaagcattatgttccaattaaaagaaatctgagtgatttattagagaaagttaaatgggctaaggaaaatgatgaagaagccaagaagattgcaaaagaaggacagttgatggctagggacctactacagccacacaggctttactgctactattaccaagtactgcagaaatatgccgagcgccagtccagcaaacccgaagtacgtgatggaatggaacttgttcctcagccagaagatagcacagccatctgccagtgccacaggaaaaagccttcaagagaagaactttgagtcagcccagaatcacactcctgtgtatcccggctacactttaaggaaagattgaatctaagctgtgaaggacagtatagaagactgcaccaagtggactagttctcccggtggctttatatatgtagatggatatagcagtactggttgagtatccctcatctgaaatgcttaggaccaggagtgtttcaggcttcagattttttaagatttgggaatatttgcatgtacataatgaggtatcttggggatgagatccaagtctaaacacaaaattcatttatattttatatataccttgttcacataccctgaaggtaattttatataatatttttaataatttgtgcatgaaacaaagtttgtatacattgaactgtcagaaagcaaaggtgtcactatcttagcgacccaagtggtggtgtcagcactcaaaaagttttggattttggggtatttcagattttagatttttgtatgaggaatgttcaacctgtatttgaacaagcattaccaaatatcattgaatattaatatcttttgcgtaaaaactgctattatcagcatcatagtttctctaaaaagaaaacttggggatcatagccgatagagagacttgctaaaatataaatcagcctctgcaaaactgtttacatatttattggtttacatattttattggtttatttctatcccctgttcactttttctcttccacttccaattatgaagagaaaatatttgttcagggttgtccccccgccccccgtcactgcataatttctcctcttacaagctgcttttggctttcattaataacagcttccttttagaaggtctgataaggatatttaaggaagaagagaatgactctgttattaaaggtggcatggagactgtggagggaatattttttaaagcactactcatatcctttaaactaaattttgccaaagcccgagacaacattaaggagaaattgtaccttaagttagtaattccaaatctatctgagttgtatacccatcaaagacaatacagttattaacatagatgaaggtatgctataggcatcattcattatctctatattgaataggtgaaagataactgtagtcaggtgaaaggcattcattatttttaagctgaaaaggggatccttgaaaacactgaaaacctctacaacaatcttcaggaagcctgctatcttgggattcactaataataggccaagaacaaaggcaagcatccattcctcactccaccacttttctatttcagtgggtgtcgttgctacgatgaagactttggaaatttcctttctcttttaggacagggtcaggatttaggactcatagcctgaaagctcattacatactccttgtaaccatcagtccaaggttcagttcactaaagtgcatgttctaaaacaagagctatcctcattccaaattttaaaatatgtactctggccggttgcagtggctcacgcctgtaatcccagcactttggcaggccgagatgggcggatcttttgaggtcaggagtttgagaccagcctggccaacatggtgaaaccccgtctctactaaaaatacaaaaattagccaggcatggtggcatttgcctgtaatcccagctactcgggaggctgaggcaggagaatcacttgaacctgggaggcagaggttgcagtgagctgagattacaccactgcactccagcctgggtgacagagtgagactccatctcaaaaactgaaaataaaaataaaaatatgtattctcctaactgaaatatttacttaatctggaaaacaatgtaactatttttaaagtggttacatctattcttgctgaagaacaataaacagaattttttgactaagcataaccaaatttcagaacagtctaatcaatgccaagtatccaaggcaaactctaatacccatccattgtgcaaaaccacaagcacgcaagtattaaataagagcaagctgtcctgagcccatacctaatgaatttgtgtcttaaatattgtacattgtgtttgaggcttgtcaaaactgggattatggcaagaaaggttgcctaactcatacctttctgcctcaaattccaggtgctaaaggctaatggcattttaaacatcttacatttttaaaaatttatattgcctctgccaaacaggcctaatagttaaaagcaagttgagacaaaccaggcagattcagtgtgtggaacaggaaggatgtgctttaaaaaaaggtggaatccctcaaaaaattctatagggagacagcagccttaatctacataattcttcatctcgccaattcagccgcagcctttaaagagttagtgttaatggctttctggtttgaaaacaaaaatgcatctatgtggttgaaagtttgggaggagattcaccaatatctgaggagaagatggagtgaagggaattcttactttttgctttatacctttctataatatttagatttttttttactgtaagtatggatcaaattgcaaaataaagaaaaatgccaaccttagaaaagacaataaatgcacaaaagatataaacaggaacagcaaatatttatattttttccattttgctctttttaaatctatgtttagaactttatatcttgggacttatgtatatatataccttttaaataaaataaattttctaaataaaaaaaaatctaaatattatagaaaggta

SEQ ID NO: 68421 - DNA, 3426 bp, Homo sapiens
  misc_feature (3)..(3): n is a, c, g, or t
gcntgcactatagccaagtttgttcaaacagccggctggtaccggtcggaattccgggataaatgatctcctctctattcagggaaatacagggccttcctggatcaataaaacagagagagctttcttcagaggtagagacagccgagaggagaggctccagttggtacagctgtccaaagaaaatcctcagctactagatgcaggaattacaggatatttctttttccaagagaaagaaaaggagcttggaaaagccaagttgatgggtttctttgatttctttaagtacaagtatcaagtaaatgtggatgggaccgtggctgcttacagatatccatatctcatgctgggcgacagtctggttttaaagcaggactcgccatattatgaacatttctacatggcactagaaccttggaagcattatgttccaattaaaagaaatctgagtgatttattagagaaagttaaatgggctaaggaaaatgatgaagaagccaagaagattgcaaaagaaggacagttgatggctagggacctactacagccacacaggctttactgctactattaccaagtactgcagaaatatgccgagcgccagtccagcaaacccgaagtacgtgatggaatggaacttgttcctcagccagaagatagcacagccatctgccagtgccacaggaaaaagccttcaagagaagaactttgagtcagcccagaatcacactcctgtgtatcccggctacactttaaggaaagattgaatctaagctgtgaaggacagtatagaagactgcaccaagtggactagttctcccggtggctttatatatgtagatggatatagcagtactggttgagtatccctcatctgaaatgcttaggaccaggagtgtttcaggcttcagattttttaagatttgggaatatttgcatgtacataatgaggtatcttggggatgagatccaagtctaaacacaaaattcatttatattttatatataccttgttcacataccctgaaggtaattttatataatatttttaataatttgtgcatgaaacaaagtttgtatacattgaactgtcagaaagcaaaggtgtcactatcttagcgacccaagtggtggtgtcagcactcaaaaagttttggattttggggtatttcagattttagatttttgtatgaggaatgttcaacctgtatttgaacaagcattaccaaatatcattgaatattaatatcttttgcgtaaaaactgctattatcagcatcatagtttctctaaaaagaaaacttggggatcatagccgatagagagacttgctaaaatataaatcagcctctgcaaaactgtttacatatttattggtttacatattttattggtttatttctatcccctgttcactttttctcttccacttccaattatgaagagaaaatatttgttcagggttgtccccccgccccccgtcactgcataatttctcctcttacaagctgcttttggctttcattaataacagcttccttttagaaggtctgataaggatatttaaggaagaagagaatgactctgttattaaaggtggcatggagactgtggagggaatattttttaaagcactactcatatcctttaaactaaattttgccaaagcccgagacaacattaaggagaaattgtaccttaagttagtaattccaaatctatctgagttgtatacccatcaaagacaatacagttattaacatagatgaaggtatgctataggcatcattcattatctctatattgaataggtgaaagataactgtagtcaggtgaaaggcattcattatttttaagctgaaaaggggatccttgaaaacactgaaaacctctacaacaatcttcaggaagcctgctatcttgggattcactaataataggccaagaacaaaggcaagcatccattcctcactccaccacttttctatttcagtgggtgtcgttgctacgatgaagactttggaaatttcctttctcttttaggacagggtcaggatttaggactcatagcctgaaagctcattacatactccttgtaaccatcagtccaaggttcagttcactaaagtgcatgttctaaaacaagagctatcctcattccaaattttaaaatatgtactctggccggttgcagtggctcacgcctgtaatcccagcactttggcaggccgagatgggcggatcttttgaggtcaggagtttgagaccagcctggccaacatggtgaaaccccgtctctactaaaaatacaaaaattagccaggcatggtggcatttgcctgtaatcccagctactcgggaggctgaggcaggagaatcacttgaacctgggaggcagaggttgcagtgagctgagattacaccactgcactccagcctgggtgacagagtgagactccatctcaaaaactgaaaataaaaataaaaatatgtattctcctaactgaaatatttacttaatctggaaaacaatgtaactatttttaaagtggttacatctattcttgctgaagaacaataaacagaattttttgactaagcataaccaaatttcagaacagtctaatcaatgccaagtatccaaggcaaactctaatacccatccattgtgcaaaaccacaagcacgcaagtattaaataagagcaagctgtcctgagcccatacctaatgaatttgtgtcttaaatattgtacattgtgtttgaggcttgtcaaaactgggattatggcaagaaaggttgcctaactcatacctttctgcctcaaattccaggtgctaaaggctaatggcattttaaacatcttacatttttaaaaatttatattgcctctgccaaacaggcctaatagttaaaagcaagttgagacaaaccaggcagattcagtgtgtggaacaggaaggatgtgctttaaaaaaaggtggaatccctcaaaaaattctatagggagacagcagccttaatctacataattcttcatctcgccaattcagccgcagcctttaaagagttagtgttaatggctttctggtttgaaaacaaaaatgcatctatgtggttgaaagtttgggaggagattcaccaatatctgaggagaagatggagtgaagggaattcttactttttgctttatacctttctataatatttagatttttttttactgtaagtatggatcaaattgcaaaataaagaaaaatgccaaccttagaaaagacaataaatgcacaaaagatataaacaggaacagcaaatatttatattttttccattttgctctttttaaatctatgtttagaactttatatcttgggacttatgtatatatataccttttaaataaaataaattttctaaataaaaa

SEQ ID NO: 68422 - DNA, 3620 bp, Homo sapiens
aaatctttacgaaaaatgacccacatcaagatgtgctctgcgaagtattccgcatcatgtgataaaagggtccttctcccagatttagaattttatgttaatcttggagattggcccttggagcatcgaaaagtcaatggaacccctagccccatacctatcatttcatggtgtggctctctggattcaagagatgttgtccttccaacgtatgacatcacccactccatgcttgaagccatgcggggtgttacaaatgatctcctctctattcagggaaatacagggccttcctggatcaataaaacagagagagctttcttcagaggtagagacagccgagaggagaggctccagttggtacagctgtccaaagaaaatcctcagctactagatgcaggaattacaggatatttctttttccaagagaaagaaaaggagcttggaaaagccaagttgatgggtttctttgatttctttaagtacaagtatcaagtaaatgtggatgggaccgtggctgcttacagatatccatatctcatgctgggcgacagtctggttttaaagcaggactcgccatattatgaacatttctacatggcactagaaccttggaagcattatgttccaattaaaagaaatctgagtgatttattagagaaagttaaatgggctaaggaaaatgatgaagaagccaagaagattgcaaaagaaggacagttgatggctagggacctactacagccacacaggctttactgctactattaccaagtactgcagaaatatgccgagcgccagtccagcaaacccgaagtacgtgatggaatggaacttgttcctcagccagaagatagcacagccatctgccagtgccacaggaaaaagccttcaagagaagaactttgagtcagcccagaatcacactcctgtgtatcccggctacactttaaggaaagattgaatctaagctgtgaaggacagtatagaagactgcaccaagtggactagttctcccggtggctttatatatgtagatggatatagcagtactggttgagtatccctcatctgaaatgcttaggaccaggagtgtttcaggcttcagattttttaagatttgggaatatttgcatgtacataatgaggtatcttggggatgagatccaagtctaaacacaaaattcatttatattttatatataccttgttcacataccctgaaggtaattttatataatatttttaataatttgtgcatgaaacaaagtttgtatacattgaactgtcagaaagcaaaggtgtcactatcttagcgacccaagtggtggtgtcagcactcaaaaagttttggattttggggtatttcagattttagatttttgtatgaggaatgttcaacctgtatttgaacaagcattaccaaatatcattgaatattaatatcttttgcgtaaaaactgctattatcagcatcatagtttctctaaaaagaaaacttggggatcatagccgatagagagacttgctaaaatataaatcagcctctgcaaaactgtttacatatttattggtttacatattttattggtttatttctatcccctgttcactttttctcttccacttccaattatgaagagaaaatatttgttcagggttgtccccccgccccccgtcactgcataatttctcctcttacaagctgcttttggctttcattaataacagcttccttttagaaggtctgataaggatatttaaggaagaagagaatgactctgttattaaaggtggcatggagactgtggagggaatattttttaaagcactactcatatcctttaaactaaattttgccaaagcccgagacaacattaaggagaaattgtaccttaagttagtaattccaaatctatctgagttgtatacccatcaaagacaatacagttattaacatagatgaaggtatgctataggcatcattcattatctctatattgaataggtgaaagataactgtagtcaggtgaaaggcattcattatttttaagctgaaaaggggatccttgaaaacactgaaaacctctacaacaatcttcaggaagcctgctatcttgggattcactaataataggccaagaacaaaggcaagcatccattcctcactccaccacttttctatttcagtgggtgtcgttgctacgatgaagactttggaaatttcctttctcttttaggacagggtcaggatttaggactcatagcctgaaagctcattacatactccttgtaaccatcagtccaaggttcagttcactaaagtgcatgttctaaaacaagagctatcctcattccaaattttaaaatatgtactctggccggttgcagtggctcacgcctgtaatcccagcactttggcaggccgagatgggcggatcttttgaggtcaggagtttgagaccagcctggccaacatggtgaaaccccgtctctactaaaaatacaaaaattagccaggcatggtggcatttgcctgtaatcccagctactcgggaggctgaggcaggagaatcacttgaacctgggaggcagaggttgcagtgagctgagattacaccactgcactccagcctgggtgacagagtgagactccatctcaaaaactgaaaataaaaataaaaatatgtattctcctaactgaaatatttacttaatctggaaaacaatgtaactatttttaaagtggttacatctattcttgctgaagaacaataaacagaattttttgactaagcataaccaaatttcagaacagtctaatcaatgccaagtatccaaggcaaactctaatacccatccattgtgcaaaaccacaagcacgcaagtattaaataagagcaagctgtcctgagcccatacctaatgaatttgtgtcttaaatattgtacattgtgtttgaggcttgtcaaaactgggattatggcaagaaaggttgcctaactcatacctttctgcctcaaattccaggtgctaaaggctaatggcattttaaacatcttacatttttaaaaatttatattgcctctgccaaacaggcctaatagttaaaagcaagttgagacaaaccaggcagattcagtgtgtggaacaggaaggatgtgctttaaaaaaaggtggaatccctcaaaaaattctatagggagacagcagccttaatctacataattcttcatctcgccaattcagccgcagcctttaaagagttagtgttaatggctttctggtttgaaaacaaaaatgcatctatgtggttgaaagtttgggaggagattcaccaatatctgaggagaagatggagtgaagggaattcttactttttgctttatacctttctataatatttagatttttttttactgtaagtatggatcaaattgcaaaataaagaaaaatgccaaccttagaaaagacaataaatgcacaaaagatataaacaggaacagcaaatatttatattttttccattttgctctttttaaatctatgtttagaactttatatcttgggacttatgtatatatataccttttaaataaaataaattttctaaataaaaa

SEQ ID NO: 68423 - DNA, 2978 bp, Homo sapiens
  misc_feature (1)..(1): n is a, c, g, or t
naaaaattagccaggcgtcggtagctgggattacaggaaaatgatgaagaagccaagaagattgcaaaagaaggacagttgatggctagggacctactacagccacacaggctttactgctactattaccaagtactgcagaaatatgccgagcgccagtccagcaaacccgaagtacgtgatggaatggaacttgttcctcagccagaagatagcacagccatctgccagtgccacaggaaaaagccttcaagagaagaactttgagtcagcccagaatcacactcctgtgtatcccggctacactttaaggaaagattgaatctaagctgtgaaggacagtatagaagactgcaccaagtggactagttctcccggtggctttatatatgtagatggatatagcagtactggttgagtatccctcatctgaaatgcttaggaccaggagtgtttcaggcttcagattttttaagatttgggaatatttgcatgtacataatgaggtatcttggggatgagatccaagtctaaacacaaaattcatttatattttatatataccttgttcacataccctgaaggtaattttatataatatttttaataatttgtgcatgaaacaaagtttgtatacattgaactgtcagaaagcaaaggtgtcactatcttagcgacccaagtggtggtgtcagcactcaaaaagttttggattttggggtatttcagattttagatttttgtatgaggaatgttcaacctgtatttgaacaagcattaccaaatatcattgaatattaatatcttttgcgtaaaaactgctattatcagcatcatagtttctctaaaaagaaaacttggggatcatagccgatagagagacttgctaaaatataaatcagcctctgcaaaactgtttacatatttattggtttacatattttattggtttatttctatcccctgttcactttttctcttccacttccaattatgaagagaaaatatttgttcagggttgtccccccgccccccgtcactgcataatttctcctcttacaagctgcttttggctttcattaataacagcttccttttagaaggtctgataaggatatttaaggaagaagagaatgactctgttattaaaggtggcatggagactgtggagggaatattttttaaagcactactcatatcctttaaactaaattttgccaaagcccgagacaacattaaggagaaattgtaccttaagttagtaattccaaatctatctgagttgtatacccatcaaagacaatacagttattaacatagatgaaggtatgctataggcatcattcattatctctatattgaataggtgaaagataactgtagtcaggtgaaaggcattcattatttttaagctgaaaaggggatccttgaaaacactgaaaacctctacaacaatcttcaggaagcctgctatcttgggattcactaataataggccaagaacaaaggcaagcatccattcctcactccaccacttttctatttcagtgggtgtcgttgctacgatgaagactttggaaatttcctttctcttttaggacagggtcaggatttaggactcatagcctgaaagctcattacatactccttgtaaccatcagtccaaggttcagttcactaaagtgcatgttctaaaacaagagctatcctcattccaaattttaaaatatgtactctggccggttgcagtggctcacgcctgtaatcccagcactttggcaggccgagatgggcggatcttttgaggtcaggagtttgagaccagcctggccaacatggtgaaaccccgtctctactaaaaatacaaaaattagccaggcatggtggcatttgcctgtaatcccagctactcgggaggctgaggcaggagaatcacttgaacctgggaggcagaggttgcagtgagctgagattacaccactgcactccagcctgggtgacagagtgagactccatctcaaaaactgaaaataaaaataaaaatatgtattctcctaactgaaatatttacttaatctggaaaacaatgtaactatttttaaagtggttacatctattcttgctgaagaacaataaacagaattttttgactaagcataaccaaatttcagaacagtctaatcaatgccaagtatccaaggcaaactctaatacccatccattgtgcaaaaccacaagcacgcaagtattaaataagagcaagctgtcctgagcccatacctaatgaatttgtgtcttaaatattgtacattgtgtttgaggcttgtcaaaactgggattatggcaagaaaggttgcctaactcatacctttctgcctcaaattccaggtgctaaaggctaatggcattttaaacatcttacatttttaaaaatttatattgcctctgccaaacaggcctaatagttaaaagcaagttgagacaaaccaggcagattcagtgtgtggaacaggaaggatgtgctttaaaaaaaggtggaatccctcaaaaaattctatagggagacagcagccttaatctacataattcttcatctcgccaattcagccgcagcctttaaagagttagtgttaatggctttctggtttgaaaacaaaaatgcatctatgtggttgaaagtttgggaggagattcaccaatatctgaggagaagatggagtgaagggaattcttactttttgctttatacctttctataatatttagatttttttttactgtaagtatggatcaaattgcaaaataaagaaaaatgccaaccttagaaaagacaataaatgcacaaaagatataaacaggaacagcaaatatttatattttttccattttgctctttttaaatctatgtttagaactttatatcttgggacttatgtatatatataccttttaaataaaataaattttctaaataaaaa

SEQ ID NO: 68424 - DNA, 3273 bp, Homo sapiens
  misc_feature (3)..(3): n is a, c, g, or t
gcntgcactatagccaagtttgttcaaacagccggctggtaccggtcggaattccgggataaatgatctcctctctattcagggaaatacagggccttcctggatcaataaaacagagagagctttcttcagaggtagagacagccgagaggagaggctccagttggtacagctgtccaaagaaaatcctcagctactagatgcaggaattacaggatatttctttttccaagagaaagaaaaggagcttggaaaagccaagttgatgggtttctttgatttctttaagtacaagtatcaagtaaatgtggatgggaccgtggctgcttacagatatccatatctcatgctgggcgacagtctggttttaaagcaggactcgccatattatgaacatttctacatggcactagaaccttggaagcattatgttccaattaaaagaaatctgagtgatttattagagaaagttaaatgggctaaggaaaatgatgaagaagccaagaagattgcaaaagaaggacagttgatggctagggacctactacagccacacaggctttactgctactattaccaagtactgcagaaatatgccgagcgccagtccagcaaacccgaagtacgtgatggaatggaacttgttcctcagccagaagatagcacagccatctgccagtgccacaggaaaaagccttcaagagaagaactttgagtcagcccagaatcacactcctgtgtatcccggctacactttaaggaaagattgaatctaagctgtgaaggacagtatagaagactgcaccaagtggactagttctcccggtggctttatatatgtagatggatatagcagtactggttgagtatccctcatctgaaatgcttaggaccaggagtgtttcaggcttcagattttttaagatttgggaatatttgcatgtacataatgaggtatcttggggatgagatccaagtctaaacacaaaattcatttatattttatatataccttgttcacataccctgaaggtaattttatataatatttttaataatttgtgcatgaaacaaagtttgtatacattgaactgtcagaaagcaaaggtgtcactatcttagcgacccaagtggtggtgtcagcactcaaaaagttttggattttggggtatttcagattttagatttttgtatgaggaatgttcaacctgtatttgaacaagcattaccaaatatcattgaatattaatatcttttgcgtaaaaactgctattatcagcatcatagtttctctaaaaagaaaacttggggatcatagccgatagagagacttgctaaaatataaatcagcctctgcaaaactgtttacatatttattggtttacatattttattggtttatttctatcccctgttcactttttctcttccacttccaattatgaagagaaaatatttgttcagggttgtccccccgccccccgtcactgcataatttctcctcttacaagctgcttttggctttcattaataacagcttccttttagaaggtctgataaggatatttaaggaagaagagaatgactctgttattaaaggtggcatggagactgtggagggaatattttttaaagcactactcatatcctttaaactaaattttgccaaagcccgagacaacattaaggagaaattgtaccttaagttagtaattccaaatctatctgagttgtatacccatcaaagacaatacagttattaacatagatgaaggtatgctataggcatcattcattatctctatattgaataggtgaaagataactgtagtcaggtgaaaggcattcattatttttaagctgaaaaggggatccttgaaaacactgaaaacctctacaacaatcttcaggaagcctgctatcttgggattcactaataataggccaagaacaaaggcaagcatccattcctcactccaccacttttctatttcagtgggtgtcgttgctacgatgaagactttggaaatttcctttctcttttaggacagggtcaggatttaggactcatagcctgaaagctcattacatactccttgtaaccatcagtccaaggttcagttcactaaagtgcatgttctaaaacaagagctatcctcattccaaattttaaaatatgtactctggccggttgcagtggctcacgcctgtaatcccagcactttggcaggccgagatgggcggatcttttgaggtcaggagtttgagaccagcctggccaacatggtgaaaccccgtctctactaaaaatacaaaaattagccaggcatggtggcatttgcctgtaatcccagctactcgggaggctgaggcaggagaatcacttgaacctgggaggcagaggttgcagtgagctgagattacaccactgcactccagcctgggtgacagagtgagactccatctcaaaaactgaaaataaaaataaaaatatgtattctcctaactgaaatatttacttaatctggaaaacaatgtaactatttttaaagtggttacatctattcttgctgaagaacaataaacagaattttttgactaagcataaccaaatttcagaacagtctaatcaatgccaagtatccaaggcaaactctaatacccatccattgtgcaaaaccacaagcacgcaagtattaaataagagcaagctgtcctgagcccatacctaatagttaaaagcaagttgagacaaaccaggcagattcagtgtgtggaacaggaaggatgtgctttaaaaaaaggtggaatccctcaaaaaattctatagggagacagcagccttaatctacataattcttcatctcgccaattcagccgcagcctttaaagagttagtgttaatggctttctggtttgaaaacaaaaatgcatctatgtggttgaaagtttgggaggagattcaccaatatctgaggagaagatggagtgaagggaattcttactttttgctttatacctttctataatatttagatttttttttactgtaagtatggatcaaattgcaaaataaagaaaaatgccaaccttagaaaagacaataaatgcacaaaagatataaacaggaacagcaaatatttatattttttccattttgctctttttaaatctatgtttagaactttatatcttgggacttatgtatatatataccttttaaataaaataaattttctaaataaaaaaaaatctaaatattatagaaaggta

SEQ ID NO: 68425 - DNA, 673 bp, Homo sapiens
attccagtctgatggagaagatatgatgctagccccagggttcctagtctaatggaggagataggggcctggtttttgtcttggcgatcccagtctgatgggggagatgggagcaaatctatgccctggagactgcagagaaatggagatggatttcatggagtctacatggctcctccctggcaggacacactgggtcagaatcaaataacccatctgcggaggcaagactcacacagggccaccggcagagggatgggatggaagggaggcggtggcagggacaggagggatgtgtgtgcagtgtgatgttgaggtgccagtggaggcactcacagcacctgggggaggacgagggagagagccggctcctgtccatgagggctagggggcaagcgagggcctcctggcccctacccactttaaattgcctgcttctcctgcagcggtgaccacctgtcaggtgcctaccattgtggaagaggtccaggatggtaaggtcatctcctcccgcgagcaggtccgccagaccacccgctgaggactcagctttcccggccggccccccaggaggcagggaggcagcggtcccatctgccccgcggtctccggcctctccaccctcagccccctgcttcagtcccttcgccatgcttccctgcgtgatgacaat

SEQ ID NO: 68426 - DNA, 605 bp, Homo sapiens
tcccagacatttgtaactttggtttttcctgatttttatcctcacttgtacagatatttcttgggaggtacctaaggaagattttcatctccacccagcttccttcccttcttccatgccaggagttggcatgttcacaaaccacagattgtaaactggtacccattcatggagctgcagggagaaagggttgaccagagagccactcagtgcctggcatatccgtagtcctggagaacagagggtcatccttcctcagcgagtgggcttccaagaaatgcatttacaaaaattgttaagctattttgcatcatgctcagatttgccatgatcaaaactaacccttcagtctaaatcgcctgtcaggtggaaattaacaaccagctggagtctcatgcttttcaacattttagtagcagcatctccccatccattctgccttactgctgggctcctaaaaaaataagagtgaggctgggcatggtgactcacatctgtaatcccagctttttgggagtccgaggtgagggaatcatctgaggccaggagtttgagaccagcctgagcaacatagcaaggcctcctcaccccgatctctgaaagag

SEQ ID NO: 68427 - DNA, 726 bp, Homo sapiens
ccattcattcataaagatctggatttgctttaccttgttaatattatctaggggaaaaagtgcaaattgctccatgttcttctctcccttatgtaacatctcctgagggtgtttagttgcatggctgttcagaaaggtattaagggcttaggccaaatcttactttgagtatgttaaaaaaaaaaaaatgctgctggcttttctgaagacaggtgcttgaacttgtcagtttgttttaaataaatacaatagttgaaaatttttctctgttacatcagtaatattgttaaagtaatggatagaaccataacttacacatgaaagtcatatactagatccaatactatttagtttattatcgaaattggaaggattcattgagcagcatagaagtttgtttacatgttactttgagatgctaggtatttgtggaattaaaaagaatcaggctcttttgtactttgtttttaaatctgtgatgcttttcaaatttaattcataataaattgatgcaatttcatacttaggaacatacaaaaggtaatgtaaactctgccacttttttgtgttcaaaattttggtttttatgaagccagatggattgaagagttacataagcatttgaatgctctaatataaggctaatgattttctgttagtgtttgaatatcttcattcctctcaaattcataacagttctatttaactgaattaaataaccatatg

SEQ ID NO: 68428 - DNA, 316 bp, Homo sapiens
tgactgccccctatctaggaaattaaaaatcactggagagattttttttttaaaaagggcaataacagataagtacatagttcttgctttctcagccagccctattaatactttttagaatctcaaatgactgatactgttaactatgtggctaattttaagagggagagtaaaactttttctaaacgactcaagtatcatactctctcagttgttccaagatctcagatttgtgactgtacttattcaaagaatgtcatgcatttgcttttctcttcaagaatgtaacattacaaatgtcttttaaatatgattt

SEQ ID NO: 68429 - DNA, 383 bp, Homo sapiens
tttaatctctgtttagctttttgtgtaaaaggcaggctaggagaggaagtttaaagaattgtctataatagagtttgatttccttctcttttactttctctccattggtaattgattgttaatcataagttctaggcctgtctcttttttttaaaagaaagaaaatgaaatgcattaagctgtgttattgtagtatcatagcagaaatgtagataatgcaccaaagttaagttcagttttggagctcagtgacacctaattcaattatgaatgatctgatagtaacaacatctgtgaaatgtaaaaaaatgttttgttactgtaaaattgcattttataatatatgtacatttatatacaatagcacactttaaaaaatgagt

SEQ ID NO: 68430 - DNA, 343 bp, Homo sapiens
ctacaatagaaggcaaactatgtccctcctttgctcagaaacttttaatatcttcctatttccccatgtaaaagccaatcctcaaccacagtgtagaagggctatccatttctagctacacatctcctcagtcactgcccccagccccagtacttggggactttgcccttgcagttccctgtgccagcaaactcttcctccagatgtccacatgactcacccccctccttcaggggtcttctcaaatgtcactttaccagaggtggcttccctgaccatcctgtataaatagcatcaccctacctcctatctctctctctactggctttttaattatttttat

SEQ ID NO: 68431 - DNA, 3064 bp, Homo sapiens
aggcggaggaggaggcggaggagggggcggggactaagcagggcggtagctggcgccgagcgcggtgggagaggagagggtacccggctggctcggctggcggcctctgcctggatctcggcgccgcagtcctgcgcctctcccgcccctgtctcccgctccgcagccccgggcacggcggaggcagcggagccctgggccatcgtacctggagtagaacagaaaaattattatgtctgtgttcccttgggactcattggaaattgtacagtgacatcttctgggatttagtctggattgtgcagactggtgcttaaaatggaagtcgatattaatggagagtctagaagtaccctgaccaccttgcccttccctggggctgaggccaactccccgggaaaggcggaggcagagaagccccgctgctccagcacaccctgctccccgatgcggaggaccgtgtcaggctaccagatcctacacatggactctaactatttggttggcttcacgactggcgaggaactcctgaagttagctcagaagtgcacaggaggtgaagagagcaaagcagaagccatgccatccttacgctccaaacagctagatgcaggacttgcccgttcctctcgtttgtataaaaccagaagtaggtactaccagccatacgagattccagctgtcaatggcaggaggcgaaggcggatgccaagctcaggagacaagtgcactaaatctttaccttatgaaccttacaaggccctccatgggcctctgcctctttgtcttcttaaaggtaagagggctcactccaaatctctggactacctcaatctagataaaatgatcaaggagccagctgatacagaagtgctacagtaccagcttcaacacctaaccctccgaggggaccgtgtgtttgctaggaataatacatgaatgacttggagagagcttaaaccaatttaggtcagcctacgcttggctagaaaaaacccactgctgtactctgtacatgactcttcacactatagatggttatatcagctaagtgttcctggaacataaaaattgtttgggtcaaatttgaatacaggaatgaaatcacaggtacttgggggggggatatcattctagagcacgcaactgcaaagaaaacagaatgttgactgttagtttgtatagctttttagctaggaaaaaaaggctttggtacagtaatttcatctttatgattctgacactcaaattgggaatgttacctgcttggttgttgctgacttgatatgattcattagaaatttatatcttcagtactcaagtacttcttgaatctctgtattttactataaaatgtatgtaatgatttgttttatgaaatttagaacttgaacattgctgaattggaccactttttatttttaaatattgagtttaaatattttataactggttttgcactgaaaaaattaacatttcagattgacaagagagtaatctttcttcacttgcctcaataatgttattgagcaatgaattttttatttccgcatggaaagttattgatctctatggctgtaaaatatttctttatagcgttattaaagtgtgtcttaataaaattaaatttgggatacaaagtatttattttacaatgggtgggcgggggaaacttttccagaaagtttccaatatgacgttttcataagttgaaaaaactctccttagtgcttattttctaacttaaaattcacctggaactttaaatgggaaaggattcttttaattgtggattataggcataatactgtttgcatctgaattttctgtaagtgaataatagtttaatagaggaactcatgatttgtactattgaatgattaaactaagtatgaagtgataccattcagcatggcatcaggtcattgcagttttagttctgtgtaacacaagcactcactgaaattccagtttctaggattagtgtaggagcctaacgtgcttctactgttttaatgggttaatcctggattacttaacaatttatgtcaattgcactggtttaatttgttgctaaagaaataatgccctgggtttagtaacaaatacagctcaactattcttgaatatattttgaaaaaaaaatgtatgtaacttaccttttgtaaacgttccatttcttttttccctcatttttgactcttaaaggtgcaatttattactgaattgggatttctggcagcacagaactgctttttattttggggtctgtgagtttcttaggtattagcaatcttgcttataaaataagaacaccttttaattaatgagtgggtcattcctggtgcaattgtgatttttctttagccagaatgaatggcaaactctatttagagcaaagtaagtattagaaaaccctaggaactcttaatcaacgtttattacactttcattaaggcaaactacgtgaaagagccttggggaagttggcccatatcttactaagttgatcagatttctcgttgggctggaaatgtttcgctgttgtatattttaaagtaaattgcacctttgtaacatattgtattgacgaatgatcactaagattagctatatctatacagtcattagtttgacaagaaatagaatcctgtcagatgccaaagagtgggatttttatgtttaatgattaaacaccattatttattgacaatttaccctgtggaactgtattatttctaactatgaaataaaggggtgatgtaaacacacattgttgtgtggtgctttaaactaggtccactatcaacaggctacttactgttcaagaattccactgaagcacttattttaaggccctatttttcttaaacaaaacagtgacaacaacaatcaaaccatttacttttgatgctcattggcattttatgataaaagatgtattcatggcaatgatatgtattcaccctattaggaaacacaactggttacctatgagacctgttctgtccgtgtgcctacgttccttaataatagctaaataaaaatttgtagctttttttgt

SEQ ID NO: 68432 - DNA, 2771 bp, Homo sapiens
aggcggaggaggaggcggaggagggggcggggactaagcagggcggtagctggcgccgagcgcggtgggagaggagagggtacccggctggctcggctggcggcctctgcctggatctcggcgccgcagtcctgcgcctctcccgcccctgtctcccgctccgcagccccgggcacggcggaggcagcggagccctgggccatcgtacctggagtagaacagaaaaattattatgtctgtgttcccttgggactcattggaaattgtacagtgacatcttctgggatttagtctggattgtgcagactggtgcttaaaatggaagtcgatattaatggagagtctagaagtaccctgaccaccttgcccttccctggggctgaggccaactccccgggaaaggcggaggcagagaagccccgctgctccagcacaccctgctccccgatgcggaggaccgtgtcaggctaccagatcctacacatggactctaactatttggttggcttcacgactggcgaggaactcctgaagttagctcagaagtgcacaggaggtgaagagagcaaagcagaagccatgccatccttacgctccaaacagctagatgcaggacttgcccgttcctctcgtttgtataaaaccagaagtaggtactaccagccatacgagattccagctgtcaatggcaggaggcgaaggcggatgccaagctcaggagacaagtgcactaaatctttaccttatgaaccttacaaggccctccatgggcctctgcctctttgtcttcttaaaggtaagagggctcactccaaatctctggactacctcaatctagataaaatgatcaaggagccagctgatacagaagtgctacagtaccagcttcaacacctaaccctccgaggggaccgtgtgtttgctaggaataatacatgaatgacttggagagagcttaaaccaatttaggtcagcctacgcttggctagaaaaaacccactgctgtactctgtacatgactcttcacactatagatggttatatcagctaagtgttcctggaacataaaaattgtttgggtcaaatttgaatacaggaatgaaatcacaggtacttgggggggggatatcattctagagcacgcaactgcaaagaaaacagaatgttgactgttagtttgtatagctttttagctaggaaaaaaaggctttggtacagtaatttcatctttatgattctgacactcaaattgggaatgttacctgcttggttgttgctgacttgatatgattcattagaaatttatatcttcagtactcaagtacttcttgaatctctgtattttactataaaatgtatgtaatgatttgttttatgaaatttagaacttgaacattgctgaattggaccactttttatttttaaatattgagtttaaatattttataactggttttgcactgaaaaaattaacatttcagattgacaagagagtaatctttcttcacttgcctcaataatgttattgagcaatgaattttttatttccgcatggaaagttattgatctctatggctgtaaaatatttctttatagcgttattaaagtgtgtcttaataaaattaaatttgggatacaaagtatttattttacaatgggtgggcgggggaaacttttccagaaagtttccaatatgacgttttcataagttgaaaaaactctccttagtgcttattttctaacttaaaattcacctggaactttaaatgggaaaggattcttttaattgtggattataggcataatactgtttgcatctgaattttctgtaagtgaataatagtttaatagaggaactcatgatttgtactattgaatgattaaactaagtatgaagtgataccattcagcatggcatcaggtcattgcagttttagttctgtgtaacacaagcactcactgaaattccagtttctaggattagtgtaggagcctaacgtgcttctactgttttaatgggttaatcctggattacttaacaatttatgtcaattgcactggtttaatttgttgctaaagaaataatgccctgggtttagtaacaaatacagctcaactattcttgaatatattttgaaaaaaaaatgtatgtaacttaccttttgtaaacgttccatttcttttttccctcatttttgactcttaaaggtgcaatttattactgaattgggatttctggcagcacagaactgctttttattttggggtctgtgagtttcttaggtattagcaatcttgcttataaaataagaacaccttttaattaatgagtgggtcattcctggtgcaattgtgatttttctttagccagaatgaatggcaaactctatttagagcaaagtaagtattagaaaaccctaggaactcttaatcaacgtttattacactttcattaaggcaaactacgtgaaagagccttggggaagttggcccatatcttactaagttgatcagatttctcgttgggctggaaatgtttcgctgttgtatattttaaagtaaattgcacctttgtaacatattgtattgacgaatgatcactaagattagctatatctatacagtcattagtttgacaagaaatagaatcctgtcagatgccaaagagtgggatttttatgtttaatgattaaacaccattatttattgacaatttaccctgtggaactgtattatttctaactatgaaataaaggggtgatgtaaacaca

SEQ ID NO: 68433 - DNA, 2377 bp, Homo sapiens
aggcggaggaggaggcggaggagggggcggggactaagcagggcggtagctggcgccgagcgcggtgggagaggagagggtacccggctggctcggctggcggcctctgcctggatctcggcgccgcagtcctgcgcctctcccgcccctgtctcccgctccgcagccccgggcacggcggaggcagcggagccctgggccatcgtacctggagtagaacagaaaaattattatgtctgtgttcccttgggactcattggaaattgtacagtgacatcttctgggatttagtctggattgtgcagactggtgcttaaaatggaagtcgatattaatggagagtctagaagtaccctgaccaccttgcccttccctggggctgaggccaactccccgggaaaggcggaggcagagaagccccgctgctccagcacaccctgctccccgatgcggaggaccgtgtcaggctaccagatcctacacatggactctaactatttggttggcttcacgactggcgaggaactcctgaagttagctcagaagtgcacaggaggtgaagagagcaaagcagaagccatgccatccttacgctccaaacagctagatgcaggacttgcccgttcctctcgtttgtataaaaccagaagtaggtactaccagccatacgagattccagctgtcaatggcaggaggcgaaggcggatgccaagctcaggagacaagtgcactaaatctttaccttatgaaccttacaaggccctccatgggcctctgcctctttgtcttcttaaaggtaagagggctcactccaaatctctggactacctcaatctagataaaatgatcaaggagccagctgatacagaagtgctacagtaccagcttcaacacctaaccctccgaggggaccgtgtgtttgctaggaataatacatgaatgacttggagagagcttaaaccaatttaggtcagcctacgcttggctagaaaaaacccactgctgtactctgtacatgactcttcacactatagatggttatatcagctaagtgttcctggaacataaaaattgtttgggtcaaatttgaatacaggaatgaaatcacaggtacttgggggggggatatcattctagagcacgcaactgcaaagaaaacagaatgttgactgttagtttgtatagctttttagctaggaaaaaaaggctttggtacagtaatttcatctttatgattctgacactcaaattgggaatgttacctgcttggttgttgctgacttgatatgattcattagaaatttatatcttcagtactcaagtacttcttgaatctctgtattttactataaaatgtatgtaatgatttgttttatgaaatttagaacttgaacattgctgaattggaccactttttatttttaaatattgagtttaaatattttataactggttttaggaactcatgatttgtactattgaatgattaaactaagtatgaagtgataccattcagcatggcatcaggtcattgcagttttagttctgtgtaacacaagcactcactgaaattccagtttctaggattagtgtaggagcctaacgtgcttctactgttttaatgggttaatcctggattacttaacaatttatgtcaattgcactggtttaatttgttgctaaagaaataatgccctgggtttagtaacaaatacagctcaactattcttgaatatattttgaaaaaaaaatgtatgtaacttaccttttgtaaacgttccatttcttttttccctcatttttgactcttaaaggtgcaatttattactgaattgggatttctggcagcacagaactgctttttattttggggtctgtgagtttcttaggtattagcaatcttgcttataaaataagaacaccttttaattaatgagtgggtcattcctggtgcaattgtgatttttctttagccagaatgaatggcaaactctatttagagcaaagtaagtattagaaaaccctaggaactcttaatcaacgtttattacactttcattaaggcaaactacgtgaaagagccttggggaagttggcccatatcttactaagttgatcagatttctcgttgggctggaaatgtttcgctgttgtatattttaaagtaaattgcacctttgtaacatattgtattgacgaatgatcactaagattagctatatctatacagtcattagtttgacaagaaatagaatcctgtcagatgccaaagagtgggatttttatgtttaatgattaaacaccattatttattgacaatttaccctgtggaactgtattatttctaactatgaaataaaggggtgatgtaaacaca

SEQ ID NO: 68434 - DNA, 2779 bp, Homo sapiens
aggcggaggaggaggcggaggagggggcggggactaagcagggcggtagctggcgccgagcgcggtgggagaggagagggtacccggctggctcggctggcggcctctgcctggatctcggcgccgcagtcctgcgcctctcccgcccctgtctcccgctccgcagccccgggcacggcggaggcagcggagccctgggccatcgtacctggagtagaacagaaaaattattatgtctgtgttcccttgggactcattggaaattgtacagtgacatcttctgggatttagtctggattgtgcagactggtgcttaaaatggaagtcgatattaatggagagtctagaagtaccctgaccaccttgcccttccctggggctgaggccaactccccgggaaaggcggaggcagagaagccccgctgctccagcacaccctgctccccgatgcggaggaccgtgtcaggctaccagatcctacacatggactctaactatttggttggcttcacgactggcgaggaactcctgaagttagctcagaagtgcacaggaggtgaagagagcaaagcagaagccatgccatccttacgctccaaacagctagatgcaggacttgcccgttcctctcgtttgtataaaaccagaagtaggtactaccagccatacgagattccagctgtcaatggcaggaggcgaaggcggatgccaagctcaggagacaagtgcactaaatctttaccttatgaaccttacaaggccctccatgggcctctgcctctttgtcttcttaaaggtaagagggctcactccaaatctctggactacctcaatctagataaaatgatcaaggagccagctgatacagaagtgctacagtaccagcttcaacacctaaccctccgaggggaccgtgtgtttgctaggaataatacatgaatgacttggagagagcttaaaccaatttaggtcagcctacgcttggctagaaaaaacccactgctgtactctgtacatgactcttcacactatagatggttatatcagctaagtgttcctggaacataaaaattgtttgggtcaaatttgaatacaggaatgaaatcacaggtacttgggggggggatatcattctagagcacgcaactgcaaagaaaacagaatgttgactgttagtttgtatagctttttagctaggaaaaaaaggctttggtacagtaatttcatctttatgattctgacactcaaattgggaatgttacctgcttggttgttgctgacttgatatgattcattagaaatttatatcttcagtactcaagtacttcttgaatctctgtattttactataaaatgtatgtaatgatttgttttatgaaatttagaacttgaacattgctgaattggaccactttttatttttaaatattgagtttaaatattttataactggttttgcactgaaaaaattaacatttcagattgacaagagagtaatctttcttcacttgcctcaataatgttattgagcaatgaattttttatttccgcatggaaagttattgatctctatggctgtaaaatatttctttatagcgttattaaagtgtgtcttaataaaattaaatttgggatacaaagtatttattttacaatgggtgggcgggggaaacttttccagaaagtttccaatatgacgttttcataagttgaaaaaactctccttagtgcttattttctaacttaaaattcacctggaactttaaatgggaaaggattcttttaattgtggattataggcataatactgtttgcatctgaattttctgtaagtgaataatagtttaatagaggaactcatgatttgtactattgaatgattaaactaagtatgaagtgataccattcagcatggcatcaggtcattgcagttttagttctgtgtaacacaagcactcactgaaattccagtttctaggattagtgtaggagcctaacgtgcttctactgttttaatgggttaatcctggattacttaacaatttatgtcaattgcactggtttaatttgttgctaaagaaataatgccctgggtttagtaacaaatacagctcaactattcttgaatatattttgaaaaaaaaatgtatgtaacttaccttttgtaaacgttccatttcttttttccctcatttttgactcttaaaggtgcaatttattactgaattgggatttctggcagcacagaactgctttttattttggggtctgtgagtttcttaggtattagcaatcttgcttataaaataagaacaccttttaattaatgagtgggtcattcctggtgcaattgtgatttttctttagccagaatgaatggcaaactctatttagagcaaagtaagtattagaaaaccctaggaactcttaatcaacgtttattacactttcattaaggcaaactacgtgaaagagccttggggaagttggcccatatcttactaagttgatcagatttctcgttgggctggaaatgtttcgctgttgtatattttaaagtaaattgcacctttgtaacatattgtattgacgaatgatcactaagattagctatatctatacagtcattagtttgacaagaaatagaatcctgtcagatgccaaagagtgggatttttatgtttaatgattaaacaccattatttattgacatcacccctttatttcatagttagaaataatacagttccacagggtaaattgtcaataaagtcgacgc

SEQ ID NO: 68435 - DNA, 1366 bp, Homo sapiens
  misc_feature (6)..(6): n is a, c, g, or t
ccaggnggcattcggtctagaactaccggatcccccgggctgcattaattcggcactgaaaaaattaacatttcagattgacaagagagtaatctttcttcacttgcctcaataatgttattgagcaatgaattttttatttccgcatggaaagttattgatctctatggctgtaaaatatttctttatagcgttattaaagtgtgtcttaataaaattaaatttgggatacaaagtatttattttacaatgggtgggcgggggaaacttttccagaaagtttccaatatgacgttttcataagttgaaaaaactctccttagtgcttattttctaacttaaaattcacctggaactttaaatgggaaaggattcttttaattgtggattataggcataatactgtttgcatctgaattttctgtaagtgaataatagtttaatagaggaactcatgatttgtactattgaatgattaaactaagtatgaagtgataccattcagcatggcatcaggtcattgcagttttagttctgtgtaacacaagcactcactgaaattccagtttctaggattagtgtaggagcctaacgtgcttctactgttttaatgggttaatcctggattacttaacaatttatgtcaattgcactggtttaatttgttgctaaagaaataatgccctgggtttagtaacaaatacagctcaactattcttgaatatattttgaaaaaaaaatgtatgtaacttaccttttgtaaacgttccatttcttttttccctcatttttgactcttaaaggtgcaatttattactgaattgggatttctggcagcacagaactgctttttattttggggtctgtgagtttcttaggtattagcaatcttgcttataaaataagaacaccttttaattaatgagtgggtcattcctggtgcaattgtgatttttctttagccagaatgaatggcaaactctatttagagcaaagtaagtattagaaaaccctaggaactcttaatcaacgtttattacactttcattaaggcaaactacgtgaaagagccttggggaagttggcccatatcttactaagttgatcagatttctcgttgggctggaaatgtttcgctgttgtatattttaaagtaaattgcacctttgtaacatattgtattgacgaatgatcactaagattagctatatctatacagtcattagtttgacaagaaatagaatcctgtcagatgccaaagagtgggatttttatgtttaatgattaaacaccattatttattgacaatttaccctgtggaactgtattatttctaactatgaaataaaggggtgatgtaaacaca

SEQ ID NO: 68436 - DNA, 2559 bp, Homo sapiens
  misc_feature (2559)..(2559): n is a, c, g, or t
aggcggaggaggaggcggaggagggggcggggactaagcagggcggtagctggcgccgagcgcggtgggagaggagagggtacccggctggctcggctggcggcctctgcctggatctcggcgccgcagtcctgcgcctctcccgcccctgtctcccgctccgcagccccgggcacggcggaggcagcggagccctgggccatcgtacctggagtagaacagaaaaattattatgtctgtgttcccttgggactcattggaaattgtacagtgacatcttctgggatttagtctggattgtgcagactggtgcttaaaatggaagtcgatattaatggagagtctagaagtaccctgaccaccttgcccttccctggggctgaggccaactccccgggaaaggcggaggcagagaagccccgctgctccagcacaccctgctccccgatgcggaggaccgtgtcaggctaccagatcctacacatggactctaactatttggttggcttcacgactggcgaggaactcctgaagttagctcagaagtgcacaggaggtgaagagagcaaagcagaagccatgccatccttacgctccaaacagctagatgcaggacttgcccgttcctctcgtttgtataaaaccagaagtaggtactaccagccatacgagattccagctgtcaatggcaggaggcgaaggcggatgccaagctcaggagacaagtgcactaaatctttaccttatgaaccttacaaggccctccatgggcctctgcctctttgtcttcttaaaggtaagagggctcactccaaatctctggactacctcaatctagataaaatgatcaaggagccagctgatacagaagtgctacagtaccagcttcaacacctaaccctccgaggggaccgtgtgtttgctaggaataatacatgaatgacttggagagagcttaaaccaatttaggtcagcctacgcttggctagaaaaaacccactgctgtactctgtacatgactcttcacactatagatggttatatcagctaagtgttcctggaacataaaaattgtttgggtcaaatttgaatacaggaatgaaatcacaggtacttgggggggggatatcattctagagcacgcaactgcaaagaaaacagaatgttgactgttagtttgtatagctttttagctaggaaaaaaaggctttggtacagtaatttcatctttatgattctgacactcaaattgggaatgttacctgcttggttgttgctgacttgatatgattcattagaaatttatatcttcagtactcaagtacttcttgaatctctgtattttactataaaatgtatgtaatgatttgttttatgaaatttagaacttgaacattgctgaattggaccactttttatttttaaatattgagtttaaatattttataactggttttgcactgaaaaaattaacatttcagattgacaagagagtaatctttcttcacttgcctcaataatgttattgagcaatgaattttttatttccgcatggaaagttattgatctctatggctgtaaaatatttctttatagcgttattaaagtgtgtcttaataaaattaaatttgggatacaaagtatttattttacaatgggtgggcgggggaaacttttccagaaagtttccaatatgacgttttcataagttgaaaaaactctccttagtgcttattttctaacttaaaattcacctggaactttaaatgggaaaggattcttttaattgtggattataggcataatactgtttgcatctgaattttctgtaagtgaataatagtttaatagaggaactcatgatttgtactattgaatgattaaactaagtatgaagtgataccattcagcatggcatcaggtcattgcagttttagttctgtgtaacacaagcactcactgaaattccagtttctaggattagtgtaggagcctaacgtgcttctactgttttaatgggttaatcctggattaaccctggattcccgtcgtaacttaaagggaaactttcacaatgtccggagcccttgatgtcctgcaaatgaaggaggaggatgtccttaagttccttgcagcaggaacccacttaggtggcaccaatcttgacttccagatggaacagtacatctataaaaggaaaagtgatggcatctatatcataaatctcaagaggacctgggagaagcttctgctggcagctcgtgcaattgttgccattgaaaaccctgctgatgtcagtgttatatcctccaggaatactggccagagggctgtgctgaagttgctgctgccactggagccactccaattgctggccgcttcactcctggaaccttcactaaccagatccaggcagcttcccgggagcccggcttcttgtggttctgacccagggttggacacagctctcacgaggctctatttacctactacatgggcgggtacccagatttctctgggtttggatgcccccggacaaggggcccacggttagggggn

SEQ ID NO: 68437 - DNA, 1625 bp, Homo sapiens
aggcggaggaggaggcggaggagggggcggggactaagcagggcggtagctggcgccgagcgcggtgggagaggagagggtacccggctggctcggctggcggcctctgcctggatctcggcgccgcagtcctgcgcctctcccgcccctgtctcccgctccgcagccccgggcacggcggaggcagcggagccctgggccatcgtacctggagtagaacagaaaaattattatgtctgtgttcccttgggactcattggaaattgtacagtgacatcttctgggatttagtctggattgtgcagactggtgcttaaaatggaagtcgatattaatggagagtctagaagtaccctgaccaccttgcccttccctggggctgaggccaactccccgggaaaggcggaggcagagaagccccgctgctccagcacaccctgctccccgatgcggaggaccgtgtcaggctaccagatcctacacatggactctaactatttggttggcttcacgactggcgaggaactcctgaagttagctcagaagtgcacaggaggtgaagagagcaaagcagaagccatgccatccttacgctccaaacagctagatgcaggacttgcccgttcctctcgtttgtataaaaccagaagtaggtactaccagccatacgagattccagctgtcaatggcaggaggcgaaggcggatgccaagctcaggagacaagtgcactaaatctttaccttatgaaccttacaaggccctccatgggcctctgcctctttgtcttcttaaaggtaagagggctcactccaaatctctggactacctcaatctagataaaatgatcaaggagccagctgatacagaagtgctacagtaccagcttcaacacctaaccctccgaggggaccgtgtgtttgctaggaataatacatgaatgacttggagagagcttaaaccaatttaggtcagcctacgcttggctagaaaaaacccactgctgtactctgtacatgactcttcacactatagatggttatatcagctaagtgttcctggaacataaaaattgtttgggtcaaatttgaatacaggaatgaaatcacaggtacttgggggggggatatcattctagagcacgcaactgcaaagaaaacagaatgttgactgttagtttgtatagctttttagctaggaaaaaaaggctttggtacagtaatttcatctttatgattctgacactcaaattgggaatgttacctgcttggttgttgctgacttgatatgattcattagaaatttatatcttcagtactcaagtacttcttgaatctctgtattttactataaaatgtatgtaatgatttgttttatgaaatttagaacttgaacattgctgaattggaccactttttatttttaaatattgagtttaaatattttataactggttttgcactgaaaaaattaacatttcagattgacaagagagtaatctttcttcacttgcctcaataatgttattgagcaatgaattttttatttccgcatggaaagttattgatctctatggctgtaaaatatttctttatagcgttattaaagtgtgtcttaataaaatta

SEQ ID NO: 68438 - DNA, 2712 bp, Homo sapiens
aggcggaggaggaggcggaggagggggcggggactaagcagggcggtagctggcgccgagcgcggtgggagaggagagggtacccggctggctcggctggcggcctctgcctggatctcggcgccgcagtcctgcgcctctcccgcccctgtctcccgctccgcagccccgggcacggcggaggcagcggagccctgggccatcgtacctggagtagaacagaaaaattattatgtctgtgttcccttgggactcattggaaattgtacagtgacatcttctgggatttagtctggattgtgcagactggtgcttaaaatggaagtcgatattaatggagagtctagaagtaccctgaccaccttgcccttccctggggctgaggccaactccccgggaaaggcggaggcagagaagccccgctgctccagcacaccctgctccccgatgcggaggaccgtgtcaggctaccagatcctacacatggactctaactatttggttggcttcacgactggcgaggaactcctgaagttagctcagaagtgcacaggaggtgaagagagcaaagcagaagccatgccatccttacgctccaaacagctagatgcaggacttgcccgttcctctcgtttgtataaaaccagaagtaggtactaccagccatacgagattccagctgtcaatggcaggaggcgaaggcggatgccaagctcaggagacaagtgcactaaatctttaccttatgaaccttacaaggccctccatgggcctctgcctctttgtcttcttaaaggtaagagggctcactccaaatctctggactacctcaatctagataaaatgatcaaggagccagctgatacagaagtgctacagtaccagcttcaacacctaaccctccgaggggaccgtgtgtttgctaggaataatacatgaatgacttggagagagcttaaaccaatttaggtcagcctacgcttggctagaaaaaacccactgctgtactctgtacatgactcttcacactatagatggttatatcagctaagtgttcctggaacataaaaattgtttgggtcaaatttgaatacaggaatgaaatcacaggtacttgggggggggatatcattctagagcacgcaactgcaaagaaaacagaatgttgactgttagtttgtatagctttttagctaggaaaaaaaggctttggtacagtaatttcatctttatgattctgacactcaaattgggaatgttacctgcttggttgttgctgacttgatatgattcattagaaatttatatcttcagtactcaagtacttcttgaatctctgtattttactataaaatgtatgtaatgatttgttttatgaaatttagaacttgaacattgctgaattggaccactttttatttttaaatattgagtttaaatattttataactggttttgcactgaaaaaattaacatttcagattgacaagagagtaatctttcttcacttgcctcaataatgttattgagcaatgaattttttatttccgcatggaaagttattgatctctatggctgtaaaatatttctttatagcgttattaaagtgtgtcttaataaaattaaatttgggatacaaagtatttattttacaatgggtgggcgggggaaacttttccagaaagtttccaatatgacgttttcataagttgaaaaaactctccttagtgcttattttctaacttaaaattcacctggaactttaaatgggaaaggattcttttaattgtggattataggcataatactgtttgcatctgaattttctgtaagtgaataatagtttaatagaggaactcatgatttgtactattgaatgattaaactaagtatgaagtgataccattcagcatggcatcaggtcattgcagttttagttctgtgtaacacaagcactcactgaaattccagtttctaggattagtgtaggagcctaacgtgcttctactgttttaatgggttaatcctggattacttaacaatttatgtcaattgcactggtttaatttgttgctaaagaaataatgccctgggtttagtaacaaatacagctcaactattcttgaatatattttgaaaaaaaaatgtatgtaacttaccttttgtaaacgttccatttcttttttccctcatttttgactcttaaaggtgcaatttattactgaattgggatttctggcagcacagaactgctttttattttggggtctgtgagtttcttaggtattagcaatcttgcttataaaataagaacaccttttaattaatgagtgggtcattcctggtgcaattgtgatttttctttagccagaatgaatggcaaactctatttagagcaaagtaagtattagaaaaccctaggaactcttaatcaacgtttattacactttcattaaggcaaactacgtgaaagagccttggggaagttggcccatatcttactaagttgatcagatttctcgttgggctggaaatgtttcgctgttgtatattttaaagtaaattgcacctttgtaacatattgtattgacgaatgatcactaagattagctatatctatacagtcattagtttgacaagaaatagaatcctgtcagatgccaaagagtgggatttttatgtttaatgattaaacaccattatttattgaca

SEQ ID NO: 68439 - DNA, 2956 bp, Homo sapiens
cgcgcacgctcgctcgctccctcccttggccgctgttcccgcaccgcggggcagcgggcctggaggcccctttgagaagtagctttccccggccggcggcacctttggctgcgtgcccggccgcgctcagggtgcgactgcccgggtcagatagcacctcagggcgagccccggcggtctgatctcgccgaccctcctcgtcctggttgcaacccgcgtgcgaggccgcccgcgccctccgagtgtctgccggtgcagtgggggtggactggccggctgtggccgtgtgtgcgcgtgtggattggggcccggtccgagccagaagcttaagcggcagatgtcgggcattgccaccctcgccccacctgtcgcgggtggactttggggcagtacctggagtagaacagaaaaattattatgtctgtgttcccttgggactcattggaaattgtacagtgacatcttctgggatttagtctggattgtgcagactggtgcttaaaatggaagtcgatattaatggagagtctagaagtaccctgaccaccttgcccttccctggggctgaggccaactccccgggaaaggcggaggcagagaagccccgctgctccagcacaccctgctccccgatgcggaggaccgtgtcaggctaccagatcctacacatggactctaactatttggttggcttcacgactggcgaggaactcctgaagttagctcagaagtgcacaggaggtgaagagagcaaagcagaagccatgccatccttacgctccaaacagctagatgcaggacttgcccgttcctctcgtttgtataaaaccagaagtaggtactaccagccatacgagattccagctgtcaatggcaggaggcgaaggcggatgccaagctcaggagacaagtgcactaaatctttaccttatgaaccttacaaggccctccatgggcctctgcctctttgtcttcttaaaggtaagagggctcactccaaatctctggactacctcaatctagataaaatgatcaaggagccagctgatacagaagtgctacagtaccagcttcaacacctaaccctccgaggggaccgtgtgtttgctaggaataatacatgaatgacttggagagagcttaaaccaatttaggtcagcctacgcttggctagaaaaaacccactgctgtactctgtacatgactcttcacactatagatggttatatcagctaagtgttcctggaacataaaaattgtttgggtcaaatttgaatacaggaatgaaatcacaggtacttgggggggggatatcattctagagcacgcaactgcaaagaaaacagaatgttgactgttagtttgtatagctttttagctaggaaaaaaaggctttggtacagtaatttcatctttatgattctgacactcaaattgggaatgttacctgcttggttgttgctgacttgatatgattcattagaaatttatatcttcagtactcaagtacttcttgaatctctgtattttactataaaatgtatgtaatgatttgttttatgaaatttagaacttgaacattgctgaattggaccactttttatttttaaatattgagtttaaatattttataactggttttgcactgaaaaaattaacatttcagattgacaagagagtaatctttcttcacttgcctcaataatgttattgagcaatgaattttttatttccgcatggaaagttattgatctctatggctgtaaaatatttctttatagcgttattaaagtgtgtcttaataaaattaaatttgggatacaaagtatttattttacaatgggtgggcgggggaaacttttccagaaagtttccaatatgacgttttcataagttgaaaaaactctccttagtgcttattttctaacttaaaattcacctggaactttaaatgggaaaggattcttttaattgtggattataggcataatactgtttgcatctgaattttctgtaagtgaataatagtttaatagaggaactcatgatttgtactattgaatgattaaactaagtatgaagtgataccattcagcatggcatcaggtcattgcagttttagttctgtgtaacacaagcactcactgaaattccagtttctaggattagtgtaggagcctaacgtgcttctactgttttaatgggttaatcctggattacttaacaatttatgtcaattgcactggtttaatttgttgctaaagaaataatgccctgggtttagtaacaaatacagctcaactattcttgaatatattttgaaaaaaaaatgtatgtaacttaccttttgtaaacgttccatttcttttttccctcatttttgactcttaaaggtgcaatttattactgaattgggatttctggcagcacagaactgctttttattttggggtctgtgagtttcttaggtattagcaatcttgcttataaaataagaacaccttttaattaatgagtgggtcattcctggtgcaattgtgatttttctttagccagaatgaatggcaaactctatttagagcaaagtaagtattagaaaaccctaggaactcttaatcaacgtttattacactttcattaaggcaaactacgtgaaagagccttggggaagttggcccatatcttactaagttgatcagatttctcgttgggctggaaatgtttcgctgttgtatattttaaagtaaattgcacctttgtaacatattgtattgacgaatgatcactaagattagctatatctatacagtcattagtttgacaagaaatagaatcctgtcagatgccaaagagtgggatttttatgtttaatgattaaacaccattatttattgacaatttaccctgtggaactgtattatttctaactatgaaataaaggggtgatgtaaacaca

SEQ ID NO: 68440 - DNA, 281 bp, Homo sapiens
ttgagaggtggttaaaaagagcacaggcttggagtcagacctgggtttaaattctggttttgcttatttattagctgtgtgatcttgcggtccgtgtgatcttgaggtccgtacttaacttctctgttccccctgccccagcccccaacaacctagaaaagtaggaaaaatcatctctaccctgcaaggttgttgtgaggatgacacaaagcaaactcatcagacacacagtgtgtggcatgtagtaggtgctcattaaacacttgatctcctcctttaac

SEQ ID NO: 68441 - DNA, 277 bp, Homo sapiens
cacccacatcttgtcactagcataaggattcatccttgcagggagcatcccctcaagattgccctgaccttgagatcaaagtgggtatctactccccgaggccacaggttcctcaggctgctctgataccccagtctcctgcctccttggacagttctctgctggggatggtcaaaaactcacttattgggccagacgcggtggctcacgcctggaatcccagcactttgggaagctgaggcaggtggatcatttgaggtcaggagttcaagaccag

SEQ ID NO: 68442 - DNA, 367 bp, Homo sapiens
tcagggagaaacctaatcctttaatagaagaataaccatatacaatatttttaaaaggtgtcctaaagaaacctttcttatctactcttggaaagtaaaaatttgttatcaattataagggtgacgttggtattcatctcatttagcctcaatttctgtaacagtcaaagggtagaattttattaattcttcttatttatctatagcccatcttttccagaaagaatttaagggagcgacatagtcgagatgtttgtcccctccacatgtcatgttgcaatgtgatccccagtgctggaggtggggcctggtgggaggtattggggcatgggggcggatccctcatgaatagcctagcagcatcctc

SEQ ID NO: 68443 - DNA, 310 bp, Homo sapiens
gaaataatggccccctttgggaataaaagagatctcaaatcctgttgcagtcagtagcgctggctgtctgcagtacagatggttttcaatgattgtttcagaaattccttatcaacagaaaatgaacgagacggggagttttcagaaaataaatggatttgcagacaacttaacgtcatcatcgaagtcaccaaagaaagcaaagcagcgactggggaagctgaggctgaagtagcaagggcatgccacccaggctgctattccagtcgctgtgaaagcctggtcactgtctttgccacgcagaacacat

SEQ ID NO: 68444 - DNA, 653 bp, Homo sapiens
gggagtggatgaggatcactgtggcacctgggcctgcttatgctctcttcctccttcccattcgctggaacatggatgggcctgggacccagctctgactttgcaagtgaggacaatgctccaggcccaagtggaagtttctcaactactgacatttggggcaggacggttctttgttgtggggggcagtcccgtgcattgtaaaacattcagcagcatccatgtcctccactcactagataccagtatcacagcccaagtcatgacacccaaagtatctccagacgttgccaaacataccctggtgggaaaattcaccctagcagagaaccgctggcctagaggaaggcagagaaacgaggattcctgagttcctgcacggagcagagcagcccggggaccaacctggaatactcagttcagactactgaggaagacaaaataaacttttatgcttttaaaaaaaattatggacagaacaatatagacaaaaacaaaccaaactccattacacagctttgcttctttggttacaagtaggttgaacaatttcacagctttttattcccacccaaaaaaaggtcatacgacatgtgaaagcaaggatcgtggcattctctagaagtgaacaaatgacaagttcctcatcaaat

SEQ ID NO: 68445 - DNA, 607 bp, Homo sapiens
gtgggaggtcgggggcgtccccgcgggttaagcgtgcgagagagcgaggtgcaccagcgggcatggatggcctgtgcagagtccagtcttgtgagggcggcgaactaggcagcgaatcgcgggagtttcctattggcagcagtccgagtcccagacgttaatttgtaacaaaagtagcgatggccaagcccataaagggggcatctcggaaagccgttcgcatgcacggaagagatgaaagccccgtgcgcgctagaaaacggtttcgcaactcacttcgggaagcaaatgcgctgccccccaaaacataaagttggcgaactgtgcctgaccccgctggggttttggaatgcctcgtcctcacaggaaaaaaatccagggaaatcatcttttccttaaaaagcaaaagtgtccaaattatttctgtgactgaagtagtttgtctgcggttggccagtgacatggcaaggccttgtttgtgcatttaaggtaaatcagattctcttctaggagtctggaagagaacttccccaaagggcaccctctttcccttctgacacagaggaaataccacatataaagagctacaaatgtttgaaggagaaaa

SEQ ID NO: 68446 - DNA, 2051 bp, Homo sapiens
  misc_feature (1290)..(1290): n is a, c, g, or t
tgtgtctgcagcatttctgggctggctccaaagcacctctgtgcaggccctgtacagagctatctaccggtttctcctggctttagctctcctgggtgacccagaccagaccttctgatgtcataataaacatcatggagcttataaaattagagcaatgatgcattttttatgcctcaggaattacactgaattgttaatgtcttggaaaatggctgaatgctgcattcgtagctttcctttcccttaagggtgaattattgagcaggaatgctctctccccaggtccccgccctggctcagagatccctgtctgcacccagctgggcactaattgcaaggtccgatccattcccatcagtgttgaggagaggaagagaggtcttgttggagaagagtagccatcgaggaggggacagtggtgctagggcttccttcagcctcccagcccccagcacaggagagggagacagcagagagggccggagggagggagctggtggcttaaaatggagccgtttacaaccccgcacagcaaatggagccattgggaggacacttgaccgagaggagagcattgcttgagccaggggtgccgtctgcaggacagagacaggaggcagtgttgtttccagggcatcgtggaccatggcacaggtgagcaatttaaaaaggtgattggaatcatatgttagaataatgaccttagcagtcaaaggctcctggaatttgtcatttaatttcatattttaggtggactgatctgtaatttagttaatttcacatctccatctaggaaaactggagctctgcacaatattttctgcagacgacaaagtattcacccaaactatttctcatagtaaaatgtgctctttgtccccagagaactgctgaatactacataagatctgtgtaggagccatgctttaacaacaacaaacacctcagacacacaacaaccctttcctccctcgataaagatactgaaaagaatctggtctctggggtgaggagtaggggaagcaggtgcaagcaagtgggtgcagaggagtgggaagatggcattttgtgtaggaaagaatttaacgttgcccaaagagaggtctggcttttgtcctcaccttctgggaggtgaactctaagcccttggaatatcatgcctgattggagtttgtttgcctgggatccttgtgtcacagaatggtctaaccatatgatttagggtagatgctggccacactggataggtttagggtaggggttggctgtgccagaaagaccaacaangtgacttagggtggggtctttgggtcacgtggtatcagctgactctggaggagctggagagggagggcagtcacctgtgtgatggagccacaataaaaactctgaacactggggctatggtgagctgccctggttggcagtactccatgggtactgtcacacatcaatgccaggaaagtcatgcttttcatgattccatggggaagaggacagtggaagctccatgtctggtaccttcctggactatgccctatgcccttcctcccttggctgattttaatctgtatccttttgatgtaataatgtgcaactgtgagtatgagagcttttgatgagttctgcgtccttccagtgaatgatcaaacctgagggtggtctagggtaccccttgcagttggtgcagcaataaaggtggtcttatgtggatggtgctccctttaacttgacaggtggctaactgatatggttggctgtgtccccacccaaatctcatcttgaatttccatgtgttgtgggagggacccagtcgaagataattgaatcatggaggcaagtctttcctgtgttgttctcacgatagtgaatacatctcacgagatctgatggttttaaaaacaggagttgccctgtaagagctctttctccctttgcctgctaccatccatgtaagatgtgacttgctcctccttgccttccaccatgattgtgaaacttccccagccacgtggaactgtaagtccaattaaacccctttcttttgt

SEQ ID NO: 68447 - DNA, 368 bp, Homo sapiens
tacgcatagaagtctcctccagtcgttggcctgacatgacgctgcctgtgcacaggaaatggttccacgagaaagtgtggcaaagaacatttactgagaaacagcaagtacaagagcacaggaagctcaataaagaagagagagatcacatagcactctgggatactggagttcttcccagctagaccagagagtcctcacggagcacattgccaattcagtggagaccccagaacagccgtaatttaaaggtacacttagtatattactagaataaagtcagctgcagacaaccccttgcacagctggaaagcaagtgtccaagcatcaaatcggtttccaatcaatgaagtgcctgtgagaggaaa

SEQ ID NO: 68448 - DNA, 840 bp, Homo sapiens
acattctaactgcaacctttcgaagcctttgctctggcacaacaggtagtaggcgacactgttcgtgttgtcaacatgaccaacaagtgtctcctccaaattgctctcctgttgtgcttctccactacagctctttccatgagctacaacttgcttggattcctacaaagaagcagcaattttcagtgtcagaagctcctgtggcaattgaatgggaggcttgaatactgcctcaaggacaggatgaactttgacatccctgaggagattaagcagctgcagcagttccagaaggaggacgccgcattgaccatctatgagatgctccagaacatctttgctattttcagacaagattcatctagcactggctggaatgagactattgttgagaacctcctggctaatgtctatcatcagataaaccatctgaagacagtcctggaagaaaaactggagaaagaagatttcaccaggggaaaactcatgagcagtctgcacctgaaaagatattatgggaggattctgcattacctgaaggccaaggagtacagtcactgtgcctggaccatagtcagagtggaaatcctaaggaacttttacttcattaacagacttacaggttacctccgaaactgaagatctcctagcctgtgcctctgggactggacaattgcttcaagcattcttcaaccagcagatgctgtttaagtgactgatggctaatgtactgcatatgaaaggacactagaagattttgaaatttttattaaattatgagttatttttatttatttaaattttattttggaaaataaattatttttggtgcaaaagtca

SEQ ID NO: 68449 - DNA, 526 bp, Homo sapiens
atgggttcaagctcctcatacctgggcccatcccctgggtcctgcagtagcttcagagcttccctccttcttctcatatctctgggttgctacccaatgttcctttcatttctcacccacacctgcctactctagttctaataccaacttggtgacttcttgtcctgtgacaggacatgtgcctgtcagtgtccatgtagccctaacctcttttctttttcatggctgggcataaagggagagagctgagggcaataaaggatcaggggagaggctcctcctgctgattctttctaggagagagttgttagactggcagctggcaggtacccaagtcatagaagcaagacataagaggaaaagcctgaataatcaggtttgggagctggaatatattgaaaccttcttgggaggtttcagaatatattctagcttctcctctaagtgtaccaggaagctgggcagatcccagtccctgggcactgaatggggaaactgagacagaagctaggccttctgggaagac

SEQ ID NO: 68450 - DNA, 903 bp, Homo sapiens
ctgatgttggacgaatggcgctcttttctttaacatcatataggtgtagcaaagatgtaaaatgcttgtctttgggatgcaagaaatgaaggggctgttaaatgatgtaagcaaatattgagttgcgtcctttaaaaataaattatatgagaattttatcttaaattattttatctattacatggattcattcagataaaattacaactagttacaaaagatgactagagaattactttccttagagatcattcaaattaggtaaagatgcaataagcttaatgaaatcatgattatgtgactctacaataggagactttactatttctgaaatttttttaagattttatgtgaacactaataatatacagtgttcaattagttgcatgctagtgtttaaatatattattatcatttttattattatcatgtactacaactagcaaacctggaaggtcgtacgtacttaagatatgtcccacatggtgaatagcactcacactggtgaagtccagatgtaagatgaacattatctgaaattagcagcgactaaaagaagcaacacagaatagttcttatgatgataacacagctcccatgtggcatctgtggttagctttctggctcttagatattagtcttaaactctccctaaattgtgggcagactcattcgcatgctactcacaaattcacataattccattcccacaattgcagcatgccacacacgctgcttaaatacattgtcttaatacaacattcacatattctgtcaaacaatatgctatttgctaatgaaaatgagaatgcaaatgttcagaagactaaccattgcctctgcatttaaaaaaataaaacaaaacactcactatagattaggcgcctgaatgcttgtttacca

SEQ ID NO: 68451 - DNA, 3019 bp, Homo sapiens
  misc_feature (2223)..(2223): n is a, c, g, or t
  misc_feature (3013)..(3016): n is a, c, g, or t
  misc_feature (3019)..(3019): n is a, c, g, or t
atttgatgccagttcctggttgagagctcagctatggctattgactggatatctacacagggctgtcctcgtggcatgggagtctcacaatgacaactgagttctcagaaggagagtgcctacagcaggcactccaaaagaggtaggcagaaggtgtaacacttcatatgacctagctttgggaatcgtgcaatgttacttagttctgctttttaccaatcaagtgagtcacaggctgagtccagattcaggggaaaggaaactagactacatccctttatagggagaatgactaagaatttgtagccacctataatccagtatatgctctgaggtctcagttgcatctgtggttagactagagatatctggatccgtattaacacctactgtcaacaaacagagcaaacagtaggcttctaaggagattcataaaatgactaagctgtcgagatgttgtacacatacaaacacagacatacacatatgcgcacacacaagtatcttattgctaatggaatattactaaggatgaagaaaggccacttttttgagtggattttatttctcctttactgaaaactatcagcactttaagaaatatgaaataattttaaatgcattcctatgaactactgctcctttactttagtctcttgtgataactttatgagatatgcttggcctaatatgtttaaagttaaaggactaattgaggtgaaggcgattgtaagtctaaccattataatattaaaacctagcagagttgtaggaatatatttttttaaaataattcagacagcatactgctatacttaaagtcaagatgctaaagaagatattcacaagtcacctggctttatcacacggcttccagagaaggaaatgagtaaaattccaaagagaagtggtttgtagtcttctttaaaaactgttcttatgggccgggcgcggtggctcacgcctgtaatcccagcactttgggaggccgaggcaggctgatcacaaggtcaggaaatcaagaccatcctggctaacacggtgaaaccccgtgtctactaaaaatacaaaaaaaaaaaaaaaaaaaaaaattacccaggcatggtggcaggcgcctgtagtcccagctactcaggaggctgaggcaggagaatgacgtgaacccggggaggcagagcttgcagtgagctgagatcatgccactgcactccagccttggcgacagagcgagactctgtctctaaataaataaataaataaaacaaaatagaaaagttcttatcactagtacaaggagaaatccttggcttgtcctaatattaattcactgtcgtaatcacagcattcttccttgtttcctcagtgaactccttgaggacaaggaatagtgtcttgaaaacctctttaatcctcaaattaccaagtaccgtgcctagtatatgataaacaacaagcaataaagggatcaggtagtaaaagtaacatctgatcttcctggaaaatgggcactgaatgaccaacaagatttctaagcaattctattacacaaaattcttgaagataccacacagcttgctctttttcggtcaaagcaattctaacttaactaacacctgggaattcctgatatggtcataggaccctgtgctagagtctaaggaggaaaaatatgtataaaatgccgtcttatatattttatacacatgtgattttagtggattaatctggttcataaagtgttgtggggatactcaaattattatcacttatagtataaagaaaagatttagaataaatttacttttttcattctttttcaacaaagagaacaaaacgatcaggtacttttcgttttaaaaagggtctgaaaaaaatctatgttataaaagaagttttcatcgtagccattcagttaaagtaaaattttattggaaccaattttgacaggtttgtgaaaaattctgtctgtttcaggtagcagataataagcgaatttatgatttaaaaagcagtggtggccgggcatggtggctcacacctgtaatcccagcactttgaaaggccgaggcaggtggtttgtttgagctcaggagttcgagaccagcctgggtaacatggtgaaaccctgtctctactcaaaataaaaaaattagcttggcatagtggcacacgcctgtaatcccagctacttgggtggctgaggcaggagaatcacttgaaccngggagatggaggctgcagtgaaccaagatcaaaccactgcactccagcctggggtgacagagtgagaccctgtctcaaaaagtaaaataaaataaaataaaaataaagtaaaataaaaagcagtggtaacaagcagtgatcttataactttcattttctctagggcactcccagaccaagagatggattagctgtttgccacactcctttttattgctagtctccacgtcttaacctatgagagactgtataactgagctgtagatgaaataaggtgggccaaagcaatatatgccacaaggaatacccacaagcatgacttacgttagttttcctgctcgactctaggaaataaagcagaacatagactcagctgctccaccagccccagtgtccacctacctggaactcccataggtattaaataggtgaacattaaaaactttcagtttgctgatccattatatttctgagtacacttgttgttcagcctcacctaccccaatgaatatatgatatcagacatattaaaagacatctggattctgtattaaactattttctatccaagttttaaaagagtatctctatgatttcaaaaatatgtttgaatgaatatctttaatatacaattggctatatgctatctgtaattataccataagcctgggaatttttgttatgtaaaagtttaaatgacaaaatcctgacagatttaattaggtttttgtgaatgttaagttgacagctataggcaacaatatttcattaaagagatatttaaataaannnnaan

SEQ ID NO: 68452 - DNA, 2775 bp, Homo sapiens
tttactgcattttgaaagcttaggctgtatttagggtcaaaactgaacagtaagattcctttcctagctatgagcttcctgaatgaatatttaattggagagcctaccagtgagagaataaaggtagagtgatggtcacttgctgagatttgcagagacatcccaaagcatttaggggcagcatttgtagaaaattcctagaaagtgttttattgagcaactatttatagaatgctatttaggtcatttgttgctgcatagcaaatcaccccaaaacatagtgacttgaaacaatttctttgggagaccgaggtgggtggattacttgaggccaggagtttgagaccagcctggccaacatggtgaaacctcgtctctactaaaaatacaaaaattagctaggtgtggtggtgtgtgcctgtagtcccggccactcaggagactgaggcatgagacttgtttcaacttgggggcagaggttgtagtgagctgagatcacgctgctgcactccaacctgagtgacggagtgaaactctgtctcaacaacaacaacaacaacaaaaacaaaaacaaaacacaattttattatcgcgcatggctttttttttttttttttcttgcttggggtctctcgtggttgcagccagatggtagctgcagctggattcatctggaaggattcctgactcacatgtctggcagttgttgctggcattgtttgggactgacagtgaggaccatcagccagaacctacacatggcctccctgtgcggctcagtttcctcagagcatggtgggtgggcgccaagactgagtatctaagagagaggaactggaattctcttaaccctttgacctggaaactgtcaaaaatcacttctgtcatattctgtgggtcaagtctaagagcccaaattaaagagaagggcacatggaccctacctttcaatgggaggagtgtaacagaatttttaggttgtgtttttaaaccatcacaagagccaaccatttgctaggcactttggagaaacaccctctctttctgtcctcatgaagtttatagcctgggagatagatatcaatccaaaatcacaagaataaaagataaattgcaatatggtaagggttctgaaggagatatgatcagagagtctacaatatggggattgtattaatttgccgaggctgccataacaaggtatcacagaccaggtggcttgaacgatggactttgttttctctcagttctggaggctagaagtcccagatcaaggtgttagtaggtttggtttcttctgagaccttgctccttggctgccagactcctgctgttatccctctgtgtcctcacctggtctttctgctggatacatgctcattcttgtcctaacctcctctttttctcaggacaccaattgtattggattaggcgcacccatatgacctcattttgccttaataacctctttaaagggcctatgtaaatacattcacattctgaggtactgaggattaggattttagcagatgaattttggggggacaaaactaagctcatagcagggaattgcctaaagatttttttgtgttttttttgtctgtaggtatttcttgttatggatataaactcaaattttggagttttgaattatctgtttttagagattgtttatctaaaacctttttacatttgaataaaacgtttatgtggttccaaagtaaaatctgaagcctgttcaaagaaatctggcttccaaacttcaacctcatttcctctgaatgtccttctctatttgaccttggtataatacagttcatagtaattgtttcttactagtaattatttcaacccttctagactgcaagcttcatgaaggcagaaacttttattctcttgttcatagcatcatccacaaaaaatctaacactgtacctagaacacacttggtgtttggtgactagttgttgaatggacatgtggcattggagtttaaggtgtagactggaaccagtaggtttgggaattgtcttcattgtcttcatagaggctatgaaaatggatgagacccatctagtgggatgagttacaaaaagaaaaggcaaacagttgaaggtctatatttaggggacagaacaaggacggtaagcagagagaaaaaaggaacagttggagaaatggtaggaaagtgggagaaagtctgtatcaatgggcattgggaaagcatatatttaaaacggactccttagtcaagaagggcatggttgaaaagtgctgaactggacactggaagacattggttcaagttttgcttctaccttgatttgttgtgtgaccttgggcaaattagtctctgaaaatcagtttcttcacgtgtggaatgagaatcactgtatctatctgcattgtctacctcgtagggtatatgagcttcaagagataatagtgttaactcaaatctagaaacttcttagtgctttagaaatgtaaggttaaggctgggcacggtggctcacgcctgtaatcccagcactttgggaggccgaggtgggtggatcacctgaggtcaggagttcgagaccagcctcaatatggagaaaccccatctctactaaaaatacaaaattagccgggcatggtggtgcatgcctgtaatcccagctactcaggaggctgaggcaggagaattgcttgaacctgggaggcggaggttgtggtgagccaaggtcgcgccattgcactccagcctgggcaacaagggcaaaactctgtcac

SEQ ID NO: 68453 - DNA, 454 bp, Homo sapiens
atagcgtttctcttatttcaatttcttactcttctaggaagttttctcagctaagactgtcaaactagtgggctcttttaaatggtgtttgaaagaattttctcatataaatttcccagaaggatatcagtattttggggttagaaaatggcttagaatgtaagtggcaaaacttcaataacagctcccaaatggcagtccatttactcacatttgaggggattaattatcttggaattcaggtgtctttgttttaacagtattgttttcaaaatattttgaaagatgagcattgcttatgatttatacctgtctcttgtctaccccctttgaagtgctgctgatggctgctaagacccctggaaagagtggattttgaaatttcattttggggatgggaggagcggggagtacttttgccacataatactcttttaaagatcgaggaatgtgt

SEQ ID NO: 68454 - DNA, 466 bp, Homo sapiens
cagaacaaatcttttaataatataatgttatcaccatccttgttttacaaacaatgaaaccgaagcttaggtaatataactgactcaacatcatacgtgcagaggtaggtgaattatctccacagctctatgataatgacaggcattatcagtcattagcttcttctgaatttgtatcaactaaagctagcctatcatataataaagcttcgtggagtttgatggcagtagtgcccagtattggtgaagaaaaaaattcatgaggagaatctgaagctggagttccatggagagaaaacaggtttgggtggtccccttggcaactggaaagcatcctgggctattgtgctgctatagaacagtagaaagaatggagataatttagaaaggtgaggcagagaattccaaagacattttccaggaaggtttgaaaaggagaatttctgcagtgaacgatgcattgtat

SEQ ID NO: 68455 - DNA, 686 bp, Homo sapiens
tcccaccaacaatgtgaaagtgttcctatttctccacatcctctccagcacctgttgtttcctgactttttaatgatcaccattctaactggtgtgagaatgtttctttaagactctgcttccatctagaatgtttcttatccaatgataatgataatgatactccagggtaagaaaataagtcttagtttcatgtgagaatttttctttccccatggtgataaatagtagaagacttttcagggcacactgctcattgcattttctgggttttgtaaaaacttgggatataagaaaaataatgaaactaaacaagcagatttttttctaatcccaactttttaaagatatggtccaccttattatatgatcattagtgaagtgctagccttctcttagggagaaaattatgttcaatagtaggatatttccacatgcaaactagtagagttggttagtcagtttctaataaatatcaattgatatctgtttaaaatgacagcctccttttgttcccaaagctttatcttctcaaatatccatttttttgtgtgtgtatgtacttaacattttagttggtttgaaaagttttgaaattctaccagaaaatcaaactcacaaaatgcagaattataagactctgtattgatctttgggcagaacagactcatatgttcaataccaga

SEQ ID NO: 68456 - DNA, 3415 bp, Homo sapiens
  misc_feature (126)..(126): n is a, c, g, or t
  misc_feature (357)..(357): n is a, c, g, or t
  misc_feature (419)..(419): n is a, c, g, or t
  misc_feature (1551)..(1551): n is a, c, g, or t
  misc_feature (1563)..(1563): n is a, c, g, or t
  misc_feature (1581)..(1581): n is a, c, g, or t
  misc_feature (1586)..(1586): n is a, c, g, or t
  misc_feature (1717)..(1717): n is a, c, g, or t
  misc_feature (1756)..(1756): n is a, c, g, or t
  misc_feature (1766)..(1766): n is a, c, g, or t
  misc_feature (1807)..(1807): n is a, c, g, or t
  misc_feature (1823)..(1823): n is a, c, g, or t
  misc_feature (1833)..(1833): n is a, c, g, or t
  misc_feature (1848)..(1848): n is a, c, g, or t
  misc_feature (1859)..(1859): n is a, c, g, or t
  misc_feature (1998)..(1998): n is a, c, g, or t
  misc_feature (2000)..(2000): n is a, c, g, or t
  misc_feature (2060)..(2062): n is a, c, g, or t
  misc_feature (2091)..(2091): n is a, c, g, or t
  misc_feature (2098)..(2099): n is a, c, g, or t
  misc_feature (2125)..(2125): n is a, c, g, or t
  misc_feature (2127)..(2127): n is a, c, g, or t
  misc_feature (2137)..(2137): n is a, c, g, or t
  misc_feature (2139)..(2139): n is a, c, g, or t
  misc_feature (2159)..(2159): n is a, c, g, or t
  misc_feature (2219)..(2219): n is a, c, g, or t
  misc_feature (2225)..(2225): n is a, c, g, or t
  misc_feature (2374)..(2374): n is a, c, g, or t
  misc_feature (2711)..(2711): n is a, c, g, or t
  misc_feature (2834)..(2834): n is a, c, g, or t
  misc_feature (3147)..(3147): n is a, c, g, or t
  misc_feature (3166)..(3166): n is a, c, g, or t
  misc_feature (3170)..(3171): n is a, c, g, or t
  misc_feature (3221)..(3221): n is a, c, g, or t
  misc_feature (3263)..(3263): n is a, c, g, or t
  misc_feature (3269)..(3269): n is a, c, g, or t
  misc_feature (3314)..(3314): n is a, c, g, or t
  misc_feature (3321)..(3321): n is a, c, g, or t
  misc_feature (3337)..(3337): n is a, c, g, or t
  misc_feature (3346)..(3346): n is a, c, g, or t
  misc_feature (3369)..(3369): n is a, c, g, or t
  misc_feature (3415)..(3415): n is a, c, g, or t
ggaagtagctctcagcagatgggggagccagaagggagatggttttcccctggagttggggcactccacggccagggctctcctcccactgcccccaccaaactccgcctcatcccactcccaccnggacagtgccggcgtgtgtcctgtcggtgtgctcttcagctgccatgctcccctcaacatcctctcgccatccagatgcttgtgccttctttcattgatgtgctcctctctcgcttcaacggcctgtgtgttcctacgctgatatgctgcatttgacatccccctgcctctatcttcttctgctgatccgctcctctacacgtccagtcgtttcggtctttgccttgctanagtctcaggtttttatagtcacaggatggggccgtggtgggccaggatggtcttgggaaatncaacatttgggcgtgcaggcaggagtgccaggtcctcatctaggtcggtgggggtggagccctagccagggaccacacccttcctctacccagcactcccgtatcatttaaagggaccatggtcttgccttcccagcactcctgtatctccggcatccttaaagatactgtatttgagctgagacctgaaggatgaaattggccagcaatgtgagaatcagggaggtgaacgttccaggcaggaagaagagcaagccaaaaacgctgtagcaggcatagattttgagattgtgttaatatttgagttgggtttctaaggtatgaatagaatttagacacctaagtaaaagccagatgagattgccactgcttttactataataataataattattattattattcccacaaaacagcttccttttgttggtcatttcagagtgactcaaatgttttacccctctttgtacaattcttagtgttctctatatttcctttagggtatctagcttctgacaacattgctaattccttagaaaacacagagggaaaaggaggatgcccctgagacttgaagagaggataacttttaaaaaatcacgtcatggaacacatcaagcatctaacatatgctcccttgttattttaaaaatgcaacaatagttgtttttcataagtttgataattacaatttaaggttatgatccaatttcaaaataaatcagttttgttttctacacctcttttccatttggaaatcttcccatgcttatggaacattctaacctctgatacagtaatatcaactgaccaccaaatcttaaaacaaatttcaaaaccttataacaaatttcaaaaccttataacaaatttcaaaatattagaaaagcctgaagcactgaaatatctctgaaaaacctgaaagatttggaaatgatactggaataacttgagcctgctggccgtttgcattcagttccagacagttttagtttgcttctgaaaaataactgatataagtttaaaagggcaaattggtgagaaattgtgaaatatttggtaagctgggatggaatgacaaaatacaaaattgaaaaccgtctgtacagaaagtaaaacacctttgacaaangaaacacagtangagaatgtgatgaaattnggtanaaagaaataattataggccaggctcatgccacccacccaccactcaggtgggtggatcacctgagatcaggagttcgagaccagactgaccaacatggcaaaaccctgtctcttttgcattactaaaaatncaaaaaatttgctgggtgtggtgacacgcacctgtagtnccagctactngggaggctgaggcaggagaatcatttggatccagaggcggnggttgcagtgagccangatcttgccnctgtactctagcctnggtgacagacngagactctgtctcaaaaaaaaaaaaaaaaagattacagatcaaaattacttaacacaacataagttatcaaaaaagagagtatcttgtatgtgtgtgtgtgtgtgtgtgtgtgtgtgtgtgtgtgtgtatatatatatntnttttttttttttttttgagacagggtctccgtctgtttccctgtctggagtgtagtggcnnnatcgtggctcactgtagcctcatctcccnggctcanntcatcctcctgcctcagcctccccantngctgggactntnggcacttaccgccgtgcccngctaatttttgtattttcatagagacgaggttttgccatgttgcccaggcgatccacctnacctanggtgatccacccaccttccagagtgctggaattactggcatgagccaccacatctggcctataatcacttctttttatctaatttcatcacattctcttattacatatcttttgtcaaactcctgggctcaagggatctacctgcttcngcccctcaaagtgctgggattacaggcatgagccaccacacctgactatagaatcttttcttacctgttctaaactagtgcttaattatcttatatacatgtactgttttttgtcttataggaggaagagtttttgccattttaaatttctgtttatttttattctttttcctttacacttgtcttcagttcaattcaccaattctccttaagttagttgcacaaaacaatatatgcctcgagcaaggtgccaaagtatacacgtatattcattttgtgtcttttaattctaaggtcgcaagcccagatgagactggtattgcttttgtcatttatncaacatgatttcctttggcaattcagttgtttcagagtaaactacatttttcatcagtgcctattagactgtaaatgtattatttcagcaaatggtaaacctcctgtaactgtgaataaaagnatcacagtagaaacctctaagttagcaaagagggtagatactaaagggttttaaaatgtatctattttttagaaacttgcttaagtatataacttccatcaaccatatggaatgcccttaatgtgtaaggcatttcacacaatacaaaggtgaaaacgacatccatagatgttatgaaacagacgtttctaggtgagaggctcataatctgaaaaacagaaaatatgtttaaacaagttaagtgtattgtgaaaagtgctataagatacttgtttttaaaatgttgtgggctgggagtggtggccaactcctntaatccccacgcttgggangccnnggtgggaggatcacttgagccctgagttcaagaccagctgggacaacatngggagaccaccatatctgcaaaaaaaaataacaaatcagccnagtgcngtggcacatgcctatagttccagttccagctactgaggaggctgnggcaganggattgcttggacccnggagtttgnggctatagtgagccatgatcgcnccattgcactctagactgcaggacggagagagaccctatcttaaan

SEQ ID NO: 68457 - DNA, 3558 bp, Homo sapiens
  misc_feature (574)..(574): n is a, c, g, or t
  misc_feature (790)..(790): n is a, c, g, or t
  misc_feature (1447)..(1447): n is a, c, g, or t
  misc_feature (1783)..(1783): n is a, c, g, or t
ggaaattagaatctatccttaaaataacaaaacccttacaacttgacatttttaacttgtctattatgctttatagtgccttagattttactaaaagtcacctatcgaataattaattaatttattcatccagtaaaccttcatgctactagatggagggatggcttttaaatcccaggaggaataagttcagactctgtgctcaaggtctcgtagtctagagggaaggccactatacgaaaaaataattataatgtactataatgtaagtactgagtttagctatatatgaagtgctttcagagtttgaaaggaaaaggaagtacctctacctggggagtaatatttttctatagttcagtagggacaaaacttatagcaaattgctacttttattgctgtatattatatggtcatttattgtcatatatgtttgatgctgttctctgtgtaactattgtgaaaaagatgcattcttcaatcccaggggaaatattcagagactagtgtttggtttgctgataaacaagccattgctggagcatattcctatttgcaactctacctcttagcntcatggattatttgacatttatgtttatggttctgtgccattatactatcatgcagcatttcacttaagtcaatgaaggatataagtaatttttctagtttattaaaaatagatttcaacatatatccactgtgtacctacatgccttttaaacctctgatctaaagtctcaccagtgaaagctgaataactagaatggagaaaagagtaattatnagtctctctgtgtctcagttaccccctctgtaaaatgggagaggttgtactatctaccagacaggctgctttgaggattaaatgaattatttatataaagtgtgtttatagcagatgctatataagtgttagctgacgctattgttgttgttattaaagatagtattataaatggtgtgtcattgatttcagaaggacagctggaaactatactgttgattgaattttcttatgtgtcttttataactttaatttttatgggctttgcttttcatttttcccccaagaatcagatatctgccagagtagacctttgcatttgcagcctgacattgtgcattattctaatggaatagcttaggataggttgtaaattcttagatcaaatcttcatgttctgacactagcatacacataagcacatgcacacacacacctctttaaggtttaggtaaaagatcttgaccttccccacctggcttcagtcaatccaaagatgaacagaatgaagaaataactccttaaagacaaagaatctttcaccacttaaaacttaccttttaatattctttactagattgtcttccttttttgatctaggttaaatttatattcaaaaccttggtccaagctcttattcaaatattttagttcatnccactcttctcatccctaaactctctaatttgattggatattctatagtgcagttttccaatgcatgctgaatttctccccatctacattcctaccttcttgagggttgagaccatgcctttccctttggtattccccacaggacatgatatagtggctggttttataaattattgttgttttacacacttcacagactaatactctttgaggagcttccctgctaattccccaacccactaaatgaaggaaatctatttgaaggaaccttcatattgcacttattataatgacatagtaacaatcatttgcagcacttttgcatttactcagatntcatctcttcctggaagcctttcttgaatatctgatttcctctgaattgccttattctctatttcccaaagtaccctgtgaataccattatcttagcattttccatattatatcgacattatctataatatttattgtgtctgtctcatccattctagaaataggatctttgtttactcattttttgtatctccagcacccagccctgtccctagtgctcaattaatgcttgttaaaactgaatgactgtatcttgccagctccatctccttcagtggaaggaggagaaaattttataactgtatttaggtacaagaaatcacagaagaactaaaaaaaaaaacctagattttttattctccttgtcttcaataaacaccagtttcctcactgacataggtatccaaaataaaaacaattaaaaatgaaacacagaaccccacaacttctaacagtgatcagttaaaattgtaaggttttactgaaatgtttagagatgaaataacttgatttctggggaagtggaagtggaggggtaaaactggtcatgagttgataatagatgaaactgagtgatggttcctgagagtgagtggggttaatttatactattctacttttgtatatgtttgaagttttccttaataaggagtttttaaaataaaactttcagattttagatgttagtataagatttttttttcagagtatatcatctctcaattttggtcttgtagctgaatgggtatttcttacttcaaatgaaaagtaaaaagccaacttaaatttgaaattctttggcattggaatggctgagttagtttcttattttgcccttagccattttttgaaattattttttaaatttaagaaaaactacttacatgtgacaaattacattgtttggtggtatttgttatgtgtcttgcaattagaaggaagctatcaaatgtggttttgttatgtgatgtttaggccactggaccacagtcagaagatgtgatggattatactctattcatgttcttgcccagtccccaagagcaatcagagtagctagaccatatcaagaccagagtaatgtgctaagagacattcctatttgacataccaccaatcacattgctttttgagtttatttttcttcaacagtaaggatgagttggtatctagctaaccatcttgatccgttataccttttataccatcagtcagcatttatgagactaccaggtgtgcttaaggcacaattgtttgttttagaatataatttttttatttatgttaaactagcacattgaacccacagctttgatttcatagaagcagagtatactttcctccacaaacttagacatgtttcttgggttctttctctctaagcagtgattctcccagccttcacatctacttactcggatgctccattgactgctcaaagcctgttaacttatgaactcaaaagcataatatgggattccaagtttggatgggcattgctggccttccttttaagatgtaacgaagggaatcttactgtcatcttcagggttttctgtttgtttgccttacgccctacggtattcttcaaaggctagtcccttgacagcataataaacctgagaaggtacaaagaaaactatcagttaaataagcatactgacaatctattgagcaaagaaggaacagcagtacatctttgtttccctatttaatttaaggcttctactagttgttcccctttgtattagaaatcctaaatatatatcctctat

SEQ ID NO: 68458 - DNA, 160 bp, Homo sapiens
gtggtgggactcgaaaagaacaaaggagctctttgtgcatcaggttctcaaaataaaggaatgaagaagccccaatgcatattttaatattttagttggcaatgcaaacgcaacagcattcctaaagagtggccatgtttcttgaaagagatagccaggc

SEQ ID NO: 68459 - DNA, 702 bp, Homo sapiens
tcaaatgtggcagaactgggattagacttgggagactggctgtcttttcactgatggtggagtcagggcccacccaagcacgaggagcaggctgtgtggaggtgtcgtctgacctctaacccaggtggcatggggttgcgcccagcaggatgtagtggagtaaagggaagagggtgctggccgggtgcttagaggtcatctttcaaggaggcattaaatatcaattataaattattaagtcagataaatatgcctgaccttttcacagttgaaaaaatacattttttcccctctatcaaatgccaagtttttagtggaaatgctaatggcagtgggaaaggttgcctcactttcagagagactctcgctgtctgcacccttttaataattgctcttcctggcaaggctgccacttccctgcctccccagctggcagtggggcaacccaggcctgtttccagctacctgcaaagccagacctagacctgccgtagctgttgtcccatgcctaattctagttacaggaagccatccctgtaccctgggtccattcacaggaatgggttccagaggaggctgatagaagggtttgaaatgactggctggatcccttcctgctcagacacagtggtagctggagagcaggcagagatggtagaattgcaggtttgaccacctgtcgtgaccccagatatacatctc

SEQ ID NO: 68460 - DNA, 400 bp, Homo sapiens
tccctccccttcctctccctcttcttttccctctccaggagagtctatgaaaatgattcctttaaattcctattccttctgccaagagttaatacatatcacaccttctctgatgcacatatgttattgattaggtacaatgaaagaattgccatcattttgtccatagctacttgtgaaaggaaaaaatatattattatttacttgcttatagttgtcttggcaatatgaaggagcttcagaaataactgacttatgctaatccaatgtgtcaacaacctgctgaaactacctaaaaatagagcagttttatcatcattttgactcaaattattggaagagccactaccatactcttttcacaaatatggtttttacagaggccaatacagtactagcc

SEQ ID NO: 68461 - DNA, 463 bp, Homo sapiens
caatcctttccagttaccaccccaccccctaccccagccaagacctcaggttgtttccttaaatacgtgttctcatcattactcaattgaatacttgagggggacccttagaattctctctctgtgtagctatgacctttctagtaccatgtcctttgaatttcagctaccttgtgctccttagattcccaaccttgtatatcttcaacacaaagagatcactggctctgcctcggttcctgctccctacatcacagtctggaaaaaactttctttaggcagtaatctggggcactcatggggcttatctcatttgttccccatctcttatgtatcactgttctttgttacctgatgtgcaaagtcataggagatgtgcaatgtttaatgtcaatgtttcatatatatatgcatattttggttttttagttgtgtcacacaggaagataaatctggtctctgt

SEQ ID NO: 68462 - DNA, 455 bp, Homo sapiens
catttgtaattgactgcagatcttcatgccttcaagtcattttctcatgggcacaccaaaatgaaagggcaggtggaaagtatctaaaagcttcaattttgcctgtgtaaacttcaacctctatgacttacattttaaagacccaacagcacaagggatgcaacaaattagaatttaaatgtaattcgtggttgaaatgccacatgaatatgctctggctcccaaatgtcagttgctgaaccacaaaccgattcttaatgatcccttggaagctgtcactaatttttgtgaaccacaatgatggcttctaaaggaggactacaaacccctggagaccaataactggggataacttggaaagcttttggctctctaaaacacccaaggataagaaaatgcttcctaggaagggatttaaagtgaaaaagtagaaatatactgagtgcttgagagat

SEQ ID NO: 68463 - DNA, 1215 bp, Homo sapiens
ctccctcttgctcttcccacccctaaactatgtagcctcaaagatcttacctggctgactgctgggctttcaagatagtttctggaagaagtctctaaatctaagccttcaactctcatctctgttctgaatttcagacctggaattctaactgtccacaatacatggctcctcaatatatcttcctgaaattacaaatgaccatacggtacaggtgttactatattacctgtaagaccacactcggtgtcatctcctgcaaactagtcctctcctgactcctctgtttctgtgagtgattctgcgatggcttgaggtcatccgtttgctttgaaagatcacacaccaggatacatacagagatgtgacccggatggatggacctttgcctcacaatcagggtagaagcctctggttttcttatttctttgtcctcctctgtggtgtgacacaggttcaggaggaggtacccagacacagaagagatgctttccctgtgcaggcttgctgacagtcttgcccaccactcctggcctcctccctctacatgtccacattcgctgctctgaccctgagttggacccagctaggaattgtgacttcagttactagtatttcctctgagcctctagtcatggtcatgggctaatctgtatatgaaaacccacttgaaagaaatcccagtgctgaagaaagaattgaaacatacagatcgtttctttgctcaagggagtgtggatttcagtgctctcactgagcagaggctgagggtgaccaccttggatcttcctgcaggacacagcccagagaaactgagcctgaatttgctgccatgttttgaggacattatccacgctagtctctttcatctgggccgaggtgggtaattttccttagagtcaagtactagaaaaagttttgcttcttctaagagctggtacattgccctcttgtgaatgagagccatgtatgtgaccacaacaccctttcagttgaccactaagagactgaaggccaattccggatcaactttacagccgcctacggcctgctataccacccatggcatagtttctgtggtctgatgctttattttttattgcattttactaatttatggcatgcatatcatatgagcagtctcaaatcctccccagaacaaggtgaggaatatattaatatttaaaataaaataaacaaaatgtcaaaaaaaat

SEQ ID NO: 68464 - DNA, 406 bp, Homo sapiens
agctcccggcctgcccctgtcgccacgtggacagtcaggccccaaacaccggtgtccccgtagcccagcccgccaaaagctgggatccaaaccagctaaatgcgcacccgctggagcctgtgctgcggggcctgaagacagcagagggcgcgctgcgtccgccgcccggaggaaaaggttcatgacagcgtcagattctctgcagcaggagtacaggttgcagccactctcccgccgaacattgaatacgtctttccaccatcttgtctttgctgtggctctgggaaaatcagcagagtcagccatcactctccaaggggagctgtcagttctatctgccagcttttgagtgttcagtttgatttttacttattcaacctggaatttgaatgtctttgatgtgtgc

SEQ ID NO: 68465 - DNA, 253 bp, Homo sapiens
ctgccttggagcctgatgaccacagttcatgacagcgtcagattctctgcagcaggagtacaggttgcagccactctcccgccgaacattgaatacgtctttccaccatcttgtctttgctgtggctctgggaaaatcagcagagtcagccatcactctccaaggggagctgtcagttctatctgccagcttttgagtgttcagtttgatttttacttattcaacctggaatttgaatgtctttgatgtgtgc

SEQ ID NO: 68466 - DNA, 2860 bp, Homo sapiens
ttttcggctgcttggtaacgggctgccagaagagagaggcagagagcagggcagcggcttcttgacgtcagggccaagcgaggggatcgcgccagcaaccccagctctccccagagaggggccggccgacgctggagcggagcctgacgccaggcgcccgcggagcgtgagtagggggcgcgggagccggtcagctggggcgcagcatgccctctgctcccgcgccatggagatcgccctggtgcccctggagaacggcggtgccatgaccgtcagaggaggcgatgaggcccgggcaggctgcggccaggccacagggggagagctccagtgtcccccgacggctgggctcagcgatgggcccaaggagccggcgccaaaggggcgcggcgcgcagagagacgcggactcgggagtgcggcccttgcctccgctgccggacccgggagtgcggcccttgcctccgctgccagaggagctgccacggcctcgacggccgcctcccgaggacgaggaggaagaaggcgatcccggcctgggcacggtggaggaccaggctctgggcacggcgtccctgcaccaccagcgcgtccacatcaacatctccgggctgcgctttgagacgcagctgggcaccctggcgcagttccccaacacactcctgggggaccccgccaagcgcctgcgctacttcgaccccctgaggaacgagtacttcttcgaccgcaaccggcccagcttcgacggtatcctctactactaccagtccgggggccgcctgcggaggccggtcaacgtctccctggacgtgttcgcggacgagatacgcttctaccagctgggggacgaggccatggagcgcttccgcgaggatgagggcttcattaaagaagaggagaagcccctgccccgcaacgagttccagcgccaggtgtggcttatcttcgagtatccggagagctctgggtccgcgcgggccatcgccatcgtctcggtcttggttatcctcatctccatcatcaccttctgcttggagaccctgcctgagttcagggatgaacgtgagctgctccgccaccctccggcgccccaccagcctcccgcgcccgcccctggggccaacggcagcggggtcatggccccgccctctggccctacggtggcaccgctcctgcccaggaccctggccgaccccttcttcatcgtggagaccacgtgcgtcatctggttcaccttcgagctgctcgtgcgcttcttcgcctgccccagcaaggcagggttctcccggaacatcatgaacatcatcgatgtggtggccatcttcccctacttcatcaccctgggcaccgaactggcagagcagcagccagggggcggaggaggcggccagaatgggcagcaggccatgtccctggccatcctccgagtcatccgcctggtccgggtgttccgcatcttcaagctctcccgccactccaaggggctgcagatcctgggcaagaccttgcaggcctccatgagggagctggggctgctcatcttcttcctcttcatcggggtcatcctcttctccagtgccgtctacttcgcagaggctgacaaccagggaacccatttctctagcatccctgacgccttctggtgggcagtggtcaccatgaccactgtgggctacggggacatgaggcccatcactgttgggggcaagatcgtgggctcgctgtgtgccatcgccggggtcctcaccattgccctgcctgtgcccgtcatcgtctccaacttcaactacttctaccaccgggaaacggatcacgaggagccggcagtccttaaggaagagcagggcactcagagccaggggccggggctggacagaggagtccagcggaaggtcagcgggagcaggggatccttctgcaaggctggggggaccctggagaatgcagacagtgcccgaaggggcagctgccccctagagaagtgtaacgtcaaggccaagagcaacgtggacttgcggaggtccctttatgccctctgcctggacaccagccgggaaacagatttgtgaaaggagattcaggcagactggtggcagtggagtagggaatgggaggcttgctgaacatggatatctacattataccgcagagtatttgaagtcacactgtaacctcagtctacccctctcctttcactcctttcctccctccctcgatccccccattttctctattctttccatgacacccaagggtcgcctatttttaaaaagtaccacattccatgacgcaggagctgtggaaatggtgagcgctgtgagatggatgtatttgtagccagtctcctatacccagcagagggataacccaaacaaaaatgactctaaatagcccagatcccaagagattatgtaactcctccatccatgtgttccaaatttgctttacatatgattgtatttgtgtataggggaaaatattatttttatgcctggtaagtggctttttgtactgtagttcagatagagatattttgggtatattttcaagatacatgttgtatttatggaagaaagagttgtcctgatgtttttctgtgttacttatattagagtcagagatcttggtatgggctgttctgtttcctgtgtctccaagcctctgtcttttctgggatgtggtattggtgctttgtgtctagggcagagtatgttcttgaagaaaggcaaatctgactttttctgtgcgccttaaacaattcttgtaactttcttcaaaaagcattttaatgatattggaggaatacttctgataatttattgtctttatttttatcccaggaaataaaaggttaccttgtt

SEQ ID NO: 68467 - DNA, 201 bp, Homo sapiens
  misc_feature (16)..(16): n is a, c, g, or t
  misc_feature (22)..(22): n is a, c, g, or t
  misc_feature (31)..(31): n is a, c, g, or t
  misc_feature (50)..(50): n is a, c, g, or t
  misc_feature (70)..(70): n is a, c, g, or t
  misc_feature (73)..(73): n is a, c, g, or t
  misc_feature (76)..(76): n is a, c, g, or t
  misc_feature (80)..(80): n is a, c, g, or t
  misc_feature (96)..(96): n is a, c, g, or t
tttaggcatcccttancctttntgtccctcncaagatgctttcgaacagnaactgctttcttaattaaantgntanagantcttcaggaagatcanaattcttgtaactttcttcaaaaagcattttaatgatattggaggaatacttctgataatttattgtctttatttttatcccaggaaataaaaggttaccttgtt

SEQ ID NO: 68468 - DNA, 3036 bp, Homo sapiens
  misc_feature (2984)..(2984): n is a, c, g, or t
  misc_feature (3015)..(3015): n is a, c, g, or t
ttttcggctgcttggtaacgggctgccagaagagagaggcagagagcagggcagcggcttcttgacgtcagggccaagcgaggggatcgcgccagcaaccccagctctccccagagaggggccggccgacgctggagcggagcctgacgccaggcgcccgcggagcgtgagtagggggcgcgggagccggtcagctggggcgcagcatgccctctgctcccgcgccatggagatcgccctggtgcccctggagaacggcggtgccatgaccgtcagaggaggcgatgaggcccgggcaggctgcggccaggccacagggggagagctccagtgtcccccgacggctgggctcagcgatgggcccaaggagccggcgccaaaggggcgcggcgcgcagagagacgcggactcgggagtgcggcccttgcctccgctgccggacccgggagtgcggcccttgcctccgctgccagaggagctgccacggcctcgacggccgcctcccgaggacgaggaggaagaaggcgatcccggcctgggcacggtggaggaccaggctctgggcacggcgtccctgcaccaccagcgcgtccacatcaacatctccgggctgcgctttgagacgcagctgggcaccctggcgcagttccccaacacactcctgggggaccccgccaagcgcctgcgctacttcgaccccctgaggaacgagtacttcttcgaccgcaaccggcccagcttcgacggtatcctctactactaccagtccgggggccgcctgcggaggccggtcaacgtctccctggacgtgttcgcggacgagatacgcttctaccagctgggggacgaggccatggagcgcttccgcgaggatgagggcttcattaaagaagaggagaagcccctgccccgcaacgagttccagcgccaggtgtggcttatcttcgagtatccggagagctctgggtccgcgcgggccatcgccatcgtctcggtcttggttatcctcatctccatcatcaccttctgcttggagaccctgcctgagttcagggatgaacgtgagctgctccgccaccctccggcgccccaccagcctcccgcgcccgcccctggggccaacggcagcggggtcatggccccgccctctggccctacggtggcaccgctcctgcccaggaccctggccgaccccttcttcatcgtggagaccacgtgcgtcatctggttcaccttcgagctgctcgtgcgcttcttcgcctgccccagcaaggcagggttctcccggaacatcatgaacatcatcgatgtggtggccatcttcccctacttcatcaccctgggcaccgaactggcagagcagcagccagggggcggaggaggcggccagaatgggcagcaggccatgtccctggccatcctccgagtcatccgcctggtccgggtgttccgcatcttcaagctctcccgccactccaaggggctgcagatcctgggcaagaccttgcaggcctccatgagggagctggggctgctcatcttcttcctcttcatcggggtcatcctcttctccagtgccgtctacttcgcagaggctgacaaccagggaacccatttctctagcatccctgacgccttctggtgggcagtggtcaccatgaccactgtgggctacggggacatgaggcccatcactgttgggggcaagatcgtgggctcgctgtgtgccatcgccggggtcctcaccattgccctgcctgtgcccgtcatcgtctccaacttcaactacttctaccaccgggaaacggatcacgaggagccggcagtccttaaggaagagcagggcactcagagccaggggccggggctggacagaggagtccagcggaaggtcagcgggagcaggggatccttctgcaaggctggggggaccctggagaatgcagacagtgcccgaaggggcagctgccccctagagaagtgtaacgtcaaggccaagagcaacgtggacttgcggaggtccctttatgccctctgcctggacaccagccgggaaacagatttgtgaaaggagattcaggcagactggtggcagtggagtagggaatgggaggcttgctgaacatggatatctacattataccgcagagtatttgaagtcacactgtaacctcagtctacccctctcctttcactcctttcctccctccctcgatccccccattttctctattctttccatgacacccaagggtcgcctatttttaaaaagtaccacattccatgacgcaggagctgtggaaatggtgagcgctgtgagatggatgtatttgtagccagtctcctatacccagcagagggataacccaaacaaaaatgactctaaatagcccagatcccaagagattatgtaactcctccatccatgtgttccaaatttgctttacatatgattgtatttgtgtataggggaaaatattatttttatgcctggtaagtggctttttgtactgtagttcagatagagatattttgggtatattttcaagatacatgttgtatttatggaagaaagagttgtcctgatgtttttctgtgttacttatattagagtcagagatcttggtatgggctgttctgtttcctgtgtctccaagcctctgtcttttctgggatgtggtattggtgctttgtgtctagggcagagtatgttcttgaagaaaggcaaatctgactttttctgtgcgccttaaacaattcttgtaactttcttcaaaaagcattttaatgatattggaggaatacttctgataatttattgtctttatttttatcccaggaaataaaaggttaccttgttaaaaaaaaaaaaaaaaaaaaaaaaaaaactcggtcaccttgtcagcaacactgttgtcccttcgccccgccgttctttctcttgctgcatttggccattagccaaatttgaacccaattcaatnataacgggtctggacactgattttgttttanctcaataaatgtataggctac

SEQ ID NO: 68469 - DNA, 862 bp, Homo sapiens
ttttcggctgcttggtaacgggctgccagaagagagaggcagagagcagggcagcggcttcttgacgtcagggccaagcgaggggatcgcgccagcaaccccagctctccccagagaggggccggccgacgctggagcggagcctgacgccaggcgcccgcggagcgtgagtagggggcgcgggagccggtcagctggggcgcagcatgccctctgatccccccattttctctattctttccatgacacccaagggtcgcctatttttaaaaagtaccacattccatgacgcaggagctgtggaaatggtgagcgctgtgagatggatgtatttgtagccagtctcctatacccagcagagggataacccaaacaaaaatgactctaaatagcccagatcccaagagattatgtaactcctccatccatgtgttccaaatttgctttacatatgattgtatttgtgtataggggaaaatattatttttatgcctggtaagtggctttttgtactgtagttcagatagagatattttgggtatattttcaagatacatgttgtatttatggaagaaagagttgtcctgatgtttttctgtgttacttatattagagtcagagatcttggtatgggctgttctgtttcctgtgtctccaagcctctgtcttttctgggatgtggtattggtgctttgtgtctagggcagagtatgttcttgaagaaaggcaaatctgactttttctgtgcgccttaaacaattcttgtaactttcttcaaaaagcattttaatgatattggaggaatacttctgataatttattgtctttatttttatcccaggaaataaaaggttaccttgtt

SEQ ID NO: 68470 - DNA, 518 bp, Homo sapiens
ctcctgcctcagcctcccgagtagctgggattacaggcagagtggctcctcacagcctgaagctcatccttctgcacgggccagccaggccagcacagaggcaccagggcagcagtgcacacaggtccccggggaccccaccatgtggagcggatggtggctgtggccccttgtggccgtctgcactgcagacttctttcgggacgaggcagagaggatcatgagggactcccctgtcattgatgggcacaatgacctcccctggcagctgctggatatgttcaacaaccggctgcaggacgagagggccaacctgaccaccttggccggcacacacaccaacatccccaagctgagggccggctttgtgggaggccaggtaccgcctgccctgccttgtgcttgccctgtgtggggtcatcccgtctcctacctcaggcctggctacagtgggaccatccctgtggtgttcctccagggtccctcggtgcccaggccgagggagggcttcccagcgg

SEQ ID NO: 68471 - DNA, 1723 bp, Homo sapiens
tttcagagaacacagggttcctgcaggaaatggggcagtttcaccttcctgaggaggggcctgggaggggcagcaggtggccgggtagggccagcccagctgtgagcctggcgtgggagctgcctaggccgggccctgccagggagcaagtctgcatcgcagaggccagggcagagtggctcctcacagcctgaagctcatccttctgcacgggccagccaggccagcacagaggcaccagggcagcagtgcacacaggtccccggggaccccaccatgtggagcggatggtggctgtggccccttgtggccgtctgcactgcagacttctttcgggacgaggcagagaggatcatgagggactcccctgtcattgatgggcacaatgacctcccctggcagctgctggatatgttcaacaaccggctgcaggacgagagggccaacctgaccaccttggccggcacacacaccaacatccccaagctgagggccggctttgtgggaggccagttctggtccgtgtacacgccctgcgacacccagaacaaagacgccgtgcggaggacgctggagcagatggacgtggtccaccgcatgtgccggatgtacccggagaccttcctgtatgtcaccagcagtgcaggcattcggcaggccttccgggaagggaaggtggccagcctgatcggcgtggagggcggccactccattgacagcagtttgggcgtcctgcgggcactctatcagctgggcatgcggtacctgaccctcacccacagctgcaacacgccctgggctgacaactggctggtggacacgggagacagcgagccccagagccaaggcttgtcaccctttgggcagcgtgtggtgaaggagctgaaccgtctgggggtcctcatcgacttggctcacgtgtctgtggccaccatgaaggccaccctgcagctgtccagagccccggtcatcttcagccactcctcggcctacagcgtgtgcgcaagccggcgcaacgtgcctgacgacgtcctgaggctggtgaaacagacagacagcctggtgatggtgaacttctacaacaattacatttcctgcaccaacaaggccaacctgtcccaagtggccgaccatctggatcacatcaaggaggtggcaggagccagagccgtgggttttggtggggactttgatggtgttccaagggtccctgaggggctggaggacgtctccaagtatccagacctgatcgctgagctgctcaggaggaactggacggaggcggaggtcaagggcgcactggctgacaacctgctgagggtcttcgaggctgtggaacaggccagcaacctcacacaggctcccgaggaggagcccatcccgctggaccagctgggtggctcctgcaggacccattacggctactcctctggggcttccagcctccatcgccactgggggctcctgctggcctccctcgctcccctggtcctctgtctgtctctcctgtgaaacctgggagaccagagtcccctttagggttcccggagctccgggaagacccgcccatcccaggactccagatgccaggagccctgctgcccacatgcaaggaccagcatctcctgagaggacgcctgggcttacctggggggcaggatgcctggggacagttcaggacacacacacagtaggcccgcaataaaagcaacaccccttcaca

SEQ ID NO: 68472 - DNA, 1782 bp, Homo sapiens
cctctggtgcctctcctggcaggcagagtggctcctcacagcctgaagctcatccttctgcacgggccagccaggccagcacagaggcaccagggcagcagtgcacacaggtccccggggaccccaccatgtggagcggatggtggctgtggccccttgtggccgtctgcactgcagacttctttcgggacgaggcagagaggatcatgagggactcccctgtcattgatgggcacaatgacctcccctggcagctgctggatatgttcaacaaccggctgcaggacgagagggccaacctgaccaccttggccggcacacacaccaacatccccaagctgagggccggctttgtgggaggccagttctggtccgtgtacacgccctgcgacacccagaacaaagacgccgtgcggaggacgctggagcagatggacgtggtccaccgcatgtgccggatgtacccggagaccttcctgtatgtcaccagcagtgcaggcattcggcaggccttccgggaagggaaggtggccagcctgatcggcgtggagggcggccactccattgacagcagtttgggcgtcctgcgggcactctatcagctgggcatgcggtacctgaccctcacccacagctgcaacacgccctgggctgacaactggctggtggacacgggagacagcgagccccagagccaaggcttgtcaccctttgggcagcgtgtggtgaaggagctgaaccgtctgggggtcctcatcgacttggctcacgtgtctgtggccaccatgaaggccaccctgcagctgtccagagccccggtcatcttcagccactcctcggcctacagcgtgtgcgcaagccggcgcaacgtgcctgacgacgtcctgaggctggtgaaacagacagacagcctggtgatggtgaacttctacaacaattacatttcctgcaccaacaaggccaacctgtcccaagtggccggtaggtggggtgtgagcggccaagggggccgaagggggagggcctcactcgggacccatacctgctgctccctggacagaccatctggatcacatcaaggaggtggcaggagccagagccgtgggttttggtggggactttgatggtgttccaaggtaaggggctgagagctctgtcctgtggatgagccgggaggttcatggcctcgtcagagggatgaggtggctggaggagggacctgtgtcctagtgtgggggcccaggttctcctggcctcaacacagggtccctgaggggctggaggacgtctccaagtatccagacctgatcgctgagctgctcaggaggaactggacggaggcggaggtcaagggcgcactggctgacaacctgctgagggtcttcgaggctgtggaacaggccagcaacctcacacaggctcccgaggaggagcccatcccgctggaccagctgggtggctcctgcaggacccattacggctactcctctggggcttccagcctccatcgccactgggggctcctgctggcctccctcgctcccctggtcctctgtctgtctctcctgtgaaacctgggagaccagagtcccctttagggttcccggagctccgggaagacccgcccatcccaggactccagatgccaggagccctgctgcccacatgcaaggaccagcatctcctgagaggacgcctgggcttacctggggggcaggatgcctggggacagttcaggacacacacacagtaggcccgcaataaaagcaacaccccttcaca

SEQ ID NO: 68473 - DNA, 1601 bp, Homo sapiens
cctctggtgcctctcctggcaggcagagtggctcctcacagcctgaagctcatccttctgcacgggccagccaggccagcacagaggcaccagggcagcagtgcacacaggtccccggggaccccaccatgtggagcggatggtggctgtggccccttgtggccgtctgcactgcagacttctttcgggacgaggcagagaggatcatgagggactcccctgtcattgatgggcacaatgacctcccctggcagctgctggatatgttcaacaaccggctgcaggacgagagggccaacctgaccaccttggccggcacacacaccaacatccccaagctgagggccggctttgtgggaggccagttctggtccgtgtacacgccctgcgacacccagaacaaagacgccgtgcggaggacgctggagcagatggacgtggtccaccgcatgtgccggatgtacccggagaccttcctgtatgtcaccagcagtgcaggcattcggcaggccttccgggaagggaaggtggccagcctgatcggcgtggagggcggccactccattgacagcagtttgggcgtcctgcgggcactctatcagctgggcatgcggtacctgaccctcacccacagctgcaacacgccctgggctgacaactggctggtggacacgggagacagcgagccccagagccaaggcttgtcaccctttgggcagcgtgtggtgaaggagctgaaccgtctgggggtcctcatcgacttggctcacgtgtctgtggccaccatgaaggccaccctgcagctgtccagagccccggtcatcttcagccactcctcggcctacagcgtgtgcgcaagccggcgcaacgtgcctgacgacgtcctgaggctggtgaaacagacagacagcctggtgatggtgaacttctacaacaattacatttcctgcaccaacaaggccaacctgtcccaagtggccgaccatctggatcacatcaaggaggtggcaggagccagagccgtgggttttggtggggactttgatggtgttccaagggtccctgaggggctggaggacgtctccaagtatccagacctgatcgctgagctgctcaggaggaactggacggaggcggaggtcaagggcgcactggctgacaacctgctgagggtcttcgaggctgtggaacaggccagcaacctcacacaggctcccgaggaggagcccatcccgctggaccagctgggtggctcctgcaggacccattacggctactcctctggggcttccagcctccatcgccactgggggctcctgctggcctccctcgctcccctggtcctctgtctgtctctcctgtgaaacctgggagaccagagtcccctttagggttcccggagctccgggaagacccgcccatcccaggactccagatgccaggagccctgctgcccacatgcaaggaccagcatctcctgagaggacgcctgggcttacctggggggcaggatgcctggggacagttcaggacacacacacagtaggcccgcaataaaagcaacaccccttcacaatcctggggtacgtgtcatcggcatc

SEQ ID NO: 68474 - DNA, 1059 bp, Homo sapiens
cctctggtgcctctcctggcaggcagagtggctcctcacagcctgaagctcatccttctgcacgggccagccaggccagcacagaggcaccagggcagcagtgcacacaggtccccggggaccccaccatgtggagcggatggtggctgtggccccttgtggccgtctgcactgcagacttctttcgggacgaggcagagaggatcatgagggactcccctgtcattgatgggcacaatgacctcccctggcagctgctggatatgttcaacaaccggctgcaggacgagagggccaacctgaccaccttggccggcacacacaccaacatccccaagctgagggccggctttgtgggaggccagttctggtccgtgtacacgccctgcgacacccagaacaaagacgccgtgcggaggacgctggagcagatggacgtggtccaccgcatgtgccggatgtacccggagaccttcctgtatgtcaccagcagtgcaggcattcggcaggccttccgggaagggaaggtggccagcctgatcggcgtggagggcggccactccattgacagcagtttgggcgtcctgcgggcactctatcagctgggcatgcggtacctgaccctcacccacagctgcaacacgccctgggctgacaactggctggtggacacgggagacagcgagccccagagccaaggcttgtcaccctttgggcagcgtgtggtgaaggagctgaaccgtctgggggtcctcatcgacttggctcacgtgtctgtggccaccatgaaggccaccctgcagctgtccagagccccggtcatcttcagccactcctcggcctacagcgtgtgcgcaagccggcgcaacgtgcctgacgacgtcctgaggctggtgaaacagacagacagcctggtgatggtgaacttctacaacaattacatttcctgcaccaacatctcctgagaggacgcctgggcttacctggggggcaggatgcctggggacagttcaggacacacacacagtaggcccgcaataaaagcaacaccccttcaca

SEQ ID NO: 68475 - DNA, 1742 bp, Homo sapiens
cgggggggtactgtgcgagccctcaaggaggtggctgttctgtagctggagagctccgtgggtggcaggactgaacttgaacaccagaaacaacccccaagccttgtgacctgggaggcaggaggcgggtctgtctccctgggacttgggtggctgagccgaggtactcgggaccctgtcccgcgcatggcagagtggctcctcacagcctgaagctcatccttctgcacgggccagccaggccagcacagaggcaccagggcagcagtgcacacaggtccccggggaccccaccatgtggagcggatggtggctgtggccccttgtggccgtctgcactgcagacttctttcgggacgaggcagagaggatcatgagggactcccctgtcattgatgggcacaatgacctcccctggcagctgctggatatgttcaacaaccggctgcaggacgagagggccaacctgaccaccttggccggcacacacaccaacatccccaagctgagggccggctttgtgggaggccagttctggtccgtgtacacgccctgcgacacccagaacaaagacgccgtgcggaggacgctggagcagatggacgtggtccaccgcatgtgccggatgtacccggagaccttcctgtatgtcaccagcagtgcaggcattcggcaggccttccgggaagggaaggtggccagcctgatcggcgtggagggcggccactccattgacagcagtttgggcgtcctgcgggcactctatcagctgggcatgcggtacctgaccctcacccacagctgcaacacgccctgggctgacaactggctggtggacacgggagacagcgagccccagagccaaggcttgtcaccctttgggcagcgtgtggtgaaggagctgaaccgtctgggggtcctcatcgacttggctcacgtgtctgtggccaccatgaaggccaccctgcagctgtccagagccccggtcatcttcagccactcctcggcctacagcgtgtgcgcaagccggcgcaacgtgcctgacgacgtcctgaggctggtgaaacagacagacagcctggtgatggtgaacttctacaacaattacatttcctgcaccaacaaggccaacctgtcccaagtggccgaccatctggatcacatcaaggaggtggcaggagccagagccgtgggttttggtggggactttgatggtgttccaagggtccctgaggggctggaggacgtctccaagtatccagacctgatcgctgagctgctcaggaggaactggacggaggcggaggtcaagggcgcactggctgacaacctgctgagggtcttcgaggctgtggaacaggccagcaacctcacacaggctcccgaggaggagcccatcccgctggaccagctgggtggctcctgcaggacccattacggctactcctctggggcttccagcctccatcgccactgggggctcctgctggcctccctcgctcccctggtcctctgtctgtctctcctgtgaaacctgggagaccagagtcccctttagggttcccggagctccgggaagacccgcccatcccaggactccagatgccaggagccctgctgcccacatgcaaggaccagcatctcctgagaggacgcctgggcttacctggggggcaggatgcctggggacagttcaggacacacacacagtaggcccgcaataaaagcaacaccccttcaca

SEQ ID NO: 68476 - DNA, 1575 bp, Homo sapiens
cctctggtgcctctcctggcaggcagagtggctcctcacagcctgaagctcatccttctgcacgggccagccaggccagcacagaggcaccagggcagcagtgcacacaggtccccggggaccccaccatgtggagcggatggtggctgtggccccttgtggccgtctgcactgcagacttctttcgggacgaggcagagaggatcatgagggactcccctgtcattgatgggcacaatgacctcccctggcagctgctggatatgttcaacaaccggctgcaggacgagagggccaacctgaccaccttggccggcacacacaccaacatccccaagctgagggccggctttgtgggaggccagttctggtccgtgtacacgccctgcgacacccagaacaaagacgccgtgcggaggacgctggagcagatggacgtggtccaccgcatgtgccggatgtacccggagaccttcctgtatgtcaccagcagtgcaggcattcggcaggccttccgggaagggaaggtggccagcctgatcggcgtggagggcggccactccattgacagcagtttgggcgtcctgcgggcactctatcagctgggcatgcggtacctgaccctcacccacagctgcaacacgccctgggctgacaactggctggtggacacgggagacagcgagccccagagccaaggcttgtcaccctttgggcagcgtgtggtgaaggagctgaaccgtctgggggtcctcatcgacttggctcacgtgtctgtggccaccatgaaggccaccctgcagctgtccagagccccggtcatcttcagccactcctcggcctacagcgtgtgcgcaagccggcgcaacgtgcctgacgacgtcctgaggctggtgaaacagacagacagcctggtgatggtgaacttctacaacaattacatttcctgcaccaacaaggccaacctgtcccaagtggccgaccatctggatcacatcaaggaggtggcaggagccagagccgtgggttttggtggggactttgatggtgttccaagggtccctgaggggctggaggacgtctccaagtatccagacctgatcgctgagctgctcaggaggaactggacggaggcggaggtcaagggcgcactggctgacaacctgctgagggtcttcgaggctgtggaacaggccagcaacctcacacaggctcccgaggaggagcccatcccgctggaccagctgggtggctcctgcaggacccattacggctactcctctggggcttccagcctccatcgccactgggggctcctgctggcctccctcgctcccctggtcctctgtctgtctctcctgtgaaacctgggagaccagagtcccctttagggttcccggagctccgggaagacccgcccatcccaggactccagatgccaggagccctgctgcccacatgcaaggaccagcatctcctgagaggacgcctgggcttacctggggggcaggatgcctggggacagttcaggacacacacacagtaggcccgcaataaaagcaacaccccttcaca

SEQ ID NO: 68477 - DNA, 1884 bp, Homo sapiens
  misc_feature (1620)..(1621): n is a, c, g, or t
cctctggtgcctctcctggcaggcagagtggctcctcacagcctgaagctcatccttctgcacgggccagccaggccagcacagaggcaccagggcagcagtgcacacaggtccccggggaccccaccatgtggagcggatggtggctgtggccccttgtggccgtctgcactgcagacttctttcgggacgaggcagagaggatcatgagggactcccctgtcattgatgggcacaatgacctcccctggcagctgctggatatgttcaacaaccggctgcaggacgagagggccaacctgaccaccttggccggcacacacaccaacatccccaagctgagggccggctttgtgggaggccagttctggtccgtgtacacgccctgcgacacccagaacaaagacgccgtgcggaggacgctggagcagatggacgtggtccaccgcatgtgccggatgtacccggagaccttcctgtatgtcaccagcagtgcaggcattcggcaggccttccgggaagggaaggtggccagcctgatcggcgtggagggcggccactccattgacagcagtttgggcgtcctgcgggcactctatcagctgggcatgcggtacctgaccctcacccacagctgcaacacgccctgggctgacaactggctggtggacacgggagacagcgagccccagagccaaggcttgtcaccctttgggcagcgtgtggtgaaggagctgaaccgtctgggggtcctcatcgacttggctcacgtgtctgtggccaccatgaaggccaccctgcagctgtccagagccccggtcatcttcagccactcctcggcctacagcgtgtgcgcaagccggcgcaacgtgcctgacgacgtcctgaggctggtgaaacagacagacagcctggtgatggtgaacttctacaacaattacatttcctgcaccaacaaggccaacctgtcccaagtggccgaccatctggatcacatcaaggaggtggcaggagccagagccgtgggttttggtggggactttgatggtgttccaagggtccctgaggggctggaggacgtctccaagtatccagacctgatcgctgagctgctcaggaggaactggacggaggcggaggtcaagggcgcactggctgacaacctgctgagggtcttcgaggctgtggaacaggccagcaacctcacacaggctcccgaggaggagcccatcccgctggaccagctgggtggctcctgcaggacccattacggctactcctctggggcttccagcctccatcgccactgggggctcctgctggcctccctcgctcccctggtcctctgtctgtctctcctgtgaaacctgggagaccagagtcccctttagggttcccggagctccgggaagacccgcccatcccaggactccagatgccaggagccctgctgcccacatgcaaggaccagcatctcctgagaggacgcctgggcttacctggggggcaggatgcctggggacagttcaggacacacacacagtaggcccgcaataaaagcaacaccccttcacaaaaaaaaaaaaaaaaaaaaaaaaaaaaaaaaaaaaaaaaaaaaannggggggggccccaaaaaatatccccccaggggggccccagttaggcgtgataaaccccagtgtttgtgatgtacaacaagaggagggcccccacaaacaggagaggcgctcgatattaaaaaagcaagaagacccgggggccagcacgattataaacaaagcgttgtgctacgcggaaaaaacgtggctaaagggggcaaatttgggaagagaaaacccctcaaaaagagcggggcggaacacatatggggacaaatcaccgt

SEQ ID NO: 68478 - DNA, 1658 bp, Homo sapiens
cctctggtgcctctcctggcaggcagagtggctcctcacagcctgaagctcatccttctgcacgggccagccaggccagcacagaggcaccagggcagcagtgcacacaggtccccggggaccccaccatgtggagcggatggtggctgtggccccttgtggccgtctgcactgcagacttctttcgggacgaggcagagaggatcatgagggactcccctgtcattgatgggcacaatgacctcccctggcagctgctggatatgttcaacaaccggctgcaggacgagagggccaacctgaccaccttggccggcacacacaccaacatccccaagctgagggccggctttgtgggaggccagttctggtccgtgtacacgccctgcgacacccagaacaaagacgccgtgcggaggacgctggagcagatggacgtggtccaccgcatgtgccggatgtacccggagaccttcctgtatgtcaccagcagtgcaggcattcggcaggccttccgggaagggaaggtggccagcctgatcggcgtggagggcggccactccattgacagcagtttgggcgtcctgcgggcactctatcagctgggcatgcggtacctgaccctcacccacagctgcaacacgccctgggctgacaactggctggtggacacgggagacagcgagccccagagccaaggcttgtcaccctttgggcagcgtgtggtgaaggagctgaaccgtctgggggtcctcatcgacttggctcacgtgtctgtggccaccatgaaggccaccctgcagctgtccagagccccggtcatcttcagccactcctcggcctacagcgtgtgcgcaagccggcgcaacgtgcctgacgacgtcctgaggctggtgaaacagacagacagcctggtgatggtgaacttctacaacaattacatttcctgcaccaacaaggccaacctgtcccaagtggccgaccatctggatcacatcaaggaggtggcaggagccagagccgtgggttttggtggggactttgatggtgttccaagggtccctgaggggctggaggacgtctccaagtatccagacctgatcgctgagctgctcaggaggaactggacggaggcggaggtcaagggcgcactggctgacaacctgctgagggtcttcgaggctgtggaacaggccagcaacctcacacaggctcccgaggaggagcccatcccgctggaccagctgggtggctcctgcaggacccattacggctactcctctggggcttccagcctccatcgccactgggggctcctgctggcctccctcgctcccctggtcctctgtctgtctctcctgtgaaacctgggagaccagagtcccctttagggttcccggagctccgggaagacccgcccatcccaggactccagatgccaggagccctgctgcccacatgcaaggaccagcatctcctgagaggacgcctgggcttacctggggggcaggatgcctggggacagttcaggacacacacacagtaggcccgcaataaaagcaacaccccttcacaaaaacaaaaaacataaacaaaacaaagaaaaaaaacacatacaaaaactaaacaacaacacaaacaaataacaaggaaacaca

SEQ ID NO: 68479 - DNA, 2254 bp, Homo sapiens
gatccacaattcattgcgcagttgatggaacagcttgatgtcttcatcagtattaaaccaaagcccaaacagccaagcaagtctgtgattgtgaaaagtgttgagcgaaatgccttaaatatgtatgaagcaaggaaatgtctcctcggacttgaaagcagtggggttaccatagcaaccagtccatccccagcatcctgccctgccggcctggcatgtcccagcctggatatcttagcttcagcaggccttggactcactggactaggtcttttgggacccaccaccttatctctgaacacttcaacaaccccaaactcactcttgaatgctcttaatagctcagtcagtcctttgcaaagtccaagttctggtacacccagccccacattatgggcacccccacttgctaatacttcaagtgccacaggtttttctgctataccacaccttatgattccgtctactgcccaagccacattaactaatattttgttgtctggagtgcccacctatgggcacacagctccatctccccctcctggcttgactcctgttgatgtccatatcaacagtatgcagaccgaaggcaaaaaaatctctgctgctttaaatggacatgcacagtctccagatataaaatatggtgcaatatccacttcatcacttggagaaaaagtgctgagtgcaaatcacggggatccgtccatccagacaagtgggtctgagcagacatctcccaaatcaagccccactgaaggttgtaatgatgcttttgttgaagtaggcatgcctcgaagtccttcccattctgggaatgctggtgacttgaaacagatgatgtgtccctccaaggtttcctgtgccaaaaggcagacagtggaactattgcaaggcacgaaaaactcacacttacacagcactgacaggttgctctcagaccctgaactgagtgctaccgaaagccctttggctgacaagaaggctccagggagtgagcgcgctgcagagagggcagcagctgcccagcaaaactccgaaagggcccaccttgctccacggtcatcatatgtcaacatgcaggcatttgactatgaacagaagaagctattagccaccaaagctatgttaaagaaaccagtggtgacggaggtcagaacgcccacaaatacctggagtggcctgggtttttctaaatccatgccagctgaaactatcaaggagttgagaagggccaatcatgtgtcctataagcccacaatgacaaccacttatgagggctcatccatgtccctttcacggtccaacagtcgtgagcacttgggaggtggaagcgaatctgataactggagagaccgaaatggaattggacctggaagtcatagtgaatttgcagcttctattggcagccctaagcgtaaacaaaacaaatcaagtgagctttgtgttttatgcacacttttaggtatccccagattagaatgtgtttatttgggttggagtatcactgactgtggcctctctgacttcaagtgcttggtgtaattcacatgccatctcctctgtgaagcctccttgtttctcccagtgaagcaggccacctggttctctttcctctcactccattttgtgcgtgctttcactctagcacttgccataccaaagggcaattatttatctacctatctgtatctccttgtgaaatttgtgctccacaaaccaaagactgtatttgttcattttataaacatttatgaagtgtccatgtgtcaagtattctgttatgctctgccttattggatatttcttcccaaacgcctagtgaactgtctgacacctagtaggtaggtgctcagtaaaagtttgtgaaatgaatgcatgaatgggtaatgtacacacatgcatccaggtggtgacaaaaagacaaggacataagaaagtggttgaggccaggcatggcagctctcacctgtaatcccagcactttgggaggtgaaggtgagttgatagcttgagcccaggggtttgagaccagtctgggcaacatagtgagatttcatctctactaaaaaaaaaaaaaaaaaaaacaagaggctgggtgtggtggtatgcatgcgccaatagtcttagcctacgtgggagactgaggtgggaggatcgcttgagcccaggagtttgaggctgcagtgagctgtaattgaaccactgcactacagcctgggtgacagagcgagaccctgtctcaaaaaaaaaa

SEQ ID NO: 68480 - DNA, 1763 bp, Homo sapiens
gatccacaattcattgcgcagttgatggaacagcttgatgtcttcatcagtattaaaccaaagcccaaacagccaagcaagtctgtgattgtgaaaagtgttgagcgaaatgccttaaatatgtatgaagcaaggaaatgtctcctcggacttgaaagcagtggggttaccatagcaaccagtccatccccagcatcctgccctgccggcctggcatgtcccagcctggatatcttagcttcagcaggccttggactcactggactaggtcttttgggacccaccaccttatctctgaacacttcaacaaccccaaactcactcttgaatgctcttaatagctcagtcagtcctttgcaaagtccaagttctggtacacccagccccacattatgggcacccccacttgctaatacttcaagtgccacaggtttttctgctataccacaccttatgattccgtctactgcccaagccacattaactaatattttgttgtctggagtgcccacctatgggcacacagctccatctccccctcctggcttgactcctgttgatgtccatatcaacagtatgcagaccgaaggcaaaaaaatctctgctgctttaaatggacatgcacagtctccagatataaaatatggtgcaatatccacttcatcacttggagaaaaagtgctgagtgcaaatcacggggatccgtccatccagacaagtgggtctgagcagacatctcccaaatcaagccccactgaaggttgtaatgatgcttttgttgaagtaggcatgcctcgaagtccttcccattctgggaatgctggtgacttgaaacagatgatgtgtccctccaaggtttcctgtgccaaaaggcagacagtggaactattgcaaggcacgaaaaactcacacttacacagcactgacaggttgctctcagaccctgaactgagtgctaccgaaagccctttggctgacaagaaggctccagggagtgagcgcgctgcagagagggcagcagctgcccagcaaaactccgaaagggcccaccttgctccacggtcatcatatgtcaacatgcaggcatttgactatgaacagaagaagctattagccaccaaagctatgttaaagaaaccagtggtgacggaggtcagaacgcccacaaatacctggagtggcctgggtttttctaaatccatgccagctgaaactatcaaggagttgagaagggccaatcatgtgtcctataagcccacaatgacaaccacttatgagggctcatccatgtccctttcacggtccaacagtcgtgagcacttgggaggtggaagcgaatctgataactggagagaccgaaatggaattggacctggaagtcatagtgaatttgcagcttctattggcagccctaagcgtaaacaaaacaaatcaagtgagctttgtgttttatgcacacttttaggtatccccagattagaatgtgtttatttgggttggagtatcactgactgtggcctctctgacttcaagtgcttggtgtaattcacatgccatctcctctgtgaagcctccttgtttctcccagtgaagcaggccacctggttctctttcctctcactccattttgtgcgtgctttcactctagcacttgccataccaaagggcaattatttatctacctatctgtatctccttgtgaaatttgtgctccacaaaccaaagactgtatttgttcattttataaacatttatgaagtgtc

SEQ ID NO: 68481 - DNA, 2161 bp, Homo sapiens
tttaaaactcaggttgtatatatatactatatttttaaaaacatgatttatattccataatagctatagcagtataaattttaagcattttattatgataaatgtaatatctgtaataaaaattgactgttagccaaatagagaactaggtactcccccaaagtctggatcagctctacaaattagacctatgctcaagtgaaatagcttaagtaatgggttggactttgaagaaattgattttggctagttgatatgtattgtttttgtttaattctgtctgcctccactattaccatatactactcaaggtgataaagttattcccttgacttttttttaaacagccattcaatagtactttaaattcaggaatacacaaaagtgtttgttcacaaaagtattcctgaatttaaagtactactgaatggcagttggaaaaaaacacatatttatacacacacatatatatacatatacacatacatatgcacatgtgtgtgtataactttcaaaacttgatactcattcctagaaccaattatttgctttgctgttaatgttacctgaaaggttcttctctgtcctctctgttctctagtttttaccagtttaatatcttatatacaacctttccctcaatctctgcagcccatgttgaccttatccgactttggccttcttacatatacactttttgtcttattcaaagttatcctggctcagagtattctctagttgtcacatatgtgctttttttcactaataggagcagtaagctccttgaaagtaagagcttttttctcattatatttctacctgacaagcacagtgttaggcatgtaatagatgttcaataaattaaaaacttaatgaattgaattttttaatgttcaattttaactttttaacgttaaaccatcaattcaacctatctattttggaatatatttttagtatatttttgactaaaatgttagatttttttttctctccaggtctgtaaactgcagcaaaaagttcaaaactcaaagatgagtgaagcttcaggtattcagcaagaagacagctaccctaaaggatcaaagaacataaaaaatagccccagaaaatgtttgactgacactaacctttttcagaaaaacagcagctttcatccaatacgagttcataatcttcaaatgaaattgagaagagatgatatcatgtgggaacagtaacaaaacagcaaaactgtcaccttaatgaactttgtcagtgagaccttgaattgtctaaagtggttttaatttaatataactttgtgacattttgaatcatgtttctagtttctataaaacatgaagttgcagtatttaaaaattaatgcctaatgacctggtgggttccaaataataaattaattgcttttttatttttcttattgattgaagcccgtaacctcatcttgtcttagaaacattgttggctttgcagatatcttaagctaaatttaagaaattgtactagattgacaatattcaaaattgagttaaatccaagctacaagtaccattcattccacttttcatttagtaggtttggaaccttaaaaaccaatgttcaatgaacagagttcagaaagatcatttagctttcctggtgccttctttctattttgttttagagctgtgaaatgtttttctcttttggaaaaggaaaaacttaatagttacacagttttgtgaagaagcctttaatccaagttttatgagacagtaggaacctatagctacttaatttttaggagacagtaattcagttgcagaagctttcctctgctattcccattctcttttacaaaactagttttttttaaaaaatcaatgatcaattttatcttactactttataacttttgctgacttttattctttgcattgtatgtaatgtccatcagtataaattgagactgtgaatttctaggacccacaaaagtggtattttttttttgtacaagaaagtatagaggaagaggaagctgggcattaaattacctcatccagcagaaattcacggtagtatggtatatttttattttttatattttaaaatcaataatgtcaaatgtcattgtgtatgcatgctttataataaatttacacttgatcatttttctgga

SEQ ID NO: 68482 - DNA, 463 bp, Homo sapiens
gtattgtgatatgtaccaaagctatccgaaactcctttatttctaatatgacttagtgtatgttactaataattataattgttatgtaaaattttgtatgcccaaaagtaaggattggagagttagtactttatagaccaatattttgtttagatggattgatgttttgaatgtatgctattcaagtaacccttcttaattatatataatggtatgaaaaaagtttttaatcccttttaatcttatgattgtggaattatggttttgatggccattattactatttattcagatatgaatggagtgagtgttctctgtgccatttgttgtgggggacaggagatgctatttgggaattctggccactgccatatgcttagcttgtggataaaataatggagagaacagtaaacttaactttggctactcttttattacgtaaataaaaattaatgttcaatac

SEQ ID NO: 68483 - DNA, 2654 bp, Homo sapiens
cgcgacgttgcctgtgggtgcccgcgaaccaacggttagcggtggcaggggctgactgagagcgtctgcttgacagagtctttctctgtcacccaggctggagtacagtggcacgatctcggctccctgcaacgtccgcctcccgagttcaagtgattctcctgcctcagccacccgagtagctgggtctacaggtgtgcgccaccatgcctggctaatttttgtatttttaagagagacggggtttcaccatgctggccaggctggtctcgaactcctgacctcgtgatccgcctgcctcagcccctcaaagtgctaggattagagataatggattctgaattaatgcatagtatagtaggaagctatcataaacctccagaaagagtatttgttccctcattcacccagaatgaaccatctcagaattgccatcctgcaaacttagaagttacctctcctaagatacttcatagcccaaatagccaagctcttattttagccttaaaaactcttcaggaaaaaattcatcgtttagagctggagagaacacaagctgaagataacctgaacattctttccagagaagcagcacagtataagaaggccttagagaatgaaacaaatgagagaaatctggcacaccaggagctgataaagcagaaaaaagatataagtatacagttaagctcagcccagtctcgttgtactcttctagagaagcaactagaatatacaaagagaatggttctcaacgtagagcgagaaaagaacatgatcctagaacaacaggcccagcttcagagggaaaaagaacaagatcagatgaagctgtatgcaaaacttgaaaagcttgatgtcttagaaaaagagtgtttcagacttacaacaactcagaaaactgctgaggacaagattaaacatttagaagaaaaacttaaggaagaagaacatcagcgtaagctatttcaagacaaagcttctgagcttcaaactggacttgaaatcagtaaaattataatgtcttcagtttcaaatctaaagcactccaaggaaaagaagaaatcttcaaagaaaactaaatgtataaagagacgaccaccttggcaaatttgttcaaagtttggagcactgccttttgtggctgaaaagatgaggcaacatcgtgacccacatatccttcagaaaccttttaacgtgactgagactagatgtctccccaagccttctagaacaacttcctggtgtaaagctattcctcctgactcagaaaagtccatttccatttgtgacaatttatctgaacttttgatggcaatgcaagatgagctggaccaaatgagcatggagcaccaagaactactgaaacaaatgaaggaaactgaaagtcattcagtctgtgacgacatagaatgtgaactagagtgtttactcaagaaaatggaaattaaaggagaacaaatctccaaactgaagaagcatcaagacagtgtctgtaaactgcagcaaaaagttcaaaactcaaagatgagtgaagcttcaggtattcagcaagaagacagctaccctaaaggatcaaagaacataaaaaatagccccagaaaatgtttgactgacactaacctttttcagaaaaacagcagctttcatccaatacgagttcataatcttcaaatgaaattgagaagagatgatatcatgtgggaacagtaacaaaacagcaaaactgtcaccttaatgaactttgtcagtgagaccttgaattgtctaaagtggttttaatttaatataactttgtgacattttgaatcatgtttctagtttctataaaacatgaagttgcagtatttaaaaattaatgcctaatgacctggtgggttccaaataataaattaattgcttttttatttttcttattgattgaagcccgtaacctcatcttgtcttagaaacattgttggctttgcagatatcttaagctaaatttaagaaattgtactagattgacaatattcaaaattgagttaaatccaagctacaagtaccattcattccacttttcatttagtaggtttggaaccttaaaaaccaatgttcaatgaacagagttcagaaagatcatttagctttcctggtgccttctttctattttgttttagagctgtgaaatgtttttctcttttggaaaaggaaaaacttaatagttacacagttttgtgaagaagcctttaatccaagttttatgagacagtaggaacctatagctacttaatttttaggagacagtaattcagttgcagaagctttcctctgctattcccattctcttttacaaaactagttttttttaaaaaatcaatgatcaattttatcttactactttataacttttgctgacttttattctttgcattgtatgtaatgtccatcagtataaattgagactgtgaatttctaggacccacaaaagtggtattttttttttgtacaagaaagtatagaggaagaggaagctgggcattaaattacctcatccagcagaaattcacggtagtatggtatatttttattttttatattttaaaatcaataatgtcaaatgtcattgtgtatgcatgctttataataaatttacacttgatcatttttctgga

SEQ ID NO: 68484 - DNA, 3236 bp, Homo sapiens
cgcgacgttgcctgtgggtgcccgcgaaccaacggttagcggtggcaggggctgactgagagcgtctgcttgacagagtctttctctgtcacccaggctggagtacagtggcacgatctcggctccctgcaacgtccgcctcccgagttcaagtgattctcctgcctcagccacccgagtagctgggtctacaggtgtgcgccaccatgcctggctaatttttgtatttttaagagagacggggtttcaccatgctggccaggctggtctcgaactcctgacctcgtgatccgcctgcctcagcccctcaaagtgctaggattagagataatggattctgaattaatgcatagtatagtaggaagctatcataaacctccagaaagagtatttgttccctcattcacccagaatgaaccatctcagaattgccatcctgcaaacttagaagttacctctcctaagatacttcatagcccaaatagccaagctcttattttagccttaaaaactcttcaggaaaaaattcatcgtttagagctggagagaacacaagctgaagataacctgaacattctttccagagaagcagcacagtataagaaggccttagagaatgaaacaaatgagagaaatctggcacaccaggagctgataaagcagaaaaaagatataagtatacagttaagctcagcccagtctcgttgtactcttctagagaagcaactagaatatacaaagagaatggttctcaacgtagagcgagaaaagaacatgatcctagaacaacaggcccagcttcagagggaaaaagaacaagatcagatgaagctgtatgcaaaacttgaaaagcttgatgtcttagaaaaagagtgtttcagacttacaacaactcagaaaactgctgaggacaagattaaacatttagaagaaaaacttaaggaagaagaacatcagcgtaagctatttcaagacaaagcttctgagcttcaaactggacttgaaatcagtaaaattataatgtcttcagtttcaaatctaaagcactccaaggaaaagaagaaatcttcaaagaaaactaaatgtataaagagacgaccaccttggcaaatttgttcaaagtttggagcactgccttttgtggctgaaaagatgaggcaacatcgtgacccacatatccttcagaaaccttttaacgtgactgagactagatgtctccccaagccttctagaacaacttcctggtgtaaagctattcctcctgactcagaaaagtccatttccatttgtgacaatttatctgaacttttgatggcaatgcaagatgagctggaccaaatgagcatggagcaccaagaactactgaaacaaatgaaggaaactgaaagtcattcagtctgtgacgacatagaatgtgaactagagtgtttactcaagaaaatggaaattaaaggagaacaaatctccaaactgaagaagcatcaagacagtgtctgtaaactgcagcaaaaagttcaaaactcaaagatgagtgaagcttcaggtattcagcaagaagacagctaccctaaaggatcaaagaacataaaaaatagccccagaaaatgtttgactgacactaacctttttcagaaaaacagcagctttcatccaatacgagttcataatcttcaaatgaaattgagaagagatgatatcatgtgggaacagtaacaaaacagcaaaactgtcaccttaatgaactttgtcagtgagaccttgaattgtctaaagtggttttaatttaatataactttgtgacattttgaatcatgtttctagtttctataaaacatgaagttgcagtatttaaaaattaatgcctaatgacctggtgggttccaaataataaattaattgcttttttatttttcttattgattgaagcccgtaacctcatcttgtcttagaaacattgttggctttgcagatatcttaagctaaatttaagaaattgtactagattgacaatattcaaaattgagttaaatccaagctacaagtaccattcattccacttttcatttagtaggtttggaaccttaaaaaccaatgttcaatgaacagagttcagaaagatcatttagctttcctggtgccttctttctattttgttttagagctgtgaaatgtttttctcttttggaaaaggaaaaacttaatagttacacagttttgtgaagaagcctttaatccaagttttatgagacagtaggaacctatagctacttaatttttaggagacagtaattcagttgcagaagctttcctctgctattcccattctcttttacaaaactagttttttttaaaaaatcaatgatcaattttatcttactactttataacttttgctgacttttattctttgcattgtatgtaatgtccatcagtataaattgagactgtgaatttctaggacccacaaaagtggtattttttttttgtacaagaaagtatagaggaagaggaagctgggcattaaattacctcatccagcagaaattcacggtagtatggtatatttttattttttatattttaaaatcaataatgtcaaatgtcattgtgtatgcatgctttataataaatttacacttgatcatttttctggaagcctatgggaactagtacaactcttctgaactcttggtttctcactcaaatcctctgaggcaactggggaactagagtcatgaactgaattagaaatagaggacagagagaaaagatataatagaatggaggagctcaaatatagggtagcagtttaagagatggtgattcctaagggacagagttggaagtacatatttactgaattctttgaacccacagctgatggaatgttcaagctatagatgtgaaagaatttttaggtcaggatcttgggaagctaaggagagcaatttttaaaagacagtttttctgttttcctaggaaattcccaagaagcttgtgtaggaaaaagttggtaattatggatcttttggggaggaagagaactataattcattctaatggtgaggagagataccatgttagaataccttccatacctggaagtggggaagtgactgaagatgggcacattgatgcttgaaattgtccttgaaagtagttaatggcagagatcaaaatttcctcctgttgtaaatagtgcatgtgccctttgccagctttcactcccactcatt

SEQ ID NO: 68485 - DNA, 3162 bp, Homo sapiens
gggcagccgtagtctcggcgggcggcggtgaaaaaaagcgtcccccagccccgccaattcggcacccccgggaagacgctacttctccgatccctgagccctcgcccaccaccgccgagccagagggcacagggcggccctggcaatcctcgagcgccaggctgggccgcggagctggcggggcggcggggcccgaggcgcaaagcccgcccttcgcccagccccatcggtggggatcagcccagagggcgggagcagggagtggagacggggtcctcacccccagcccctcccctttctccgcccggcacaaaccgggagccgccccggccccagcgccttcttccccgcccaggcagacgcgacccgccgaggcaaagccttaggaaaaagccccgccctctggcaggctaccctccggaccccaagtgcgccgcgcgcggctgccagccactgccggctgctacgcatgcgtgactgcgaactgggccaagcgcccccggaggcgctaagcttgcgccctgaggcggtttccgttcccggacgtttggactctgtcctggagaaggggaaggaaaaaacagagtctttctctgtcacccaggctggagtacagtggcacgatctcggctccctgcaacgtccgcctcccgagttcaagtgattctcctgcctcagccacccgagtagctgggtctacaggtgtgcgccaccatgcctggctaatttttgtatttttaagagagacggggtttcaccatgctggccaggctggtctcgaactcctgacctcgtgatccgcctgcctcagcccctcaaagtgctaggattagagataatggattctgaattaatgcatagtatagtaggaagctatcataaacctccagaaagagtatttgttccctcattcacccagaatgaaccatctcagaattgccatcctgcaaacttagaagttacctctcctaagatacttcatagcccaaatagccaagctcttattttagccttaaaaactcttcaggaaaaaattcatcgtttagagctggagagaacacaagctgaagataacctgaacattctttccagagaagcagcacagtataagaaggccttagagaatgaaacaaatgagagaaatctggcacaccaggagctgataaagcagaaaaaagatataagtatacagttaagctcagcccagtctcgttgtactcttctagagaagcaactagaatatacaaagagaatggttctcaacgtagagcgagaaaagaacatgatcctagaacaacaggcccagcttcagagggaaaaagaacaagatcagatgaagctgtatgcaaaacttgaaaagcttgatgtcttagaaaaagagtgtttcagacttacaacaactcagaaaactgctgaggacaagattaaacatttagaagaaaaacttaaggaagaagaacatcagcgtaagctatttcaagacaaagcttctgagcttcaaactggacttgaaatcagtaaaattataatgtcttcagtttcaaatctaaagcactccaaggaaaagaagaaatcttcaaagaaaactaaatgtataaagagacgaccaccttggcaaatttgttcaaagtttggagcactgccttttgtggctgaaaagatgaggcaacatcgtgacccacatatccttcagaaaccttttaacgtgactgagactagatgtctccccaagccttctagaacaacttcctggtgtaaagctattcctcctgactcagaaaagtccatttccatttgtgacaatttatctgaacttttgatggcaatgcaagatgagctggaccaaatgagcatggagcaccaagaactactgaaacaaatgaaggaaactgaaagtcattcagtctgtgacgacatagaatgtgaactagagtgtttactcaagaaaatggaaattaaaggagaacaaatctccaaactgaagaagcatcaagacagtgtctgtaaactgcagcaaaaagttcaaaactcaaagatgagtgaagcttcaggtattcagcaagaagacagctaccctaaaggatcaaagaacataaaaaatagccccagaaaatgtttgactgacactaacctttttcagaaaaacagcagctttcatccaatacgagttcataatcttcaaatgaaattgagaagagatgatatcatgtgggaacagtaacaaaacagcaaaactgtcaccttaatgaactttgtcagtgagaccttgaattgtctaaagtggttttaatttaatataactttgtgacattttgaatcatgtttctagtttctataaaacatgaagttgcagtatttaaaaattaatgcctaatgacctggtgggttccaaataataaattaattgcttttttatttttcttattgattgaagcccgtaacctcatcttgtcttagaaacattgttggctttgcagatatcttaagctaaatttaagaaattgtactagattgacaatattcaaaattgagttaaatccaagctacaagtaccattcattccacttttcatttagtaggtttggaaccttaaaaaccaatgttcaatgaacagagttcagaaagatcatttagctttcctggtgccttctttctattttgttttagagctgtgaaatgtttttctcttttggaaaaggaaaaacttaatagttacacagttttgtgaagaagcctttaatccaagttttatgagacagtaggaacctatagctacttaatttttaggagacagtaattcagttgcagaagctttcctctgctattcccattctcttttacaaaactagttttttttaaaaaatcaatgatcaattttatcttactactttataacttttgctgacttttattctttgcattgtatgtaatgtccatcagtataaattgagactgtgaatttctaggacccacaaaagtggtattttttttttgtacaagaaagtatagaggaagaggaagctgggcattaaattacctcatccagcagaaattcacggtagtatggtatatttttattttttatattttaaaatcaataatgtcaaatgtcattgtgtatgcatgctttataataaatttacacttgatcatttttctgga

SEQ ID NO: 68486 - DNA, 2527 bp, Homo sapiens
atatttcctagaaaatggatcctcacttcttcacttggatataataatatagactgccgacattctgggaactgatcagtcttccagcttccagtgtggtgccctccctcaattgtgctgagtgtcccccaatccagagatattctgtaatttcttcctcagaaagaaacaaaacaaaattctgatcttcccagatgaagataatggattctgaattaatgcatagtatagtaggaagctatcataaacctccagaaagagtatttgttccctcattcacccagaatgaaccatctcagaattgccatcctgcaaacttagaagttacctctcctaagatacttcatagcccaaatagccaagctcttattttagccttaaaaactcttcaggaaaaaattcatcgtttagagctggagagaacacaagctgaagataacctgaacattctttccagagaagcagcacagtataagaaggccttagagaatgaaacaaatgagagaaatctggcacaccaggagctgataaagcagaaaaaagatataagtatacagttaagctcagcccagtctcgttgtactcttctagagaagcaactagaatatacaaagagaatggttctcaacgtagagcgagaaaagaacatgatcctagaacaacaggcccagcttcagagggaaaaagaacaagatcagatgaagctgtatgcaaaacttgaaaagcttgatgtcttagaaaaagagtgtttcagacttacaacaactcagaaaactgctgaggacaagattaaacatttagaagaaaaacttaaggaagaagaacatcagcgtaagctatttcaagacaaagcttctgagcttcaaactggacttgaaatcagtaaaattataatgtcttcagtttcaaatctaaagcactccaaggaaaagaagaaatcttcaaagaaaactaaatgtataaagagacgaccaccttggcaaatttgttcaaagtttggagcactgccttttgtggctgaaaagatgaggcaacatcgtgacccacatatccttcagaaaccttttaacgtgactgagactagatgtctccccaagccttctagaacaacttcctggtgtaaagctattcctcctgactcagaaaagtccatttccatttgtgacaatttatctgaacttttgatggcaatgcaagatgagctggaccaaatgagcatggagcaccaagaactactgaaacaaatgaaggaaactgaaagtcattcagtctgtgacgacatagaatgtgaactagagtgtttactcaagaaaatggaaattaaaggagaacaaatctccaaactgaagaagcatcaagacagtgtctgtaaactgcagcaaaaagttcaaaactcaaagatgagtgaagcttcaggtattcagcaagaagacagctaccctaaaggatcaaagaacataaaaaatagccccagaaaatgtttgactgacactaacctttttcagaaaaacagcagctttcatccaatacgagttcataatcttcaaatgaaattgagaagagatgatatcatgtgggaacagtaacaaaacagcaaaactgtcaccttaatgaactttgtcagtgagaccttgaattgtctaaagtggttttaatttaatataactttgtgacattttgaatcatgtttctagtttctataaaacatgaagttgcagtatttaaaaattaatgcctaatgacctggtgggttccaaataataaattaattgcttttttatttttcttattgattgaagcccgtaacctcatcttgtcttagaaacattgttggctttgcagatatcttaagctaaatttaagaaattgtactagattgacaatattcaaaattgagttaaatccaagctacaagtaccattcattccacttttcatttagtaggtttggaaccttaaaaaccaatgttcaatgaacagagttcagaaagatcatttagctttcctggtgccttctttctattttgttttagagctgtgaaatgtttttctcttttggaaaaggaaaaacttaatagttacacagttttgtgaagaagcctttaatccaagttttatgagacagtaggaacctatagctacttaatttttaggagacagtaattcagttgcagaagctttcctctgctattcccattctcttttacaaaactagttttttttaaaaaatcaatgatcaattttatcttactactttataacttttgctgacttttattctttgcattgtatgtaatgtccatcagtataaattgagactgtgaatttctaggacccacaaaagtggtattttttttttgtacaagaaagtatagaggaagaggaagctgggcattaaattacctcatccagcagaaattcacggtagtatggtatatttttattttttatattttaaaatcaataatgtcaaatgtcattgtgtatgcatgctttataataaatttacacttgatcatttttctgga

SEQ ID NO: 68487 - DNA, 2399 bp, Homo sapiens
cgcgacgttgcctgtgggtgcccgcgaaccaacggttagcggtggcaggggctgactgagagcgtctgcttgataatggattctgaattaatgcatagtatagtaggaagctatcataaacctccagaaagagtatttgttccctcattcacccagaatgaaccatctcagaattgccatcctgcaaacttagaagttacctctcctaagatacttcatagcccaaatagccaagctcttattttagccttaaaaactcttcaggaaaaaattcatcgtttagagctggagagaacacaagctgaagataacctgaacattctttccagagaagcagcacagtataagaaggccttagagaatgaaacaaatgagagaaatctggcacaccaggagctgataaagcagaaaaaagatataagtatacagttaagctcagcccagtctcgttgtactcttctagagaagcaactagaatatacaaagagaatggttctcaacgtagagcgagaaaagaacatgatcctagaacaacaggcccagcttcagagggaaaaagaacaagatcagatgaagctgtatgcaaaacttgaaaagcttgatgtcttagaaaaagagtgtttcagacttacaacaactcagaaaactgctgaggacaagattaaacatttagaagaaaaacttaaggaagaagaacatcagcgtaagctatttcaagacaaagcttctgagcttcaaactggacttgaaatcagtaaaattataatgtcttcagtttcaaatctaaagcactccaaggaaaagaagaaatcttcaaagaaaactaaatgtataaagagacgaccaccttggcaaatttgttcaaagtttggagcactgccttttgtggctgaaaagatgaggcaacatcgtgacccacatatccttcagaaaccttttaacgtgactgagactagatgtctccccaagccttctagaacaacttcctggtgtaaagctattcctcctgactcagaaaagtccatttccatttgtgacaatttatctgaacttttgatggcaatgcaagatgagctggaccaaatgagcatggagcaccaagaactactgaaacaaatgaaggaaactgaaagtcattcagtctgtgacgacatagaatgtgaactagagtgtttactcaagaaaatggaaattaaaggagaacaaatctccaaactgaagaagcatcaagacagtgtctgtaaactgcagcaaaaagttcaaaactcaaagatgagtgaagcttcaggtattcagcaagaagacagctaccctaaaggatcaaagaacataaaaaatagccccagaaaatgtttgactgacactaacctttttcagaaaaacagcagctttcatccaatacgagttcataatcttcaaatgaaattgagaagagatgatatcatgtgggaacagtaacaaaacagcaaaactgtcaccttaatgaactttgtcagtgagaccttgaattgtctaaagtggttttaatttaatataactttgtgacattttgaatcatgtttctagtttctataaaacatgaagttgcagtatttaaaaattaatgcctaatgacctggtgggttccaaataataaattaattgcttttttatttttcttattgattgaagcccgtaacctcatcttgtcttagaaacattgttggctttgcagatatcttaagctaaatttaagaaattgtactagattgacaatattcaaaattgagttaaatccaagctacaagtaccattcattccacttttcatttagtaggtttggaaccttaaaaaccaatgttcaatgaacagagttcagaaagatcatttagctttcctggtgccttctttctattttgttttagagctgtgaaatgtttttctcttttggaaaaggaaaaacttaatagttacacagttttgtgaagaagcctttaatccaagttttatgagacagtaggaacctatagctacttaatttttaggagacagtaattcagttgcagaagctttcctctgctattcccattctcttttacaaaactagttttttttaaaaaatcaatgatcaattttatcttactactttataacttttgctgacttttattctttgcattgtatgtaatgtccatcagtataaattgagactgtgaatttctaggacccacaaaagtggtattttttttttgtacaagaaagtatagaggaagaggaagctgggcattaaattacctcatccagcagaaattcacggtagtatggtatatttttattttttatattttaaaatcaataatgtcaaatgtcattgtgtatgcatgctttataataaatttacacttgatcatttttctgga

SEQ ID NO: 68488 - DNA, 2491 bp, Homo sapiens
cgcgacgttgcctgtgggtgcccgcgaaccaacggttagcggtggcaggggctgactgagagcgtctgcttgacagagtctttctctgtcacccaggctggagtacagtggcacgatctcggctccctgcaacgtccgcctcccgagttcaagtgattctcctgcctcagccacccgagtagctgggtctacaggtgtgcgccaccatgcctggctaatttttgtatttttaagagagacggggtttcaccatgctggccaggctggtctcgaactcctgacctcgtgatccgcctgcctcagcccctcaaagtgctaggattagagctcttattttagccttaaaaactcttcaggaaaaaattcatcgtttagagctggagagaacacaagctgaagataacctgaacattctttccagagaagcagcacagtataagaaggccttagagaatgaaacaaatgagagaaatctggcacaccaggagctgataaagcagaaaaaagatataagtatacagttaagctcagcccagtctcgttgtactcttctagagaagcaactagaatatacaaagagaatggttctcaacgtagagcgagaaaagaacatgatcctagaacaacaggcccagcttcagagggaaaaagaacaagatcagatgaagctgtatgcaaaacttgaaaagcttgatgtcttagaaaaagagtgtttcagacttacaacaactcagaaaactgctgaggacaagattaaacatttagaagaaaaacttaaggaagaagaacatcagcgtaagctatttcaagacaaagcttctgagcttcaaactggacttgaaatcagtaaaattataatgtcttcagtttcaaatctaaagcactccaaggaaaagaagaaatcttcaaagaaaactaaatgtataaagagacgaccaccttggcaaatttgttcaaagtttggagcactgccttttgtggctgaaaagatgaggcaacatcgtgacccacatatccttcagaaaccttttaacgtgactgagactagatgtctccccaagccttctagaacaacttcctggtgtaaagctattcctcctgactcagaaaagtccatttccatttgtgacaatttatctgaacttttgatggcaatgcaagatgagctggaccaaatgagcatggagcaccaagaactactgaaacaaatgaaggaaactgaaagtcattcagtctgtgacgacatagaatgtgaactagagtgtttactcaagaaaatggaaattaaaggagaacaaatctccaaactgaagaagcatcaagacagtgtctgtaaactgcagcaaaaagttcaaaactcaaagatgagtgaagcttcaggtattcagcaagaagacagctaccctaaaggatcaaagaacataaaaaatagccccagaaaatgtttgactgacactaacctttttcagaaaaacagcagctttcatccaatacgagttcataatcttcaaatgaaattgagaagagatgatatcatgtgggaacagtaacaaaacagcaaaactgtcaccttaatgaactttgtcagtgagaccttgaattgtctaaagtggttttaatttaatataactttgtgacattttgaatcatgtttctagtttctataaaacatgaagttgcagtatttaaaaattaatgcctaatgacctggtgggttccaaataataaattaattgcttttttatttttcttattgattgaagcccgtaacctcatcttgtcttagaaacattgttggctttgcagatatcttaagctaaatttaagaaattgtactagattgacaatattcaaaattgagttaaatccaagctacaagtaccattcattccacttttcatttagtaggtttggaaccttaaaaaccaatgttcaatgaacagagttcagaaagatcatttagctttcctggtgccttctttctattttgttttagagctgtgaaatgtttttctcttttggaaaaggaaaaacttaatagttacacagttttgtgaagaagcctttaatccaagttttatgagacagtaggaacctatagctacttaatttttaggagacagtaattcagttgcagaagctttcctctgctattcccattctcttttacaaaactagttttttttaaaaaatcaatgatcaattttatcttactactttataacttttgctgacttttattctttgcattgtatgtaatgtccatcagtataaattgagactgtgaatttctaggacccacaaaagtggtattttttttttgtacaagaaagtatagaggaagaggaagctgggcattaaattacctcatccagcagaaattcacggtagtatggtatatttttattttttatattttaaaatcaataatgtcaaatgtcattgtgtatgcatgctttataataaatttacacttgatcatttttctgga

SEQ ID NO: 68489 - DNA, 1995 bp, Homo sapiens
cgcgacgttgcctgtgggtgcccgcgaaccaacggttagcggtggcaggggctgactgagagcgtctgcttgacagagtctttctctgtcacccaggctggagtacagtggcacgatctcggctccctgcaacgtccgcctcccgagttcaagtgattctcctgcctcagccacccgagtagctgggtctacaggtgtgcgccaccatgcctggctaatttttgtatttttaagagagacggggtttcaccatgctggccaggctggtctcgaactcctgacctcgtgatccgcctgcctcagcccctcaaagtgctaggattagagataatggattctgaattaatgcatagtatagtaggaagctatcataaacctccagaaagagtatttgttccctcattcacccagaatgaaccatctcagaattgccatcctgcaaacttagaagttacctctcctaagatacttcatagcccaaatagccaagctcttattttagccttaaaaactcttcaggaaaaaattcatcgtttagagctggagagaacacaagctgaagataacctgaacattctttccagagaagcagcacagtataagaaggccttagagaatgaaacaaatgagagaaatctggcacaccaggagctgataaagcagaaaaaagatataagtatacagttaagctcagcccagtctcgttgtactcttctagagaagcaactagaatatacaaagagaatggttctcaacgtagagcgagaaaagaacatgatcctagaacaacaggcccagcttcagagggaaaaagaacaagatcagatgaagctgtatgcaaaacttgaaaagcttgatgtcttagaaaaagagtgtttcagacttacaacaactcagaaaactgctgaggacaagattaaacatttagaagaaaaacttaaggaagaagaacatcagcgtaagctatttcaagacaaagcttctgagcttcaaactggacttgaaatcagtaaaattataatgtcttcagtttcaaatctaaagcactccaaggaaaagaagaaatcttcaaaggtgtgcatataaaattttttcccaaacaaaaatactgctaatacttatttatataacctcttaatccttatacctacccctttccaaaaaggatttgaagatataaaataaaagacatgcaataatgcgtgtcaagtaatggatgatggtttggggtataaggacagaaaatttcataagattcaggttaaaaaaagtagcagcagtcatgtacaaaatttagctctgagtttgcttgacaaccaaagcaaaaaggaacatataatggacagtatagctatctttgtgaaataacaggaagcactccagtttttctagaaagattaacatttttctagttttaaacttctggagaaacatattttgtgatagtttataaaagaggcagtaaacaacacagtagatactgacaacataataaatcctgaaagcagttttatgtaatatatagacaataaaaaataaggtttttcttatagacctgttaagtctgtaaagtcatttatatagggaatttattgttatatgtaatttctatgcttatttcttgtgaatttgcccaaaagtaaggattggagagttagtactttatagaccaatattttgtttagatggattgatgttttgaatgtatgctattcaagtaacccttcttaattatatataatggtatgaaaaaagtttttaatcccttttaatcttatgattgtggaattatggttttgatggccattattactatttattcagatatgaatggagtgagtgttctctgtgccatttgttgtgggggacaggagatgctatttgggaattctggccactgccatatgcttagcttgtggataaaataatggagagaacagtaaacttaactttggctactcttttattacgtaaataaaaattaatgttcaatac

SEQ ID NO: 68490 - DNA, 1276 bp, Homo sapiens
  misc_feature (15)..(15): n is a, c, g, or t
cggctgcttccgccnccgcggttttgctatcgtcgatccacgcggcccgcctcaagcgtacggggccatcacaggataacaaatctccaaacgtgaagaagcatcaagacagtgtctgtaaactgcagcaaaaagttcaaaactcaaagatgagtgaagcttcaggtattcagcaagaagacagctaccctaaaggatcaaagaacataaaaaatagccccagaaaatgtttgactgacactaacctttttcagaaaaacagcagctttcatccaatacgagttcataatcttcaaatgaaattgagaagagatgatatcatgtgggaacagtaacaaaacagcaaaactgtcaccttaatgaactttgtcagtgagaccttgaattgtctaaagtggttttaatttaatataactttgtgacattttgaatcatgtttctagtttctataaaacatgaagttgcagtatttaaaaattaatgcctaatgacctggtgggttccaaataataaattaattgcttttttatttttcttattgattgaagcccgtaacctcatcttgtcttagaaacattgttggctttgcagatatcttaagctaaatttaagaaattgtactagattgacaatattcaaaattgagttaaatccaagctacaagtaccattcattccacttttcatttagtaggtttggaaccttaaaaaccaatgttcaatgaacagagttcagaaagatcatttagctttcctggtgccttctttctattttgttttagagctgtgaaatgtttttctcttttggaaaaggaaaaacttaatagttacacagttttgtgaagaagcctttaatccaagttttatgagacagtaggaacctatagctacttaatttttaggagacagtaattcagttgcagaagctttcctctgctattcccattctcttttacaaaactagttttttttaaaaaatcaatgatcaattttatcttactactttataacttttgctgacttttattctttgcattgtatgtaatgtccatcagtataaattgagactgtgaatttctaggacccacaaaagtggtattttttttttgtacaagaaagtatagaggaagaggaagctgggcattaaattacctcatccagcagaaattcacggtagtatggtatatttttattttttatattttaaaatcaataatgtcaaatgtcattgtgtatgcatgctttataataaatttacacttgatcatttttctgga

SEQ ID NO: 68491 - DNA, 843 bp, Homo sapiens
gggcagccgtagtctcggcgggcggcggtgaaaaaaagcgtcccccagccccgccaattcggcacccccgggaagacgctacttctccgatccctgagccctcgcccaccaccgccgagccagagggcacagggcggccctggcaatcctcgagcgccaggctgggccgcggagctggcggggcggcggggcccgaggcgcaaagcccgcccttcgcccagccccatcggtggggatcagcccagagggcgggagcagggagtggagacggggtcctcacccccagcccctcccctttctccgcccggcacaaaccgggagccgccccggccccagcgccttcttccccgcccaggcagacgcgacccgccgaggcaaagccttaggaaaaagccccgccctctggcaggctaccctccggaccccaagtgcgccgcgcgcggctgccagccactgccggctgctacgcatgcgtgactgcgaactgggccaagcgcccccggaggcgctaagcttgcgccctgaggcggtttccgttcccggacgtttggactctgtcctggagaaggggaaggaaaaaatgggactgtctagttgcaaaaacaagctcagggatcccactgattctactttacgataatggattctgaattaatgcatagtatagtaggaagctatcataaacctccagaaagagtatttgttccctcattcacccagaatgaaccacaccagtgggccatccactaaactgaagtcccatcatagatactccacctgttcacctgaagaggtgagtaaagcaatggagtgtaaccacagaattctgagcagaagatccaa

SEQ ID NO: 68492 - DNA, 727 bp, Homo sapiens
gggcagccgtagtctcggcgggcggcggtgaaaaaaagcgtcccccagccccgccaattcggcacccccgggaagacgctacttctccgatccctgagccctcgcccaccaccgccgagccagagggcacagggcggccctggcaatcctcgagcgccaggctgggccgcggagctggcggggcggcggggcccgaggcgcaaagcccgcccttcgcccagccccatcggtggggatcagcccagagggcgggagcagggagtggagacggggtcctcacccccagcccctcccctttctccgcccggcacaaaccgggagccgccccggccccagcgccttcttccccgcccaggcagacgcgacccgccgaggcaaagccttaggaaaaagccccgccctctggcaggctaccctccggaccccaagtgcgccgcgcgcggctgccagccactgccggctgctacgcatgcgtgactgcgaactgggccaagcgcccccggaggcgctaagcttgcgccctgaggcggtttccgttcccggacgtttggactctgtcctggagaaggggaaggaaaaagtaagacgtagaagtacactgagacttcgtcacacataaaacaagcacgacaaagaaagagggcgcgaagggactcctggaagaaattgagtctacatttaagatcaccctaaaagtagtgacggcctcttcattactccaaacccc

SEQ ID NO: 68493 - DNA, 2963 bp, Homo sapiens
gggcagccgtagtctcggcgggcggcggtgaaaaaaagcgtcccccagccccgccaattcggcacccccgggaagacgctacttctccgatccctgagccctcgcccaccaccgccgagccagagggcacagggcggccctggcaatcctcgagcgccaggctgggccgcggagctggcggggcggcggggcccgaggcgcaaagcccgcccttcgcccagccccatcggtggggatcagcccagagggcgggagcagggagtggagacggggtcctcacccccagcccctcccctttctccgcccggcacaaaccgggagccgccccggccccagcgccttcttccccgcccaggcagacgcgacccgccgaggcaaagccttaggaaaaagccccgccctctggcaggctaccctccggaccccaagtgcgccgcgcgcggctgccagccactgccggctgctacgcatgcgtgactgcgaactgggccaagcgcccccggaggcgctaagcttgcgccctgaggcggtttccgttcccggacgtttggactctgtcctggagaaggggaaggaaaaaatgggactgtctagttgcaaaaacaagctcagggatcccactgattctactttacgataatggattctgaattaatgcatagtatagtaggaagctatcataaacctccagaaagagtatttgttccctcattcacccagaatgaaccatctcagaattgccatcctgcaaacttagaagttacctctcctaagatacttcatagcccaaatagccaagctcttattttagccttaaaaactcttcaggaaaaaattcatcgtttagagctggagagaacacaagctgaagataacctgaacattctttccagagaagcagcacagtataagaaggccttagagaatgaaacaaatgagagaaatctggcacaccaggagctgataaagcagaaaaaagatataagtatacagttaagctcagcccagtctcgttgtactcttctagagaagcaactagaatatacaaagagaatggttctcaacgtagagcgagaaaagaacatgatcctagaacaacaggcccagcttcagagggaaaaagaacaagatcagatgaagctgtatgcaaaacttgaaaagcttgatgtcttagaaaaagagtgtttcagacttacaacaactcagaaaactgctgaggacaagattaaacatttagaagaaaaacttaaggaagaagaacatcagcgtaagctatttcaagacaaagcttctgagcttcaaactggacttgaaatcagtaaaattataatgtcttcagtttcaaatctaaagcactccaaggaaaagaagaaatcttcaaagaaaactaaatgtataaagagacgaccaccttggcaaatttgttcaaagtttggagcactgccttttgtggctgaaaagatgaggcaacatcgtgacccacatatccttcagaaaccttttaacgtgactgagactagatgtctccccaagccttctagaacaacttcctggtgtaaagctattcctcctgactcagaaaagtccatttccatttgtgacaatttatctgaacttttgatggcaatgcaagatgagctggaccaaatgagcatggagcaccaagaactactgaaacaaatgaaggaaactgaaagtcattcagtctgtgacgacatagaatgtgaactagagtgtttactcaagaaaatggaaattaaaggagaacaaatctccaaactgaagaagcatcaagacagtgtctgtaaactgcagcaaaaagttcaaaactcaaagatgagtgaagcttcaggtattcagcaagaagacagctaccctaaaggatcaaagaacataaaaaatagccccagaaaatgtttgactgacactaacctttttcagaaaaacagcagctttcatccaatacgagttcataatcttcaaatgaaattgagaagagatgatatcatgtgggaacagtaacaaaacagcaaaactgtcaccttaatgaactttgtcagtgagaccttgaattgtctaaagtggttttaatttaatataactttgtgacattttgaatcatgtttctagtttctataaaacatgaagttgcagtatttaaaaattaatgcctaatgacctggtgggttccaaataataaattaattgcttttttatttttcttattgattgaagcccgtaacctcatcttgtcttagaaacattgttggctttgcagatatcttaagctaaatttaagaaattgtactagattgacaatattcaaaattgagttaaatccaagctacaagtaccattcattccacttttcatttagtaggtttggaaccttaaaaaccaatgttcaatgaacagagttcagaaagatcatttagctttcctggtgccttctttctattttgttttagagctgtgaaatgtttttctcttttggaaaaggaaaaacttaatagttacacagttttgtgaagaagcctttaatccaagttttatgagacagtaggaacctatagctacttaatttttaggagacagtaattcagttgcagaagctttcctctgctattcccattctcttttacaaaactagttttttttaaaaaatcaatgatcaattttatcttactactttataacttttgctgacttttattctttgcattgtatgtaatgtccatcagtataaattgagactgtgaatttctaggacccacaaaagtggtattttttttttgtacaagaaagtatagaggaagaggaagctgggcattaaattacctcatccagcagaaattcacggtagtatggtatatttttattttttatattttaaaatcaataatgtcaaatgtcattgtgtatgcatgctttataataaatttacacttgatcatttttctgga

SEQ ID NO: 68494 - DNA, 2755 bp, Homo sapiens
cgcgacgttgcctgtgggtgcccgcgaaccaacggttagcggtggcaggggctgactgagagcgtctgcttgattcaggttatgctttctggccagaatactgcataggtgatgttgcgtccttctccaggtttcatatccagaggcacatggtggccttctacctctcacagacagagtctttctctgtcacccaggctggagtacagtggcacgatctcggctccctgcaacgtccgcctcccgagttcaagtgattctcctgcctcagccacccgagtagctgggtctacaggtgtgcgccaccatgcctggctaatttttgtatttttaagagagacggggtttcaccatgctggccaggctggtctcgaactcctgacctcgtgatccgcctgcctcagcccctcaaagtgctaggattagagataatggattctgaattaatgcatagtatagtaggaagctatcataaacctccagaaagagtatttgttccctcattcacccagaatgaaccatctcagaattgccatcctgcaaacttagaagttacctctcctaagatacttcatagcccaaatagccaagctcttattttagccttaaaaactcttcaggaaaaaattcatcgtttagagctggagagaacacaagctgaagataacctgaacattctttccagagaagcagcacagtataagaaggccttagagaatgaaacaaatgagagaaatctggcacaccaggagctgataaagcagaaaaaagatataagtatacagttaagctcagcccagtctcgttgtactcttctagagaagcaactagaatatacaaagagaatggttctcaacgtagagcgagaaaagaacatgatcctagaacaacaggcccagcttcagagggaaaaagaacaagatcagatgaagctgtatgcaaaacttgaaaagcttgatgtcttagaaaaagagtgtttcagacttacaacaactcagaaaactgctgaggacaagattaaacatttagaagaaaaacttaaggaagaagaacatcagcgtaagctatttcaagacaaagcttctgagcttcaaactggacttgaaatcagtaaaattataatgtcttcagtttcaaatctaaagcactccaaggaaaagaagaaatcttcaaagaaaactaaatgtataaagagacgaccaccttggcaaatttgttcaaagtttggagcactgccttttgtggctgaaaagatgaggcaacatcgtgacccacatatccttcagaaaccttttaacgtgactgagactagatgtctccccaagccttctagaacaacttcctggtgtaaagctattcctcctgactcagaaaagtccatttccatttgtgacaatttatctgaacttttgatggcaatgcaagatgagctggaccaaatgagcatggagcaccaagaactactgaaacaaatgaaggaaactgaaagtcattcagtctgtgacgacatagaatgtgaactagagtgtttactcaagaaaatggaaattaaaggagaacaaatctccaaactgaagaagcatcaagacagtgtctgtaaactgcagcaaaaagttcaaaactcaaagatgagtgaagcttcaggtattcagcaagaagacagctaccctaaaggatcaaagaacataaaaaatagccccagaaaatgtttgactgacactaacctttttcagaaaaacagcagctttcatccaatacgagttcataatcttcaaatgaaattgagaagagatgatatcatgtgggaacagtaacaaaacagcaaaactgtcaccttaatgaactttgtcagtgagaccttgaattgtctaaagtggttttaatttaatataactttgtgacattttgaatcatgtttctagtttctataaaacatgaagttgcagtatttaaaaattaatgcctaatgacctggtgggttccaaataataaattaattgcttttttatttttcttattgattgaagcccgtaacctcatcttgtcttagaaacattgttggctttgcagatatcttaagctaaatttaagaaattgtactagattgacaatattcaaaattgagttaaatccaagctacaagtaccattcattccacttttcatttagtaggtttggaaccttaaaaaccaatgttcaatgaacagagttcagaaagatcatttagctttcctggtgccttctttctattttgttttagagctgtgaaatgtttttctcttttggaaaaggaaaaacttaatagttacacagttttgtgaagaagcctttaatccaagttttatgagacagtaggaacctatagctacttaatttttaggagacagtaattcagttgcagaagctttcctctgctattcccattctcttttacaaaactagttttttttaaaaaatcaatgatcaattttatcttactactttataacttttgctgacttttattctttgcattgtatgtaatgtccatcagtataaattgagactgtgaatttctaggacccacaaaagtggtattttttttttgtacaagaaagtatagaggaagaggaagctgggcattaaattacctcatccagcagaaattcacggtagtatggtatatttttattttttatattttaaaatcaataatgtcaaatgtcattgtgtatgcatgctttataataaatttacacttgatcatttttctgga

SEQ ID NO: 68495 - DNA, 2236 bp, Homo sapiens
cgcgacgttgcctgtgggtgcccgcgaaccaacggttagcggtggcaggggctgactgagagcgtctgcttgctcttattttagccttaaaaactcttcaggaaaaaattcatcgtttagagctggagagaacacaagctgaagataacctgaacattctttccagagaagcagcacagtataagaaggccttagagaatgaaacaaatgagagaaatctggcacaccaggagctgataaagcagaaaaaagatataagtatacagttaagctcagcccagtctcgttgtactcttctagagaagcaactagaatatacaaagagaatggttctcaacgtagagcgagaaaagaacatgatcctagaacaacaggcccagcttcagagggaaaaagaacaagatcagatgaagctgtatgcaaaacttgaaaagcttgatgtcttagaaaaagagtgtttcagacttacaacaactcagaaaactgctgaggacaagattaaacatttagaagaaaaacttaaggaagaagaacatcagcgtaagctatttcaagacaaagcttctgagcttcaaactggacttgaaatcagtaaaattataatgtcttcagtttcaaatctaaagcactccaaggaaaagaagaaatcttcaaagaaaactaaatgtataaagagacgaccaccttggcaaatttgttcaaagtttggagcactgccttttgtggctgaaaagatgaggcaacatcgtgacccacatatccttcagaaaccttttaacgtgactgagactagatgtctccccaagccttctagaacaacttcctggtgtaaagctattcctcctgactcagaaaagtccatttccatttgtgacaatttatctgaacttttgatggcaatgcaagatgagctggaccaaatgagcatggagcaccaagaactactgaaacaaatgaaggaaactgaaagtcattcagtctgtgacgacatagaatgtgaactagagtgtttactcaagaaaatggaaattaaaggagaacaaatctccaaactgaagaagcatcaagacagtgtctgtaaactgcagcaaaaagttcaaaactcaaagatgagtgaagcttcaggtattcagcaagaagacagctaccctaaaggatcaaagaacataaaaaatagccccagaaaatgtttgactgacactaacctttttcagaaaaacagcagctttcatccaatacgagttcataatcttcaaatgaaattgagaagagatgatatcatgtgggaacagtaacaaaacagcaaaactgtcaccttaatgaactttgtcagtgagaccttgaattgtctaaagtggttttaatttaatataactttgtgacattttgaatcatgtttctagtttctataaaacatgaagttgcagtatttaaaaattaatgcctaatgacctggtgggttccaaataataaattaattgcttttttatttttcttattgattgaagcccgtaacctcatcttgtcttagaaacattgttggctttgcagatatcttaagctaaatttaagaaattgtactagattgacaatattcaaaattgagttaaatccaagctacaagtaccattcattccacttttcatttagtaggtttggaaccttaaaaaccaatgttcaatgaacagagttcagaaagatcatttagctttcctggtgccttctttctattttgttttagagctgtgaaatgtttttctcttttggaaaaggaaaaacttaatagttacacagttttgtgaagaagcctttaatccaagttttatgagacagtaggaacctatagctacttaatttttaggagacagtaattcagttgcagaagctttcctctgctattcccattctcttttacaaaactagttttttttaaaaaatcaatgatcaattttatcttactactttataacttttgctgacttttattctttgcattgtatgtaatgtccatcagtataaattgagactgtgaatttctaggacccacaaaagtggtattttttttttgtacaagaaagtatagaggaagaggaagctgggcattaaattacctcatccagcagaaattcacggtagtatggtatatttttattttttatattttaaaatcaataatgtcaaatgtcattgtgtatgcatgctttataataaatttacacttgatcatttttctgga

SEQ ID NO: 68496 - DNA, 2277 bp, Homo sapiens
cgcgacgttgcctgtgggtgcccgcgaaccaacggttagcggtggcaggggctgactgagagcgtctgcttggttgggaaaccaattagaaaggagtgttctgctagaaacagctcttattttagccttaaaaactcttcaggaaaaaattcatcgtttagagctggagagaacacaagctgaagataacctgaacattctttccagagaagcagcacagtataagaaggccttagagaatgaaacaaatgagagaaatctggcacaccaggagctgataaagcagaaaaaagatataagtatacagttaagctcagcccagtctcgttgtactcttctagagaagcaactagaatatacaaagagaatggttctcaacgtagagcgagaaaagaacatgatcctagaacaacaggcccagcttcagagggaaaaagaacaagatcagatgaagctgtatgcaaaacttgaaaagcttgatgtcttagaaaaagagtgtttcagacttacaacaactcagaaaactgctgaggacaagattaaacatttagaagaaaaacttaaggaagaagaacatcagcgtaagctatttcaagacaaagcttctgagcttcaaactggacttgaaatcagtaaaattataatgtcttcagtttcaaatctaaagcactccaaggaaaagaagaaatcttcaaagaaaactaaatgtataaagagacgaccaccttggcaaatttgttcaaagtttggagcactgccttttgtggctgaaaagatgaggcaacatcgtgacccacatatccttcagaaaccttttaacgtgactgagactagatgtctccccaagccttctagaacaacttcctggtgtaaagctattcctcctgactcagaaaagtccatttccatttgtgacaatttatctgaacttttgatggcaatgcaagatgagctggaccaaatgagcatggagcaccaagaactactgaaacaaatgaaggaaactgaaagtcattcagtctgtgacgacatagaatgtgaactagagtgtttactcaagaaaatggaaattaaaggagaacaaatctccaaactgaagaagcatcaagacagtgtctgtaaactgcagcaaaaagttcaaaactcaaagatgagtgaagcttcaggtattcagcaagaagacagctaccctaaaggatcaaagaacataaaaaatagccccagaaaatgtttgactgacactaacctttttcagaaaaacagcagctttcatccaatacgagttcataatcttcaaatgaaattgagaagagatgatatcatgtgggaacagtaacaaaacagcaaaactgtcaccttaatgaactttgtcagtgagaccttgaattgtctaaagtggttttaatttaatataactttgtgacattttgaatcatgtttctagtttctataaaacatgaagttgcagtatttaaaaattaatgcctaatgacctggtgggttccaaataataaattaattgcttttttatttttcttattgattgaagcccgtaacctcatcttgtcttagaaacattgttggctttgcagatatcttaagctaaatttaagaaattgtactagattgacaatattcaaaattgagttaaatccaagctacaagtaccattcattccacttttcatttagtaggtttggaaccttaaaaaccaatgttcaatgaacagagttcagaaagatcatttagctttcctggtgccttctttctattttgttttagagctgtgaaatgtttttctcttttggaaaaggaaaaacttaatagttacacagttttgtgaagaagcctttaatccaagttttatgagacagtaggaacctatagctacttaatttttaggagacagtaattcagttgcagaagctttcctctgctattcccattctcttttacaaaactagttttttttaaaaaatcaatgatcaattttatcttactactttataacttttgctgacttttattctttgcattgtatgtaatgtccatcagtataaattgagactgtgaatttctaggacccacaaaagtggtattttttttttgtacaagaaagtatagaggaagaggaagctgggcattaaattacctcatccagcagaaattcacggtagtatggtatatttttattttttatattttaaaatcaataatgtcaaatgtcattgtgtatgcatgctttataataaatttacacttgatcatttttctgga

SEQ ID NO: 68497 - DNA, 1541 bp, Homo sapiens
cgcgacgttgcctgtgggtgcccgcgaaccaacggttagcggtggcaggggctgactgagagcgtctgcttgacagagtctttctctgtcacccaggctggagtacagtggcacgatctcggctccctgcaacgtccgcctcccgagttcaagtgattctcctgcctcagccacccgagtagctgggtctacaggtgtgcgccaccatgcctggctaatttttgtatttttaagagagacggggtttcaccatgctggccaggctggtctcgaactcctgacctcgtgatccgcctgcctcagcccctcaaagtgctaggattagagataatggattctgaattaatgcatagtatagtaggaagctatcataaacctccagaaagagtatttgttccctcattcacccagaatgaaccatctcagaattgccatcctgcaaacttagaagttacctctcctaagatacttcatagcccaaatagccaagctcttattttagccttaaaaactcttcaggaaaaaattcatcgtttagagctggagagaacacaagctgaagataacctgaacattctttccagagaagcagcacagtataagaaggccttagagaatgaaacaaatgagagaaatctggcacaccaggagctgataaagcagaaaaaagatataagtatacagttaagctcagcccagtctcgttgtactcttctagagaagcaactagaatatacaaagagaatggttctcaacgtagagcgagaaaagaacatgatcctagaacaacaggcccagcttcagagggaaaaagaacaagatcagatgaagctgtatgcaaaacttgaaaagcttgatgtcttagaaaaagagtgtttcagacttacaacaactcagaaaactgctgaggacaagattaaacatttagaagaaaaacttaaggaagaagaacatcagcgtaagctatttcaagacaaagcttctgagcttcaaactggacttgaaatcagtaaaattataatgtcttcagtttcaaatctaaagcactccaaggaaaagaagaaatcttcaaagaaaactaaatgtataaagagacgaccaccttggcaaatttgttcaaagtttggagcactgccttttgtggctgaaaagatgaggcaacatcgtgacccacatatccttcagaaaccttttaacgtgactgagactagatgtctccccaagccttctagaacaacttcctggtgtaaagctattcctcctgactcagaaaagtccatttccatttgtgacaatttatctgaacttttgatggcaatgcaagatgagctggaccaaatgagcatggagcaccaagaactactgaaacaaatgaaggaaactgaaagtcattcagtctgtgacgacatagaatgtgaactagagtgtttactcaagaaaatggaaattaaaggagaacaaatctccaaactgaagaagcatcaagacagtgtaagaaggctttagtaagagattttaataaaaacacaaaatatctggat

SEQ ID NO: 68498 - DNA, 395 bp, Homo sapiens
ttaatcctgctatcaaatctgagctttaaaaattaattagaagacagaatttagtattctgctataatgcaagttggatttttaaataaacacttaatcctgcaaagaaaacacaattcacagaacaagggagctcaattatttcagcctcttttctcatttcctttcagctgcagggggcagcactgctcagctaatggcttttttctttttcttttttcctttcctaacaaaaggaagagtcatttccttctatacaatgttttcatccctgctctccattgtacaatgtgtggctttcttgaggcactgcctctcgagtccctacctcaaacttcacttcaaataggagattttatgttggggaaagaaggattggtaaagaattcttactt

SEQ ID NO: 68499 - DNA, 494 bp, Homo sapiens
gcatgccctctccccactccaaaatgaattccaaaaccaattattcttctcctgataatgatttgtccctttagcatccgggtattagagaaaggatgaggtggtttgaacctatttaagatgaactgcattgttaagagtttacttagacacgggtctatttacagttaagcagtggttctcaaaacatgtccctggaccagcaatgttgtcatcgggtccagggacacattttgcctgggagtatataagaaatgcaaattctcaggactcaccagaccatcataaactaggagtgaggaccagcaattggtcttttaacaagtcctttgttaaggtcattctgatacatgctagactctgagaagaaagattagaaactactgatcttccaagattagaagcttctgagatgagaagtttggtattcttgctgaatttggattcaggtaatctccagtttaaaaacttttttttagttagctaatgtccag

SEQ ID NO: 68500 - DNA, 445 bp, Homo sapiens
tgccttcacctttgaaagtcagtgcacacagtataatctttttattgtctttgaagcccatgtttatgattgatttaaaaaggtggaacaatttattttgaggttctttgggtaacagtgtacccttgtataggaatcaagatagatctaactttcaccagaagtattcatatacccagtagctttatggtgaggtatttgagtgtttttgtctgaataaggaatattagaccaatttagaaatacttttgccggagaggaccctttcagttttagtacttgatgcatatgaaattcatatgtgttttgtacatgaatagatttatttatcacatagttattgagcacctactatttggcaggcactgttctaggtactaaaaattcagcagttaacaaaacagatgtctctcctcagaggacaatatcttggatattatattct

SEQ ID NO: 68501 - DNA, 139 bp, Homo sapiens
agttaacccaagttctgccaatgctgattggcatagtgtgcatatctcagaattattatgacaatttgcactgtttgatagtctcccagggaaggtgtttgttcttccaaacaaaccaacaaacaaacatccaaggcac

SEQ ID NO: 68502 - DNA, 444 bp, Homo sapiens
ctttttaaaaagtttacatcagagaaccccatatatacacagagttgcccaagggggaatatcccattattcagataaacactgcattgaaccactgcattgctgattacaagatctaaaatacattctaagaaatacgttccaggaaaataaatatatctttatataaaataagtcccaaaactcctagccacacacccctcatatatacacactagatttgggggtaaacttttacaaaaagagggatagatttggtggaaggtaggatgattaaagaaagaaaagtctcagggccatgaatgagtggaagttaaggatatcaaggagcagaggaccaaatttgttgttacattatttggtccacactatccaatctgcaacctttgggaacaagtgttagaaatcaatatttcacattttaaagtgaaaatactgcaatag

SEQ ID NO: 68503 - DNA, 176 bp, Homo sapiens
aaacaaggaaactgaggaccaaaggcagaagaggacatgttggagatcagagtcaggatctagggatagaagccagcgagatgaaggggaactcatctcggagttctgacctctgaggtcaggaggctgtgacctcagaggaagcccatctgctctccaggcctgtttcctcatcg

SEQ ID NO: 68504 - DNA, 581 bp, Homo sapiens
  misc_feature (7)..(7): n is a, c, g, or t
gaacctnagaaggaggaaactctggacacatctgaaggaacaaactctggacataacacctataagtgctgtaacactcaccactaatttctgcagcttcattcttgaagagaacaagaccataaacctgccagaaggaagaaactccggacacatctgaatgaacaaactctggacataacaccttttcagtgctgtgagactcaccactaaggtctgcggcttcattcttgaagtgagcaagaccatgaacctgccagaaggaagaatatctggacacatctgaaggaacaacactagacctaacacctttaagtgctgtaacactcaccgtaaaggtctgcagcttcattcttgaagtgagcaagaccatgaacctgccagaaggaagaaactctggacacatctaaatgaacaaactctggacataacacctttaagtgctgtaacactcaccactaaggtctgcagcttcattcttgaagtgagcaagaccatgaatctgccagacggaagaaactccggacacatctgaatgaagaacctctgaacataacacctttcagcgctgtaacactcac

SEQ ID NO: 68505 - DNA, 273 bp, Homo sapiens
agttggttaaaaggttagttcctggggcttacaaatgacatctgcagtgggggcctgttgtgggactgagccctctagcaagaaacttatgggatctgtgttaattctgggtggtataagaattgaactactggacacccagttattgctggagaattggttggtgttcagcgaacggcacacctttgttatcagaagtcagaggcaccacaggtcagagccttaaaccgactgactgttattcagtatatgtttatcatgtatgaatccaga

SEQ ID NO: 68506 - DNA, 6927 bp, Homo sapiens
gatggctgagcgcgcaggagcccgggaggtctgagccgggcgaggctcgctccctgcgcatcgcctcctccgcccgccgcgtggtcgcgggcaggtgggccggggggcgctgggcaggggcggggcagggccagggcaggccggtctgcagccggaggggccggagcggagaagctgcccaccttcccgggctcggagcggccggggctgctcagccggccgggctcgcgatgacctgctgagaagcgtcgtcggaggctgcaggaggcggcctagctgtgggcggtgcagctcgcggcctcctccctcgtcgttcccggccccggccccccacccatccccgtgccccctccctaccgccggccgagatggcggatccagccgaatgcagcatcaaagtgatgtgccggttccggcccctcaacgaagcggagatcctccgcggggacaaattcatccccaaatttaaaggcgatgagaccgtggtgatcgggcaagggaagccatatgtcttcgacagagtgctacctcccaacacgacccaagagcaggtttacaatgcatgtgcgaagcaaattgtcaaagatgtccttgaaggttataacgggacgatttttgcgtatgggcagacttcatcaggaaaaacccacaccatggaggggaagctgcatgacccccagctcatggggatcatcccacgaattgcccatgatatctttgaccatatctactccatggatgagaacctggagtttcacataaaggtttcctattttgagatctacttggacaaaataagggacttacttgatgtatccaagaccaacttggctgttcatgaagataaaaacagagtcccgtatgtaaaggggtgcactgagcggtttgtgtcgagccctgaggaagtcatggatgtaatagatgaaggcaaagcaaaccgacacgtggctgtgacaaacatgaatgaacacagctctagaagtcacagtatcttcctgataaatattaaacaagagaatgtagagactgaaaaaaaactcagtgggaaactttatttggttgatttggctgggagcgaaaaggtcagcaaaactggtgccgagggagctgttcttgacgaagctaaaaatatcaataagtctttgtctgctcttggaaatgtgatctctgctttggcagaagggacaaaaacacatgtgccataccgggacagcaagatgactcggattcttcaggactctttgggtgggaactgcagaaccaccatcgtcatttgctgttctccttctgtcttcaatgaggctgagaccaagtccacactgatgttcggacagagagctaagaccatcaagaatacagtctctgtgaacctagaactgacagcagaagaatggaagaagaaatatgaaaaagagaaagagaaaaacaagactttgaagaatgttatccagcatctggagatggagctaaacaggtggaggaatggagaagctgtgcctgaggatgaacagatcagtgccaaggaccagaagaacctggagccttgtgataacacccccatcatagacaatattgctcctgttgttgctggcatctctacagaggagaaagagaagtacgatgaggagatctccagtctctacagacaactggatgacaaggatgatgaaattaaccagcagagccagctggctgaaaagctgaagcaacagatgttggatcaggatgagcttttagcttccacaagaagagactatgagaagatacaggaggagctgacacgtctccagattgaaaatgaggcagccaaggatgaggtgaaagaagttctccaggccctggaggagctggctgtcaattatgaccagaaatcacaggaagtggaggataagacccgggccaatgagcagctgacagacgagctggcccagaaaacgactacattgacaaccacacagagagagctgagccagctacaagagcttagcaaccaccagaagaaaagggcaactgagatcctgaatttgctgttgaaagatctgggggagataggtggaattattggcaccaatgatgtgaaaactttggcagatgtgaatggagtcattgaggaggagtttaccatggcccgcctgtacatcagcaagatgaagtcagaggtcaagtccctggtgaaccgcagcaaacagctcgagagcgcccagatggactccaacaggaagatgaatgccagcgagcgggagctggcagcctgccagctgctcatctcccagcacgaagccaagatcaagtctctgacagactacatgcagaacatggaacagaagaggaggcagctagaagagtcccaggactcgctcagcgaagagctggcaaagctccgagcccaggaaaaaatgcacgaagtcagcttccaggataaggagaaggaacatctgacgcggttgcaggatgctgaagaaatgaagaaggcgctggagcagcagatggagagccaccgggaagctcaccagaagcagctgtccagactccgagacgaaattgaggagaagcagaaaatcattgatgagattcgggatttgaatcagaaactgcaactggaacaggagaagcttagttctgattataacaagctgaaaatagaggaccaagagagagaaatgaagctggaaaagctcttattgctcaacgataaaagggaacaagccagagaagacctcaaagggctggaggagacagtgtctagagaattgcagacactgcacaaccttcggaaactctttgtccaggatctgaccacccgagttaaaaaaagtgtggagttggacaacgatgatggagggggcagtgctgcccagaagcagaaaatttccttcttggagaataacctggagcagctcaccaaagttcacaagcagctggtccgggacaacgcagacctgcgctgtgaactgcccaagctggagaagcggctgcgtgccacggcggagcgcgtcaaggctctggagagcgcgctgaaggaggccaaggagaacgccatgcgggaccgtaagcgctaccagcaggaggtggatcgtatcaaggaggccgtgcgggccaagaacatggccagaagggcccattcagcccagatcgccaagcccatccgccccggacactacccggcctcatctccaacggccgtccatgccattcgagggggaggaggcagctcttcaaattccactcactaccagaaataaatacaaaatatgactccacgtagcatgtcaaggactacattaatcaccaattcctttatttttccccccctacagtttccattttttttttatacttgcttactccagccatctgcagtacaccagtttcaggtcttttgagctgtgtagagtttctgtgtgtacagatgtgtgctcggacttttctctttttgagaaatctgaaggagatggttgcagaagatccacttactactgagaaccattaccaccgactcggcctccggggtgttgggtggtttctgggtggttcctggagcctcctctgggcagtgcactgtcccatctgtacgccctaatgtgccattccctagaggggaacaaccaagtgccgtggaggcagatgatcatggtctgcctcaactgtctggtttcctgtaaaataaacacattgttttatatttttagggaacaaaaagtgctgctatagggttcaaagttttccttctgaacacttttccgaaacaaattaccccaaagacacattttgaatatcctggtcacatctttggatctgtaaaatataccttttagtatggcacctgttaaaatgcaaagcaaatttctttggggcagaaaaacaatctgacagtagcagtgtagaatttgttcattcaaatacatctgtgtaaatgcaaaaagtcataaaattcacctccgagctgcttgcttttgaacctgcagcaactagtcttagccggcccggtttgaacatcgttctttcagaagtgctgaaaatgctgcaaagttggataagtggaaatgtggctgcccctctcctcactacttcctctctgatcgttctgaagcttgcattgggaatggctgctttctctaaccattttcagcttgagtgggtattgctgaagaaatccaacatcattccagcagttgaaaaaggaagccttcgggagaaagtgcttgtcaaaattttgttctttgtgcttgtgtatgagtaagttgccatgaataagttattattttaacccataattggcgactgtttatatgaattctttctttggcaccaaataggtttcatcttcttaggcacaattagaaaaaatccacatagatggatattttacatttagttattgctttatccaaatacatgaatctaaagctgaatcaacccttacttccagttgtgcttattaagaagatcaatttccaagtagtaaagttttcagggaaactgactgtgctgctatttgttttgacaaatttgggggtaagtcaatgacaaccaaaccaatctcggtggaaactcctatcctatcatgttgtgtgcccaagatgagtgagctggcactgtgccctgaagctttcaccactgtaatgaaatatatgccaggggagactttgggcttttctcatgactgtgtgggtcgaaggtagctcaagtgtgtgtgtgtgtgtgtgtgtgtgtgtgtgtgtgtgtgtgtatgtgtgtaaagtgctaagaactgtgcattgacatccaaacatttcttgtacaaaatttccctagcaaagcaaacctgctttgacttaatttatttgttaaatgttgcactttgtttatgtatgttttgtttttggtggggaataaggagagagaggacgacaaattctattgaagtatttattttgtgaagatggcaattttgcatttgtttaaatttttttcattctttaattttgttatcagtgccagcccaatatacctgctctaccattatttgcggtctgataaaagggtccttgtggggcaggttttgcaaagcttatcaggtaataacatatgccacataaccttgttgatatgtttgcttctgatttgggaagctaaacattggtgtttgagaggattgccaattattaattgtcattaccactactctccattactttttgtttggaaattgaacaaaggtcagtaatggtttttggctcttgttaatatccatcataaaatagattgttttagattctttccagggtgatttttccctgggtaccccgtttctacttctaaagaattgcttggcactttcatgtttcaaagggaaacattcgcttgtagttccattttacttgatctctacaagggactgacaacatttgctttacttttattcacagagaaagttggctttgatgtctcttaaagataattctgctagttgctgatcagccagtcagttcacctagcttcaatctttataggacttctaatctaattttcctatagtgtgactaaaagggaggcaaattattggaacggattattcaaatggatccttaaatattgctatgtataataagccagttattatatcaggaccatgttctctgtaggccactttctaaaaaagccacatatgtgcaattttcaggtttttagactattgctccctgtactttaaatgtaaaaaccacacttctgaacaactaagctcatgaatatgattttggttatatgcagcttttgactagcatgtattgtgtctttttctcctctatgaataattttatatttcatgctacttcttgaaagtttactctttgatgctctaagagaacagccagatggtttatatgaataatctttatctgcaggatggtggattggtaaattaggagaatgttgtttgagatatcaagatttatgtctgggaactaaaatatataatgccaaatgtgtttttgtcaattactagagaattctgtgcaaacatatcatctcttcaaatgctgcacactttgcttttgttaaacagcaggtagtagacagaacaataacagtttcgcgttaagacttttaaaggaaatagaatcgtgattaagaaatcagaatttatagatatattgggataaatgaagaaataaaaatgtttgtctagaatgtagcatctagtgactttttaaagccctaacgtttacataaagaagctctagttcttatagaaataacaaagcaaataaaagttcttaacaatcccctctttcgaagtgcatttttttaaagcagggcaggagacatttggactctagctatatgacatactgggaaaggcagagggtggagggaagatttcacttcattgtctagcccagaatcttgagcaagctaaagaaaccatcataatctaaaattgcttcatttaacactaacaatttagactttttaaaccaagcattgaataatggctggataactgccgaagtaagcgccgctccatgaagtctgcttacttatttaaaaattgtgtatcagttttaaatactgttcattgtgtgcagatataaggggaatagggcattctgtagaattatacatgtctagtttgtaaagtgtgtcctgtgtactgcagatgtgtgttctctgggctttatgtatctgtacagtagctttcacattaaaaaaattgtggacaaacttgtccggggggtttgaggggagaatggtggtttatatcaataacgatgctgtactatagtccatgtaacaaaagatctggaagtcaccctcctctggcccacggaaaattttggtaatcttctaggttctaaaatgaagatgtatgggtactctggcagactgcatgttgtataatttgaaaaatactaaaagtggaaaataaaattgaattaaactttg

SEQ ID NO: 68507 - DNA, 6870 bp, Homo sapiens
gatggctgagcgcgcaggagcccgggaggtctgagccgggcgaggctcgctccctgcgcatcgcctcctccgcccgccgcgtggtcgcgggcaggtgggccggggggcgctgggcaggggcggggcagggccagggcaggccggtctgcagccggaggggccggagcggagaagctgcccaccttcccgggctcggagcggccggggctgctcagccggccgggctcgcgatgacctgctgagaagcgtcgtcggaggctgcaggaggcggcctagctgtgggcggtgcagctcgcggcctcctccctcgtcgttcccggccccggccccccacccatccccgtgccccctccctaccgccggccgagatggcggatccagccgaatgcagcatcaaagtgatgtgccggttccggcccctcaacgaagcggagatcctccgcggggacaaattcatccccaaatttaaaggcgatgagaccgtggtgatcgggcaagggaagccatatgtcttcgacagagtgctacctcccaacacgacccaagagcaggtttacaatgcatgtgcgaagcaaattgtcaaagatgtccttgaaggttataacgggacgatttttgcgtatgggcagacttcatcaggaaaaacccacaccatggaggggaagctgcatgacccccagctcatggggatcatcccacgaattgcccatgatatctttgaccatatctactccatggatgagaacctggagtttcacataaaggtttcctattttgagatctacttggacaaaataagggacttacttgatgtatccaagaccaacttggctgttcatgaagataaaaacagagtcccgtatgtaaaggggtgcactgagcggtttgtgtcgagccctgaggaagtcatggatgtaatagatgaaggcaaagcaaaccgacacgtggctgtgacaaacatgaatgaacacagctctagaagtcacagtatcttcctgataaatattaaacaagagaatgtagagactgaaaaaaaactcagtgggaaactttatttggttgatttggctgggagcgaaaaggtcagcaaaactggtgccgagggagctgttcttgacgaagctaaaaatatcaataagtctttgtctgctcttggaaatgtgatctctgctttggcagaagggacaaaaacacatgtgccataccgggacagcaagatgactcggattcttcaggactctttgggtgggaactgcagaaccaccatcgtcatttgctgttctccttctgtcttcaatgaggctgagaccaagtccacactgatgttcggacagagagctaagaccatcaagaatacagtctctgtgaacctagaactgacagcagaagaatggaagaagaaatatgaaaaagagaaagagaaaaacaagactttgaagaatgttatccagcatctggagatggagctaaacaggtggaggaatggagaagctgtgcctgaggatgaacagatcagtgccaaggaccagaagaacctggagccttgtgataacacccccatcatagacaatattgctcctgttgttgctggcatctctacagaggagaaagagaagtacgatgaggagatctccagtctctacagacaactggatgacaaggatgatgaaattaaccagcagagccagctggctgaaaagctgaagcaacagatgttggatcaggatgagcttttagcttccacaagaagagactatgagaagatacaggaggagctgacacgtctccagattgaaaatgaggcagccaaggatgaggtgaaagaagttctccaggccctggaggagctggctgtcaattatgaccagaaatcacaggaagtggaggataagacccgggccaatgagcagctgacagacgagctggcccagaaaacgactacattgacaaccacacagagagagctgagccagctacaagagcttagcaaccaccagaagaaaagggcaactgagatcctgaatttgctgttgaaagatctgggggagataggtggaattattggcaccaatgatgtgaaaactttggcagatgtgaatggagtcattgaggaggagtttaccatggcccgcctgtacatcagcaagatgaagtcagaggtcaagtccctggtgaaccgcagcaaacagctcgagagcgcccagatggactccaacaggaagatgaatgccagcgagcgggagctggcagcctgccagctgctcatctcccagcacgaagccaagatcaagtctctgacagactacatgcagaacatggaacagaagaggaggcagctagaagagtcccaggactcgctcagcgaagagctggcaaagctccgagcccaggaaaaaatgcacgaagtcagcttccaggataaggagaaggaacatctgacgcggttgcaggatgctgaagaaatgaagaaggcgctggagcagcagatggagagccaccgggaagctcaccagaagcagctgtccagactccgagacgaaattgaggagaagcagaaaatcattgatgagattcgggatttgaatcagaaactgcaactggaacaggagaagcttagttctgattataacaagctgaaaatagaggaccaagagagagaaatgaagctggaaaagctcttattgctcaacgataaaagggaacaagccagagaagacctcaaagggctggaggagacagtgtctagagaattgcagacactgcacaaccttcggaaactctttgtccaggatctgaccacccgagttaaaaaaagtgtggagttggacaacgatgatggagggggcagtgctgcccagaagcagaaaatttccttcttggagaataacctggagcagctcaccaaagttcacaagcagctggtccgggacaacgcagacctgcgctgtgaactgcccaagctggagaagcggctgcgtgccacggcggagcgcgtcaaggctctggagagcgcgctgaaggaggccaaggagaacgccatgcgggaccgtaagcgctaccagcaggaggtggatcgtatcaaggaggccgtgcgggccaagaacatggccagaagggcccattcagcccagatcgccaagcccatccgccccggacactacccggcctcatctccaacggccgtccatgccattcgagggggaggaggcagctcttcaaattccactcactaccagaaataaatacaaaatatgactccacgtagcatgtcaaggactacattaatcaccaattcctttatttttccccccctacagtttccattttttttttatacttgcttactccagccatctgcagtacaccagtttcaggtcttttgagctgtgtagagtttctgtgtgtacagatgtgtgctcggacttttctctttttgagaaatctgaaggagatggttgcagaagatccacttactactgagaaccattaccaccgactcggcctccggggtgttgggtggtttctgggtggttcctggagcctcctctgggcagtgcactgtcccatctgtacgccctaatgtgccattccctagaggggaacaaccaagtgccgtggaggcagatgatcatggtctgcctcaactgtctggtttcctgtaaaataaacacattgttttatatttttagggaacaaaaagtgctgctatagggttcaaagttttccttctgaacacttttccgaaacaaattaccccaaagacacattttgaatatcctggtcacatctttggatctgtaaaatataccttttagtatggcacctgttaaaatgcaaagcaaatttctttggggcagaaaaacaatctgacagtagcagtgtagaatttgttcattcaaatacatctgtgtaaatgcaaaaagtcataaaattcacctccgagctgcttgcttttgaacctgcagcaactagtcttagccggcccggtttgaacatcgttctttcagaagtgctgaaaatgctgcaaagttggataagtggaaatgtggctgcccctctcctcactacttcctctctgatcgttctgaagcttgcattgggaatggctgctttctctaaccattttcagcttgagtgggtattgctgaagaaatccaacatcattccagcagttgaaaaaggaagccttcgggagaaagtgcttgtcaaaattttgttctttgtgcttgtgtatgagtaagttgccatgaataagttattattttaacccataattggcgactgtttatatgaattctttctttggcaccaaataggtttcatcttcttaggcacaattagaaaaaatccacatagatggatattttacatttagttattgctttatccaaatacatgaatctaaagctgaatcaacccttacttccagttgtgcttattaagaagatcaatttccaagtagtaaagttttcagggaaactgactgtgctgctatttgttttgacaaatttgggggtaagtcaatgacaaccaaaccaatctcggtggaaactcctatcctatcatgttgtgtgcccaagatgagtgagctggcactgtgccctgaagctttcaccactgtaatgaaatatatgccaggggagactttgggcttttctcatgactgtgtgggtcgaaggtagctcaagtgtgtgtgtgtgtgtgtgtgtgtgtgtgtgtgtgtgtgtgtatgtgtgtaaagtgctaagaactgtgcattgacatccaaacatttcttgtacaaaatttccctagcaaagcaaacctgctttgacttaatttatttgttaaatgttgcactttgtttatgtatgttttgtttttggtggggaataaggagagagaggacgacaaattctattgaagtatttattttgtgaagatggcaattttgcatttgtttaaatttttttcattctttaattttgttatcagtgccagcccaatatacctgctctaccattatttgcggtctgataaaagggtccttgtggggcaggttttgcaaagcttatcaggtaataacatatgccacataaccttgttgatatgtttgcttctgatttgggaagctaaacattggtgtttgagaggattgccaattattaattgtcattaccactactctccattactttttgtttggaaattgaacaaaggtcagtaatggtttttggctcttgttaatatccatcataaaatagattgttttagattctttccagggtgatttttccctgggtaccccgtttctacttctaaagaattgcttggcactttcatgtttcaaagggaaacattcgcttgtagttccattttacttgatctctacaagggactgacaacatttgctttacttttattcacagagaaagttggctttgatgtctcttaaagataattctgctagttgctgatcagccagtcagttcacctagcttcaatctttataggacttctaatctaattttcctatagtgtgactaaaagggaggcaaattattggaacggattattcaaatggatccttaaatattgctatgtataataagccagttattatatcaggaccatgttctctgtaggccactttctaatgtaaaaaccacacttctgaacaactaagctcatgaatatgattttggttatatgcagcttttgactagcatgtattgtgtctttttctcctctatgaataattttatatttcatgctacttcttgaaagtttactctttgatgctctaagagaacagccagatggtttatatgaataatctttatctgcaggatggtggattggtaaattaggagaatgttgtttgagatatcaagatttatgtctgggaactaaaatatataatgccaaatgtgtttttgtcaattactagagaattctgtgcaaacatatcatctcttcaaatgctgcacactttgcttttgttaaacagcaggtagtagacagaacaataacagtttcgcgttaagacttttaaaggaaatagaatcgtgattaagaaatcagaatttatagatatattgggataaatgaagaaataaaaatgtttgtctagaatgtagcatctagtgactttttaaagccctaacgtttacataaagaagctctagttcttatagaaataacaaagcaaataaaagttcttaacaatcccctctttcgaagtgcatttttttaaagcagggcaggagacatttggactctagctatatgacatactgggaaaggcagagggtggagggaagatttcacttcattgtctagcccagaatcttgagcaagctaaagaaaccatcataatctaaaattgcttcatttaacactaacaatttagactttttaaaccaagcattgaataatggctggataactgccgaagtaagcgccgctccatgaagtctgcttacttatttaaaaattgtgtatcagttttaaatactgttcattgtgtgcagatataaggggaatagggcattctgtagaattatacatgtctagtttgtaaagtgtgtcctgtgtactgcagatgtgtgttctctgggctttatgtatctgtacagtagctttcacattaaaaaaattgtggacaaacttgtccggggggtttgaggggagaatggtggtttatatcaataacgatgctgtactatagtccatgtaacaaaagatctggaagtcaccctcctctggcccacggaaaattttggtaatcttctaggttctaaaatgaagatgtatgggtactctggcagactgcatgttgtataatttgaaaaatactaaaagtggaaaataaaattgaattaaactttg

SEQ ID NO: 68508 - DNA, 6869 bp, Homo sapiens
gatggctgagcgcgcaggagcccgggaggtctgagccgggcgaggctcgctccctgcgcatcgcctcctccgcccgccgcgtggtcgcgggcaggtgggccggggggcgctgggcaggggcggggcagggccagggcaggccggtctgcagccggaggggccggagcggagaagctgcccaccttcccgggctcggagcggccggggctgctcagccggccgggctcgcgatgacctgctgagaagcgtcgtcggaggctgcaggaggcggcctagctgtgggcggtgcagctcgcggcctcctccctcgtcgttcccggccccggccccccacccatccccgtgccccctccctaccgccggccgagatggcggatccagccgaatgcagcatcaaagtgatgtgccggttccggcccctcaacgaagcggagatcctccgcggggacaaattcatccccaaatttaaaggcgatgagaccgtggtgatcgggcaagggaagccatatgtcttcgacagagtgctacctcccaacacgacccaagagcaggtttacaatgcatgtgcgaagcaaattgtcaaagatgtccttgaaggttataacgggacgatttttgcgtatgggcagacttcatcaggaaaaacccacaccatggaggggaagctgcatgacccccagctcatggggatcatcccacgaattgcccatgatatctttgaccatatctactccatggatgagaacctggagtttcacataaaggtttcctattttgagatctacttggacaaaataagggacttacttgatgtatccaagaccaacttggctgttcatgaagataaaaacagagtcccgtatgtaaaggggtgcactgagcggtttgtgtcgagccctgaggaagtcatggatgtaatagatgaaggcaaagcaaaccgacacgtggctgtgacaaacatgaatgaacacagctctagaagtcacagtatcttcctgataaatattaaacaagagaatgtagagactgaaaaaaaactcagtgggaaactttatttggttgatttggctgggagcgaaaaggtcagcaaaactggtgccgagggagctgttcttgacgaagctaaaaatatcaataagtctttgtctgctcttggaaatgtgatctctgctttggcagaagggacaaaaacacatgtgccataccgggacagcaagatgactcggattcttcaggactctttgggtgggaactgcagaaccaccatcgtcatttgctgttctccttctgtcttcaatgaggctgagaccaagtccacactgatgttcggacagagagctaagaccatcaagaatacagtctctgtgaacctagaactgacagcagaagaatggaagaagaaatatgaaaaagagaaagagaaaaacaagactttgaagaatgttatccagcatctggagatggagctaaacaggtggaggaatggagaagctgtgcctgaggatgaacagatcagtgccaaggaccagaagaacctggagccttgtgataacacccccatcatagacaatattgctcctgttgttgctggcatctctacagaggagaaagagaagtacgatgaggagatctccagtctctacagacaactggatgacaaggatgatgaaattaaccagcagagccagctggctgaaaagctgaagcaacagatgttggatcaggatgagcttttagcttccacaagaagagactatgagaagatacaggaggagctgacacgtctccagattgaaaatgaggcagccaaggatgaggtgaaagaagttctccaggccctggaggagctggctgtcaattatgaccagaaatcacaggaagtggaggataagacccgggccaatgagcagctgacagacgagctggcccagaaaacgactacattgacaaccacacagagagagctgagccagctacaagagcttagcaaccaccagaagaaaagggcaactgagatcctgaatttgctgttgaaagatctgggggagataggtggaattattggcaccaatgatgtgaaaactttggcagatgtgaatggagtcattgaggaggagtttaccatggcccgcctgtacatcagcaagatgaagtcagaggtcaagtccctggtgaaccgcagcaaacagctcgagagcgcccagatggactccaacaggaagatgaatgccagcgagcgggagctggcagcctgccagctgctcatctcccagcacgaagccaagatcaagtctctgacagactacatgcagaacatggaacagaagaggaggcagctagaagagtcccaggactcgctcagcgaagagctggcaaagctccgagcccaggaaaaaatgcacgaagtcagcttccaggataaggagaaggaacatctgacgcggttgcaggatgctgaagaaatgaagaaggcgctggagcagcagatggagagccaccgggaagctcaccagaagcagctgtccagactccgagacgaaattgaggagaagcagaaaatcattgatgagattcgggatttgaatcagaaactgcaactggaacaggagaagcttagttctgattataacaagctgaaaatagaggaccaagagagagaaatgaagctggaaaagctcttattgctcaacgataaaagggaacaagccagagaagacctcaaagggctggaggagacagtgtctagagaattgcagacactgcacaaccttcggaaactctttgtccaggatctgaccacccgagttaaaaaaagtgtggagttggacaacgatgatggagggggcagtgctgcccagaagcagaaaatttccttcttggagaataacctggagcagctcaccaaagttcacaagcagctggtccgggacaacgcagacctgcgctgtgaactgcccaagctggagaagcggctgcgtgccacggcggagcgcgtcaaggctctggagagcgcgctgaaggaggccaaggagaacgccatgcgggaccgtaagcgctaccagcaggaggtggatcgtatcaaggaggccgtgcgggccaagaacatggccagaagggcccattcagcccagatcgccaagcccatccgccccggacactacccggcctcatctccaacggccgtccatgccattcgagggggaggaggcagctcttcaaattccactcactaccagaaataaatacaaaatatgactccacgtagcatgtcaaggactacattaatcaccaattcctttatttttccccccctacagtttccattttttttttatacttgcttactccagccatctgcagtacaccagtttcaggtcttttgagctgtgtagagtttctgtgtgtacagatgtgtgctcggacttttctctttttgagaaatctgaaggagatggttgcagaagatccacttactactgagaaccattaccaccgactcggcctccggggtgttgggtggtttctgggtggttcctggagcctcctctgggcagtgcactgtcccatctgtacgccctaatgtgccattccctagaggggaacaaccaagtgccgtggaggcagatgatcatggtctgcctcaactgtctggtttcctgtaaaataaacacattgttttatatttttagggaacaaaaagtgctgctatagggttcaaagttttccttctgaacacttttccgaaacaaattaccccaaagacacattttgaatatcctggtcacatctttggatctgtaaaatataccttttagtatggcacctgttaaaatgcaaagcaaatttctttggggcagaaaaacaatctgacagtagcagtgtagaatttgttcattcaaatacatctgtgtaaatgcaaaaagtcataaaattcacctccgagctgcttgcttttgaacctgcagcaactagtcttagccggcccggtttgaacatcgttctttcagaagtgctgaaaatgctgcaaagttggataagtggaaatgtggctgcccctctcctcactacttcctctctgatcgttctgaagcttgcattgggaatggctgctttctctaaccattttcagcttgagtgggtattgctgaagaaatccaacatcattccagcagttgaaaaaggaagccttcgggagaaagtgcttgtcaaaattttgttctttgtgcttgtgtatgagtaagttgccatgaataagttattattttaacccataattggcgactgtttatatgaattctttctttggcaccaaataggtttcatcttcttaggcacaattagaaaaaatccacatagatggatattttacatttagttattgctttatccaaatacatgaatctaaagctgaatcaacccttacttccagttgtgcttattaagaagatcaatttccaagtagtaaagttttcagggaaactgactgtgctgctatttgttttgacaaatttgggggtaagtcaatgacaaccaaaccaatctcggtggaaactcctatcctatcatgttgtgtgcccaagatgagtgagctggcactgtgccctgaagctttcaccactgtaatgaaatatatgccaggggagactttgggcttttctcatgactgtgtgggtcgaaggtagctcaagtgtgtgtgtgtgtgtgtgtgtgtgtgtgtgtgtgtgtgtgtatgtgtgtaaagtgctaagaactgtgcattgacatccaaacatttcttgtacaaaatttccctagcaaagcaaacctgctttgacttaatttatttgttaaatgttgcactttgtttatgtatgttttgtttttggtggggaataaggagagagaggacgacaaattctattgaagtatttattttgtgaagatggcaattttgcatttgtttaaatttttttcattctttaattttgttatcagtgccagcccaatatacctgctctaccattatttgcggtctgataaaagggtccttgtggggcaggttttgcaaagcttatcaggtaataacatatgccacataaccttgttgatatgtttgcttctgatttgggaagctaaacattggtgtttgagaggattgccaattattaattgtcattaccactactctccattactttttgtttggaaattgaacaaaggtcagtaatggtttttggctcttgttaatatccatcataaaatagattgttttagattctttccagggtgatttttccctgggtaccccgtttctacttctaaagaattgcttggcactttcatgtttcaaagggaaacattcgcttgtagttccattttacttgatctctacaagggactgacaacatttgctttacttttattcacagagaaagttggctttgatgtctcttaaagataattctgctagttgctgatcagccagtcagttcacctagcttcaatctttataggacttctaatctaattttcctatagtgtgactaaaagggaggcaaattattggaacggattattcaaatggatccttaaatattgctatgtataataagccagttattatatcaggaccatgttctctgtaggccactttctaaaaaagccacatatgtgcaattttcaggtttttagactattgctccctgtactttaaacttttgactagcatgtattgtgtctttttctcctctatgaataattttatatttcatgctacttcttgaaagtttactctttgatgctctaagagaacagccagatggtttatatgaataatctttatctgcaggatggtggattggtaaattaggagaatgttgtttgagatatcaagatttatgtctgggaactaaaatatataatgccaaatgtgtttttgtcaattactagagaattctgtgcaaacatatcatctcttcaaatgctgcacactttgcttttgttaaacagcaggtagtagacagaacaataacagtttcgcgttaagacttttaaaggaaatagaatcgtgattaagaaatcagaatttatagatatattgggataaatgaagaaataaaaatgtttgtctagaatgtagcatctagtgactttttaaagccctaacgtttacataaagaagctctagttcttatagaaataacaaagcaaataaaagttcttaacaatcccctctttcgaagtgcatttttttaaagcagggcaggagacatttggactctagctatatgacatactgggaaaggcagagggtggagggaagatttcacttcattgtctagcccagaatcttgagcaagctaaagaaaccatcataatctaaaattgcttcatttaacactaacaatttagactttttaaaccaagcattgaataatggctggataactgccgaagtaagcgccgctccatgaagtctgcttacttatttaaaaattgtgtatcagttttaaatactgttcattgtgtgcagatataaggggaatagggcattctgtagaattatacatgtctagtttgtaaagtgtgtcctgtgtactgcagatgtgtgttctctgggctttatgtatctgtacagtagctttcacattaaaaaaattgtggacaaacttgtccggggggtttgaggggagaatggtggtttatatcaataacgatgctgtactatagtccatgtaacaaaagatctggaagtcaccctcctctggcccacggaaaattttggtaatcttctaggttctaaaatgaagatgtatgggtactctggcagactgcatgttgtataatttgaaaaatactaaaagtggaaaataaaattgaattaaactttg

SEQ ID NO: 68509 - DNA, 425 bp, Homo sapiens
ccaaacgggaaagagagtggcagaaaaactttgaggaaagtcgagatggtcgtgtggacagctggcgaaacttccaagccaatacgaaggggaagaaagagaagaaaaatcggaccttcctgagaccaccgaaagtaaaaatggagcaacgtgagtgaccgcccaaggtcacaggcacagaacctttcccctgctatctcccttcctgcttcgaaggactcattctttcctcccacttccaccccaacatagagtagtatttgctttttagtccattttgttttcaatacgatttaatatcgatcagagtaattcttttgtacattgaaatgaggggcttggtttaaaaaaagacctttccctctccctgcccctaggaacaaccagtattaggaagggtggccaccattggtgctgccttctct

SEQ ID NO: 68510 - DNA, 459 bp, Homo sapiens
cctaacaaactgaatctcgaggaatcatcgtcacaatcgaacagaaagctgtcaaacaatcgcacatggaccgtcgttatcgtcgttcgctactagaaccatcccgtgcgagccaatacgaaggggaagaaagagaagaaaaatcggaccttcctgagaccaccgaaagtaaaaatggagcaacgtgagtgaccgcccaaggtcacaggcacagaacctttcccctgctatctcccttcctgcttcgaaggactcattctttcctcccacttccaccccaacatagagtagtatttgctttttagtccattttgttttcaatacgatttaatatcgatcagagtaattcttttgtacattgaaatgaggggcttggtttaaaaaaagacctttccctctccctgcccctaggaacaaccagtattaggaagggtggccaccattggtgctgccttctct

SEQ ID NO: 68511 - DNA, 2308 bp, Homo sapiens
agaggtaagagagggcggggggaaggaagaggaggcgggatccgggcgctgcgttggctgcggcctggcaccaaaggggcggccccggcggagagcggacccagtggcctcggcgattatggacccggccgaggcggtgctgcaagagaaggcactcaagtttatgtgctctatgcccaggtctctgtggctgggctgctccagcctggcggacagcatgccttcgctgcgatgcctgtataacccagggactggcgcactcacagctttccagaattcctcagagagagaagactgtaataatggcgaaccccctaggaagataataccagagaagaattcacttagacagacatacaacagctgtgccagactctgcttaaaccaagaaacagtatgtttagcaagcactgctatgaagactgagaattgtgtggccaaaacaaaacttgccaatggcacttccagtatgattgtgcccaagcaacggaaactctcagcaagctatgaaaaggaaaaggaactgtgtgtcaaatactttgagcagtggtcagagtcagatcaagtggaatttgtggaacatcttatatcccaaatgtgtcattaccaacatgggcacataaactcgtatcttaaacctatgttgcagagagatttcataactgctctgccagctcggggattggatcatattgctgagaacattctgtcatacctggatgccaaatcactatgtgctgctgaacttgtgtgcaaggaatggtaccgagtgacctctgatggcatgctgtggaagaagcttatcgagagaatggtcaggacagattctctgtggagaggcctggcagaacgaagaggatggggacagtatttattcaaaaacaaacctcctgacgggaatgctcctcccaactctttttatagagcactttatcctaaaattatacaagacattgagacaatagaatctaattggagatgtggaagacatagtttacagagaattcactgccgaagtgaaacaagcaaaggagtttactgtttacagtatgatgatcagaaaatagtaagcggccttcgagacaacacaatcaagatctgggataaaaacacattggaatgcaagcgaattctcacaggccatacaggttcagtcctctgtctccagtatgatgagagagtgatcataacaggatcatcggattccacggtcagagtgtgggatgtaaatacaggtgaaatgctaaacacgttgattcaccattgtgaagcagttctgcacttgcgtttcaataatggcatgatggtgacctgctccaaagatcgttccattgctgtatgggatatggcctccccaactgacattaccctccggagggtgctggtcggacaccgagctgctgtcaatgttgtagactttgatgacaagtacattgtttctgcatctggggatagaactataaaggtatggaacacaagtacttgtgaatttgtaaggaccttaaatggacacaaacgaggcattgcctgtttgcagtacagggacaggctggtagtgagtggctcatctgacaacactatcagattatgggacatagaatgtggtgcatgtttacgagtgttagaaggccatgaggaattggtgcgttgtattcgatttgataacaagaggatagtcagtggggcctatgatggaaaaattaaagtgtgggatcttgtggctgctttggacccccgtgctcctgcagggacactctgtctacggacccttgtggagcattccggaagagtttttcgactacagtttgatgaattccagattgtcagtagttcacatgatgacacaatcctcatctgggacttcctaaatgatccagctgcccaagctgaacccccccgttccccttctcgaacatacacctacatctccagataaataaccatacactgacctcatacttgcccaggacccattaaagttgcggtatttaacgtatctgccaataccaggatgagcaacaacagtaacaatcaaactactgcccagtttccctggactagccgaggagcagggctttgagactcctgttgggacacagttggtctgcagtcggcccaggacggtctactcagcacaactgactgcttcagtgctgctatcagaagatgtcttctatcaattgtgaatgattggaacttttaaacctcccctcctctcctcctttcacctctgcacctagttttttcccattggttccagacaaaggtgacttataaatatatttagtgttttgccagaaaaaaaaaa

SEQ ID NO: 68512 - DNA, 1512 bp, Homo sapiens
  misc_feature (1428)..(1429): n is a, c, g, or t
  misc_feature (1439)..(1439): n is a, c, g, or t
  misc_feature (1441)..(1441): n is a, c, g, or t
agaggtaagagagggcggggggaaggaagaggaggcgggatccgggcgctgcgttggctgcggcctggcaccaaaggggcggccccggcggagagcggacccagtggcctcggcgattatggacccggccgaggcggtgctgcaagagaaggcactcaagtttatgtgctctatgcccaggtctctgtggctgggctgctccagcctggcggacagcatgccttcgctgcgatgcctgtataacccagggactggcgcactcacagctttccagaattcctcagagagagaagactgtaataatggcgaaccccctaggaagataataccagagaagaattcacttagacagacatacaacagctgtgccagactctgcttaaaccaagaaacagtatgtttagcaagcactgctatgaagactgagaattgtgtggccaaaacaaaacttgccaatggcacttccagtatgattgtgcccaagcaacggaaactctcagcaagctatgaaaaggaaaaggaactgtgtgtcaaatactttgagcagtggtcagagtcagatcaagtggaatttgtggaacatcttatatcccaaatgtgtcattaccaacatgggcacataaactcgtatcttaaacctatgttgcagagagatttcataactgctctgccagctcggggattggatcatattgctgagaacattctgtcatacctggatgccaaatcactatgtgctgctgaacttgtgtgcaaggaatggtaccgagtgacctctgatggcatgctgtggaagaagcttatcgagagaatggtcaggacagattctctgtggagaggcctggcagaacgaagaggatggggacagtatttattcaaaaacaaacctcctgacgggaatgctcctcccaactctttttatagagcactttatcctaaaattatacaagacattgagacaatagaatctaattggagatgtggaagacatagtttacagagaattcactgccgaagtgaaacaagcaaaggagtttactgtttacagtatgatgatcagaaaatagtaagcggccttcgagacaacacaatcaagatctgggataaaaacacattggaatgcaagcgaattctcacaggccatacaggttcagtcctctgtctccagtatgatgagagagtgatcataacaggatcatcggattccacggtcagagtgtgggatgtaaatacaggtgaaatgctaaacacgttgattcaccattgtgaagcagttctgcacttgcgtttcaataatggcatgatggtgacctgctccaaagatcgttccattgctgtatgggatatggcctccccaactgacattaccctccggagggtgctggtcggacaccgagctgctgtcaatgttgtagactttggtgccgnncttggtcggntnggggttgaacttttgtttggacccagttcttggtgattgggggccttatggccaagggctgcggtgcgcag

SEQ ID NO: 68513 - DNA, 1400 bp, Homo sapiens
  misc_feature (1316)..(1317): n is a, c, g, or t
  misc_feature (1327)..(1327): n is a, c, g, or t
  misc_feature (1329)..(1329): n is a, c, g, or t
acctgctttaggtgatcctggattattgagccatgaagatgttggtggtgggatgtcaggagcagacaatgtcaatgactcatggtcaagtagcatgtacagtgtggatacactggaccaagggataattcacatcctgggcaggacagagctaccagaaagaattcctcagagagagaagactgtaataatggcgaaccccctaggaagataataccagagaagaattcacttagacagacatacaacagctgtgccagactctgcttaaaccaagaaacagtatgtttagcaagcactgctatgaagactgagaattgtgtggccaaaacaaaacttgccaatggcacttccagtatgattgtgcccaagcaacggaaactctcagcaagctatgaaaaggaaaaggaactgtgtgtcaaatactttgagcagtggtcagagtcagatcaagtggaatttgtggaacatcttatatcccaaatgtgtcattaccaacatgggcacataaactcgtatcttaaacctatgttgcagagagatttcataactgctctgccagctcggggattggatcatattgctgagaacattctgtcatacctggatgccaaatcactatgtgctgctgaacttgtgtgcaaggaatggtaccgagtgacctctgatggcatgctgtggaagaagcttatcgagagaatggtcaggacagattctctgtggagaggcctggcagaacgaagaggatggggacagtatttattcaaaaacaaacctcctgacgggaatgctcctcccaactctttttatagagcactttatcctaaaattatacaagacattgagacaatagaatctaattggagatgtggaagacatagtttacagagaattcactgccgaagtgaaacaagcaaaggagtttactgtttacagtatgatgatcagaaaatagtaagcggccttcgagacaacacaatcaagatctgggataaaaacacattggaatgcaagcgaattctcacaggccatacaggttcagtcctctgtctccagtatgatgagagagtgatcataacaggatcatcggattccacggtcagagtgtgggatgtaaatacaggtgaaatgctaaacacgttgattcaccattgtgaagcagttctgcacttgcgtttcaataatggcatgatggtgacctgctccaaagatcgttccattgctgtatgggatatggcctccccaactgacattaccctccggagggtgctggtcggacaccgagctgctgtcaatgttgtagactttggtgccgnncttggtcggntnggggttgaacttttgtttggacccagttcttggtgattgggggccttatggccaagggctgcggtgcgcag

SEQ ID NO: 68514 - DNA, 1893 bp, Homo sapiens
  misc_feature (1809)..(1810): n is a, c, g, or t
  misc_feature (1820)..(1820): n is a, c, g, or t
  misc_feature (1822)..(1822): n is a, c, g, or t
aaataccattgattttcaaaaacttaatacaaaaaagtgaaatatctaattcataattctatattaattatattttgaaataatgtttaggccaggcgcagtggctcatgcttgtaatcccagcgttttaggaggccgaggtgggaggatcagttgaggccaggagtatgagacctgcctgggtaatatagcaagaacttgtctgtaccaaaaaaattaggcgtagtggtatacacctgtagtcccatctacttggaaggctgaggcaggaggatctcttgagctcaggagtttgaggttctagggagctgtgatcataccactgcactccatcctggttgacaatgagaccatgtctcttacaaaaaagtgaaaagaaagttgaaattttcataatgtattttatttaacacaccgtaattttttatttttgtttttatttctttggaaacagtctcgctttgttgcccaggctggagtgaagtggcgtgatcttggctcactgcaaactccgcctctggcttcaagtgattctcgtggactacagtgctctatgcccaggtctctgtggctgggctgctccagcctggcggacagcatgccttcgctgcgatgcctgtataacccagggactggcgcactcacagctttccagaattcctcagagagagaagactgtaataatggcgaaccccctaggaagataataccagagaagaattcacttagacagacatacaacagctgtgccagactctgcttaaaccaagaaacagtatgtttagcaagcactgctatgaagactgagaattgtgtggccaaaacaaaacttgccaatggcacttccagtatgattgtgcccaagcaacggaaactctcagcaagctatgaaaaggaaaaggaactgtgtgtcaaatactttgagcagtggtcagagtcagatcaagtggaatttgtggaacatcttatatcccaaatgtgtcattaccaacatgggcacataaactcgtatcttaaacctatgttgcagagagatttcataactgctctgccagctcggggattggatcatattgctgagaacattctgtcatacctggatgccaaatcactatgtgctgctgaacttgtgtgcaaggaatggtaccgagtgacctctgatggcatgctgtggaagaagcttatcgagagaatggtcaggacagattctctgtggagaggcctggcagaacgaagaggatggggacagtatttattcaaaaacaaacctcctgacgggaatgctcctcccaactctttttatagagcactttatcctaaaattatacaagacattgagacaatagaatctaattggagatgtggaagacatagtttacagagaattcactgccgaagtgaaacaagcaaaggagtttactgtttacagtatgatgatcagaaaatagtaagcggccttcgagacaacacaatcaagatctgggataaaaacacattggaatgcaagcgaattctcacaggccatacaggttcagtcctctgtctccagtatgatgagagagtgatcataacaggatcatcggattccacggtcagagtgtgggatgtaaatacaggtgaaatgctaaacacgttgattcaccattgtgaagcagttctgcacttgcgtttcaataatggcatgatggtgacctgctccaaagatcgttccattgctgtatgggatatggcctccccaactgacattaccctccggagggtgctggtcggacaccgagctgctgtcaatgttgtagactttggtgccgnncttggtcggntnggggttgaacttttgtttggacccagttcttggtgattgggggccttatggccaagggctgcggtgcgcag

SEQ ID NO: 68515 - DNA, 2158 bp, Homo sapiens
agaggtaagagagggcggggggaaggaagaggaggcgggatccgggcgctgcgttggctgcggcctggcaccaaaggggcggccccggcggagagcggacccagtggcctcggcgattatggacccggccgaggcggtgctgcaagagaaggcactcaagtttatgtgctctatgcccaggtctctgtggctgggctgctccagcctggcggacagcatgccttcgctgcgatgcctgtataacccagggactggcgcactcacagctttccagaattcctcagagagagaagactgtaataatggcgaaccccctaggaagataataccagagaagaattcacttagacagacatacaacagctgtgccagactctgcttaaaccaagaaacagtatgtttagcaagcactgctatgaagactgagaattgtgtggccaaaacaaaacttgccaatggcacttccagtatgattgtgcccaagcaacggaaactctcagcaagctatgaaaatggaatttgtggaacatcttatatcccaaatgtgtcattaccaacatgggcacataaactcgtatcttaaacctatgttgcagagagatttcataactgctctgccagctcggggattggatcatattgctgagaacattctgtcatacctggatgccaaatcactatgtgctgctgaacttgtgtgcaaggaatggtaccgagtgacctctgatggcatgctgtggaagaagcttatcgagagaatggtcaggacagattctctgtggagaggcctggcagaacgaagaggatgacaatagaatctaattggagatgtggaagacatagtttacagagaattcactgccgaagtgaaacaagcaaaggagtttactgtttacagtatgatgatcagaaaatagtaagcggccttcgagacaacacaatcaagatctgggataaaaacacattggaatgcaagcgaattctcacaggccatacaggttcagtcctctgtctccagtatgatgagagagtgatcataacaggatcatcggattccacggtcagagtgtgggatgtaaatacaggtgaaatgctaaacacgttgattcaccattgtgaagcagttctgcacttgcgtttcaataatggcatgatggtgacctgctccaaagatcgttccattgctgtatgggatatggcctccccaactgacattaccctccggagggtgctggtcggacaccgagctgctgtcaatgttgtagactttgatgacaagtacattgtttctgcatctggggatagaactataaaggtatggaacacaagtacttgtgaatttgtaaggaccttaaatggacacaaacgaggcattgcctgtttgcagtacagggacaggctggtagtgagtggctcatctgacaacactatcagattatgggacatagaatgtggtgcatgtttacgagtgttagaaggccatgaggaattggtgcgttgtattcgatttgataacaagaggatagtcagtggggcctatgatggaaaaattaaagtgtgggatcttgtggctgctttggacccccgtgctcctgcagggacactctgtctacggacccttgtggagcattccggaagagtttttcgactacagtttgatgaattccagattgtcagtagttcacatgatgacacaatcctcatctgggacttcctaaatgatccagctgcccaagctgaacccccccgttccccttctcgaacatacacctacatctccagataaataaccatacactgacctcatacttgcccaggacccattaaagttgcggtatttaacgtatctgccaataccaggatgagcaacaacagtaacaatcaaactactgcccagtttccctggactagccgaggagcagggctttgagactcctgttgggacacagttggtctgcagtcggcccaggacggtctactcagcacaactgactgcttcagtgctgctatcagaagatgtcttctatcaattgtgaatgattggaacttttaaacctcccctcctctcctcctttcacctctgcacctagttttttcccattggttccagacaaaggtgacttataaatatatttagtgttttgccagaaaaaaaaaa

SEQ ID NO: 68516 - DNA, 2200 bp, Homo sapiens
agaggtaagagagggcggggggaaggaagaggaggcgggatccgggcgctgcgttggctgcggcctggcaccaaaggggcggccccggcggagagcggacccagtggcctcggcgattatggacccggccgaggcggtgctgcaagagaaggcactcaagtttatgaattcctcagagagagaagactgtaataatggcgaaccccctaggaagataataccagagaagaattcacttagacagacatacaacagctgtgccagactctgcttaaaccaagaaacagtatgtttagcaagcactgctatgaagactgagaattgtgtggccaaaacaaaacttgccaatggcacttccagtatgattgtgcccaagcaacggaaactctcagcaagctatgaaaaggaaaaggaactgtgtgtcaaatactttgagcagtggtcagagtcagatcaagtggaatttgtggaacatcttatatcccaaatgtgtcattaccaacatgggcacataaactcgtatcttaaacctatgttgcagagagatttcataactgctctgccagctcggggattggatcatattgctgagaacattctgtcatacctggatgccaaatcactatgtgctgctgaacttgtgtgcaaggaatggtaccgagtgacctctgatggcatgctgtggaagaagcttatcgagagaatggtcaggacagattctctgtggagaggcctggcagaacgaagaggatggggacagtatttattcaaaaacaaacctcctgacgggaatgctcctcccaactctttttatagagcactttatcctaaaattatacaagacattgagacaatagaatctaattggagatgtggaagacatagtttacagagaattcactgccgaagtgaaacaagcaaaggagtttactgtttacagtatgatgatcagaaaatagtaagcggccttcgagacaacacaatcaagatctgggataaaaacacattggaatgcaagcgaattctcacaggccatacaggttcagtcctctgtctccagtatgatgagagagtgatcataacaggatcatcggattccacggtcagagtgtgggatgtaaatacaggtgaaatgctaaacacgttgattcaccattgtgaagcagttctgcacttgcgtttcaataatggcatgatggtgacctgctccaaagatcgttccattgctgtatgggatatggcctccccaactgacattaccctccggagggtgctggtcggacaccgagctgctgtcaatgttgtagactttgatgacaagtacattgtttctgcatctggggatagaactataaaggtatggaacacaagtacttgtgaatttgtaaggaccttaaatggacacaaacgaggcattgcctgtttgcagtacagggacaggctggtagtgagtggctcatctgacaacactatcagattatgggacatagaatgtggtgcatgtttacgagtgttagaaggccatgaggaattggtgcgttgtattcgatttgataacaagaggatagtcagtggggcctatgatggaaaaattaaagtgtgggatcttgtggctgctttggacccccgtgctcctgcagggacactctgtctacggacccttgtggagcattccggaagagtttttcgactacagtttgatgaattccagattgtcagtagttcacatgatgacacaatcctcatctgggacttcctaaatgatccagctgcccaagctgaacccccccgttccccttctcgaacatacacctacatctccagataaataaccatacactgacctcatacttgcccaggacccattaaagttgcggtatttaacgtatctgccaataccaggatgagcaacaacagtaacaatcaaactactgcccagtttccctggactagccgaggagcagggctttgagactcctgttgggacacagttggtctgcagtcggcccaggacggtctactcagcacaactgactgcttcagtgctgctatcagaagatgtcttctatcaattgtgaatgattggaacttttaaacctcccctcctctcctcctttcacctctgcacctagttttttcccattggttccagacaaaggtgacttataaatatatttagtgttttgccagaaaaaaaaaa

SEQ ID NO: 68517 - DNA, 1459 bp, Homo sapiens
  misc_feature (1375)..(1376): n is a, c, g, or t
  misc_feature (1386)..(1386): n is a, c, g, or t
  misc_feature (1388)..(1388): n is a, c, g, or t
agaggtaagagagggcggggggaaggaagaggaggcgggatccgggcgctgcgttggctgcggcctggcaccaaaggggcggccccggcggagagcggacccagtggcctcggcgattatggacccggccgaggcggtgctgcaagagaaggcactcaagtttatgtgctctatgcccaggtctctgtggctgggctgctccagcctggcggacagcatgccttcgctgcgatgcctgtataacccagggactggcgcactcacagctttccagaattcctcagagagagaagactgtaataatggcgaaccccctaggaagataataccagagaagaattcacttagacagacatacaacagctgtgccagactctgcttaaaccaagaaacagtatgtttagcaagcactgctatgaagactgagaattgtgtggccaaaacaaaacttgccaatggcacttccagtatgattgtgcccaagcaacggaaactctcagcaagctatgaaaatggaatttgtggaacatcttatatcccaaatgtgtcattaccaacatgggcacataaactcgtatcttaaacctatgttgcagagagatttcataactgctctgccagctcggggattggatcatattgctgagaacattctgtcatacctggatgccaaatcactatgtgctgctgaacttgtgtgcaaggaatggtaccgagtgacctctgatggcatgctgtggaagaagcttatcgagagaatggtcaggacagattctctgtggagaggcctggcagaacgaagaggatggggacagtatttattcaaaaacaaacctcctgacgggaatgctcctcccaactctttttatagagcactttatcctaaaattatacaagacattgagacaatagaatctaattggagatgtggaagacatagtttacagagaattcactgccgaagtgaaacaagcaaaggagtttactgtttacagtatgatgatcagaaaatagtaagcggccttcgagacaacacaatcaagatctgggataaaaacacattggaatgcaagcgaattctcacaggccatacaggttcagtcctctgtctccagtatgatgagagagtgatcataacaggatcatcggattccacggtcagagtgtgggatgtaaatacaggtgaaatgctaaacacgttgattcaccattgtgaagcagttctgcacttgcgtttcaataatggcatgatggtgacctgctccaaagatcgttccattgctgtatgggatatggcctccccaactgacattaccctccggagggtgctggtcggacaccgagctgctgtcaatgttgtagactttggtgccgnncttggtcggntnggggttgaacttttgtttggacccagttcttggtgattgggggccttatggccaagggctgcggtgcgcag

SEQ ID NO: 68518 - DNA, 1460 bp, Homo sapiens
  misc_feature (1376)..(1377): n is a, c, g, or t
  misc_feature (1387)..(1387): n is a, c, g, or t
  misc_feature (1389)..(1389): n is a, c, g, or t
agaggtaagagagggcggggggaaggaagaggaggcgggatccgggcgctgcgttggctgcggcctggcaccaaaggggcggccccggcggagagcggacccagtggcctcggcgattatggacccggccgaggcggtgctgcaagagaaggcactcaagtttatggttcaggctctgttgcaccatccaaccttgagcaagatgcttactcaaagattattaattcctcagagagagaagactgtaataatggcgaaccccctaggaagataataccagagaagaattcacttagacagacatacaacagctgtgccagactctgcttaaaccaagaaacagtatgtttagcaagcactgctatgaagactgagaattgtgtggccaaaacaaaacttgccaatggcacttccagtatgattgtgcccaagcaacggaaactctcagcaagctatgaaaaggaaaaggaactgtgtgtcaaatactttgagcagtggtcagagtcagatcaagtggaatttgtggaacatcttatatcccaaatgtgtcattaccaacatgggcacataaactcgtatcttaaacctatgttgcagagagatttcataactgctctgccagctcggggattggatcatattgctgagaacattctgtcatacctggatgccaaatcactatgtgctgctgaacttgtgtgcaaggaatggtaccgagtgacctctgatggcatgctgtggaagaagcttatcgagagaatggtcaggacagattctctgtggagaggcctggcagaacgaagaggatggggacagtatttattcaaaaacaaacctcctgacgggaatgctcctcccaactctttttatagagcactttatcctaaaattatacaagacattgagacaatagaatctaattggagatgtggaagacatagtttacagagaattcactgccgaagtgaaacaagcaaaggagtttactgtttacagtatgatgatcagaaaatagtaagcggccttcgagacaacacaatcaagatctgggataaaaacacattggaatgcaagcgaattctcacaggccatacaggttcagtcctctgtctccagtatgatgagagagtgatcataacaggatcatcggattccacggtcagagtgtgggatgtaaatacaggtgaaatgctaaacacgttgattcaccattgtgaagcagttctgcacttgcgtttcaataatggcatgatggtgacctgctccaaagatcgttccattgctgtatgggatatggcctccccaactgacattaccctccggagggtgctggtcggacaccgagctgctgtcaatgttgtagactttggtgccgnncttggtcggntnggggttgaacttttgtttggacccagttcttggtgattgggggccttatggccaagggctgcggtgcgcag

SEQ ID NO: 68519 - DNA, 1481 bp, Homo sapiens
  misc_feature (1397)..(1398): n is a, c, g, or t
  misc_feature (1408)..(1408): n is a, c, g, or t
  misc_feature (1410)..(1410): n is a, c, g, or t
gtgtttgaccgtggcttgatcaccccctccccaataaagctaaaactcacctgagttgtagctggagtgaagtggcgtgatcttggctcactgcaaactccgcctctggcttcaagtgattctcgtggactacagtgctctatgcccaggtctctgtggctgggctgctccagcctggcggacagcatgccttcgctgcgatgcctgtataacccagggactggcgcactcacagctttccagaattcctcagagagagaagactgtaataatggcgaaccccctaggaagataataccagagaagaattcacttagacagacatacaacagctgtgccagactctgcttaaaccaagaaacagtatgtttagcaagcactgctatgaagactgagaattgtgtggccaaaacaaaacttgccaatggcacttccagtatgattgtgcccaagcaacggaaactctcagcaagctatgaaaaggaaaaggaactgtgtgtcaaatactttgagcagtggtcagagtcagatcaagtggaatttgtggaacatcttatatcccaaatgtgtcattaccaacatgggcacataaactcgtatcttaaacctatgttgcagagagatttcataactgctctgccagctcggggattggatcatattgctgagaacattctgtcatacctggatgccaaatcactatgtgctgctgaacttgtgtgcaaggaatggtaccgagtgacctctgatggcatgctgtggaagaagcttatcgagagaatggtcaggacagattctctgtggagaggcctggcagaacgaagaggatggggacagtatttattcaaaaacaaacctcctgacgggaatgctcctcccaactctttttatagagcactttatcctaaaattatacaagacattgagacaatagaatctaattggagatgtggaagacatagtttacagagaattcactgccgaagtgaaacaagcaaaggagtttactgtttacagtatgatgatcagaaaatagtaagcggccttcgagacaacacaatcaagatctgggataaaaacacattggaatgcaagcgaattctcacaggccatacaggttcagtcctctgtctccagtatgatgagagagtgatcataacaggatcatcggattccacggtcagagtgtgggatgtaaatacaggtgaaatgctaaacacgttgattcaccattgtgaagcagttctgcacttgcgtttcaataatggcatgatggtgacctgctccaaagatcgttccattgctgtatgggatatggcctccccaactgacattaccctccggagggtgctggtcggacaccgagctgctgtcaatgttgtagactttggtgccgnncttggtcggntnggggttgaacttttgtttggacccagttcttggtgattgggggccttatggccaagggctgcggtgcgcag

SEQ ID NO: 68520 - DNA, 4008 bp, Homo sapiens
  misc_feature (1163)..(1163): n is a, c, g, or t
ctttgatttagtaacataaggtatagatgcatgaaaacataaacagtaaggccaggcacagtggctcacgcctgtaatcccaacactttgggaggccgaggccgggggatcacgaggtcaggagatggagaccatcctggctaacacggtgaccccccatctctactaaaagtacaaaatattagccgggcgtggtggtgggcgcctgtagtcccaggtactggggaggctgaggcagaagcatggcgtgaaccgggaggcggagcttgcagtgagccgagattgcaccactgcactccagcctgggtgacagagcaagacttcgtctaaaaaaaaaacaaaaaaaaacaaaaaaaccataaacaatataggagtgtcataggattataaatagatggcatggataataaaatctacaagtttagagaaaattcgtaattataggtgagaagtattaatgaaaggacaaagcttgttcttaaaggatcagaataggccaagatgaaaaaaggcatccatgggaaaagaactgttcatttctataattttaacaaaatagataatctatgttgaataaaatccataaatactatttccaaatttgattaaggtatttactttgaaaacctgaaacaggaacatatttacagtgttaagtgatttgataattttgtagttctgccctaaaaatcaatatccttaattaacccttcatcagtttcttaagtcatctgtcatcctgaaagcaagttaattattctaaatgttaaataattttggtagtgtctaatctataaaacatacatacactaccagtttttttctacctttaacaaattcgttcccataaaagacaattttatcactaacaaaggataactggcaggcaggtaaaggcagcttcttaggcagccagcgagttggcaggtgggttgggactcgcttgtcaactcattaattttaagcagtcagtttgggggtactgcaggataatcaggagggccgtggggagtcaagaggtgacccgggatgccggtggtggggaaagaaaagaggagcctctggaagcttggaggcaaaattgcgcttgggttcctgttccttgcatccctcctggcttgagtgcgggagaacactttttaaagactcaccttggaaagaangcctccgtcccaggggagaaggagaggcgtctgcagggggcagagaccgcagctacctgccgggtgcgccccccacccaggagcgctcgcttcgccccctttcctccccccgcccccacctccttattggtgctagtttgcagcgcccagctcctgcgccttcgcttcgcgtttgaatctggctcgccccttcgtattatgtctgcactccgaaggaaatttggggacgattatcaggtagtgaccacatcgtccagcggctcgggcttgcagccccaggggccaggccaggaccctcagcagcagcttgtgcccaagaagaagcggcagcggttcgtggacaagaacggccggtgcaatgtacagcacggcaacctgggcagcgagacaagccgctacctctcggacctcttcaccacgctggtggacctcaagtggcgctggaacctcttcatcttcattctcacctacaccgtggcctggcttttcatggcgtccatgtggtgggtgatcgcctacactcggggcgacctgaacaaagcccacgtcggtaactacacgccttgcgtggccaatgtctataacttcccttctgccttcctcttcttcatcgagacggaggccaccatcggctatggctaccgatacatcacagacaagtgccccgagggcatcatcctcttcctcttccagtccatcctgggctccatcgtggacgccttcctcatcggctgcatgttcatcaagatgtcccagcccaagaagcgcgccgagaccctcatgttcagcgagcacgcggtgatctccatgagggacggaaaactcacgcttatgttccgggtgggcaacctgcgcaacagccacatggtctccgcgcagattcgctgcaagctgctcaaatctcggcagacacctgagggtgagttccttccccttgaccaacttgaactggatgtaggttttagtacaggggcagatcaactttttcttgtgtcccccctcacaatttgccacgtgatcgatgccaaaagccccttttatgacctatcccagcgaagcatgcaaactgaacagttcgagattgtcgtcatcctagaaggcattgtggaaacaactgggatgacttgtcaagctcgaacatcatatactgaagatgaagttctttggggtcatcgtttttttcctgtaatttccttagaagagggattctttaaagttgattactcccagttccacgcaacatttgaagtccccaccccaccttacagtgtgaaagagcaggaggaaatgcttctcatgtcgtcccctttaatagcaccagccataactaacagcaaagaaagacataattctgtggaatgcttagatggactagatgatattactacaaaactaccatctaagctgcagaaaattactggaagagaagactttcccaaaaaactcttgaggatgagttctacaacttcagaaaaagcctacagcttgggagacttgcccatgaaacttcaacgaataagttcagttccgggcaactcagaagaaaaactggtatctaaaaccaccaagatgttatctgatcccatgagccagtctgtggctgatttgccaccaaagcttcaaaagatggctggaggagcagctaggatggaagggaaccttccagccaaattaagaaaaatgaactctgatcgcttcacataacaaagcactcccttaggcattatttaatgtttgatttagtaatagtccaatatttggcgatgaggtaattctccctaaggaatctgaaagtatattttcctcccagttctacaagcatatttgagaacccttcctttcccaagtattgcgaatgtgcagaaagcaacagttacggagggaggacatcataaggaagttattaacgggcatgtattatcacatcaagcatgcaataatgtgcaaattttgcatttagttttatggcatgatttatatatggcatatttatattgtatattctggaaaaaaaaatatatatatatatttaaaggggagatactctccctgacatttctaacatatgtattaagccaaacatgagtgaatagctttcagggcgataaaactaaatatatgtctgtgtgtgtgtgtgtatgtatacacacatatacatatatatatacacatacatacacatacatacatacatacatatatatctgataaaattgtgatgttttgttcaaagttgtagttcttgtgcatgtttactttattagagtaggaaggctactggcattaattattaataccaaatattttagccttaaatttttgtcattttaaaatctgatttaatgttttctgctgtttaaggtcttgggaggctttcaattgtattttatatgagagaatcacacaagtttgtgctatctatggccctgcaaaaatataaccattacatgtttaaattgtaaattttagagcataccagtactcagtatagcattgaacatttcttatgatttttaaaagttgctagtactggggagaaataattgttgattaatttgagaattattcctttcctagactaattaaaatctggaaatctgttttgtatatgatctaatacaaagatgagctctgaacaaacactgaatcatgttaatagacagtagccaagttatattgaatatatcagaatctgtgtgaagttacacaattaattgtccctgtttcaaactgagtaaattggaaacattttctttctttttctggaaattttgtccattttaaaaaccaatcattttaagaagacatgacaatgcaatgaaacagatgataaatatttatgctt

SEQ ID NO: 68521 - DNA, 4063 bp, Homo sapiens
  misc_feature (1163)..(1163): n is a, c, g, or t
ctttgatttagtaacataaggtatagatgcatgaaaacataaacagtaaggccaggcacagtggctcacgcctgtaatcccaacactttgggaggccgaggccgggggatcacgaggtcaggagatggagaccatcctggctaacacggtgaccccccatctctactaaaagtacaaaatattagccgggcgtggtggtgggcgcctgtagtcccaggtactggggaggctgaggcagaagcatggcgtgaaccgggaggcggagcttgcagtgagccgagattgcaccactgcactccagcctgggtgacagagcaagacttcgtctaaaaaaaaaacaaaaaaaaacaaaaaaaccataaacaatataggagtgtcataggattataaatagatggcatggataataaaatctacaagtttagagaaaattcgtaattataggtgagaagtattaatgaaaggacaaagcttgttcttaaaggatcagaataggccaagatgaaaaaaggcatccatgggaaaagaactgttcatttctataattttaacaaaatagataatctatgttgaataaaatccataaatactatttccaaatttgattaaggtatttactttgaaaacctgaaacaggaacatatttacagtgttaagtgatttgataattttgtagttctgccctaaaaatcaatatccttaattaacccttcatcagtttcttaagtcatctgtcatcctgaaagcaagttaattattctaaatgttaaataattttggtagtgtctaatctataaaacatacatacactaccagtttttttctacctttaacaaattcgttcccataaaagacaattttatcactaacaaaggataactggcaggcaggtaaaggcagcttcttaggcagccagcgagttggcaggtgggttgggactcgcttgtcaactcattaattttaagcagtcagtttgggggtactgcaggataatcaggagggccgtggggagtcaagaggtgacccgggatgccggtggtggggaaagaaaagaggagcctctggaagcttggaggcaaaattgcgcttgggttcctgttccttgcatccctcctggcttgagtgcgggagaacactttttaaagactcaccttggaaagaangcctccgtcccaggggagaaggagaggcgtctgcagggggcagagaccgcagctacctgccgggtgcgccccccacccaggagcgctcgcttcgccccctttcctccccccgcccccacctccttattggtgctagtttgcagcgcccagctcctgcgccttcgcttcgcgtttgaatctggctcgccccttcgtattatgtctgcactccgaaggaaatttggggacgattatcaggtagtgaccacatcgtccagcggctcgggcttgcagccccaggggccaggccaggaccctcagcagcagcttgtgcccaagaagaagcggcagcggttcgtggacaagaacggccggtgcaatgtacagcacggcaacctgggcagcgagacaagccgctacctctcggacctcttcaccacgctggtggacctcaagtggcgctggaacctcttcatcttcattctcacctacaccgtggcctggcttttcatggcgtccatgtggtgggtgatcgcctacactcggggcgacctgaacaaagcccacgtcggtaactacacgccttgcgtggccaatgtctataacttcccttctgccttcctcttcttcatcgagacggaggccaccatcggctatggctaccgatacatcacagacaagtgccccgagggcatcatcctcttcctcttccagtccatcctgggctccatcgtggacgccttcctcatcggctgcatgttcatcaagatgtcccagcccaagaagcgcgccgagaccctcatgttcagcgagcacgcggtgatctccatgagggacggcgcgcagattcgctgcaagctgctcaaaggatgacttgtcaagctcgaacatcatatactgaagatgaagttctttggggtcatcgtttttttcctgtaatttccttagaagagggattctttaaagttgattactcccagttccacgcaacatttgaagtccccaccccaccttacagtgtgaaagagcaggaggaaatgcttctcatgtcgtcccctttaatagcaccagccataactaacagcaaagaaagacataattctgtggaatgcttagatggactagatgatattactacaaaactaccatctaagctgcagaaaattactggaagagaagactttcccaaaaaactcttgaggatgagttctacaacttcagaaaaagcctacagcttgggagacttgcccatgaaacttcaacgaataagttcagttccgggcaactcagaagaaaaactggtatctaaaaccaccaagatgttatctgatcccatgagccagtctgtggctgatttgccaccaaagcttcaaaagatggctggaggagcagctaggatggaagggaaccttccagccaaattaagaaaaatgaactctgatcgcttcacataacaaagcactcccttaggcattatttaatgtttgatttagtaatagtccaatatttggcgatgaggtaattctccctaaggaatctgaaagtatattttcctcccagttctacaagcatatttgagaacccttcctttcccaagtattgcgaatgtgcagaaagcaacagttacggagggaggacatcataaggaagttattaacgggcatgtattatcacatcaagcatgcaataatgtgcaaattttgcatttagttttatggcatgatttatatatggcatatttatattgtatattctggaaaaaaaaatatatatatatatttaaaggggagatactctccctgacatttctaacatatgtattaagccaaacatgagtgaatagctttcagggcgataaaactaaatatatgtctgtgtgtgtgtgtgtatgtatacacacatatacatatatatatacacatacatacacatacatacatacatacatatatatctgataaaattgtgatgttttgttcaaagttgtagttcttgtgcatgtttactttattagagtaggaaggctactggcattaattattaataccaaatattttagccttaaatttttgtcattttaaaatctgatttaatgttttctgctgtttaaggtcttgggaggctttcaattgtattttatatgagagaatcacacaagtttgtgctatctatggccctgcaaaaatataaccattacatgtttaaattgtaaattttagagcataccagtactcagtatagcattgaacatttcttatgatttttaaaagttgctagtactggggagaaataattgttgattaatttgagaattattcctttcctagactaattaaaatctggaaatctgttttgtatatgatctaatacaaagatgagctctgaacaaacactgaatcatgttaatagacagtagccaagttatattgaatatatcagaatctgtgtgaagttacacaattaattgtccctgtttcaaactgagtaaattggaaacattttctttctttttctggaaattttgtccattttaaaaaccaatcattttaagaagacatgacaatgcaatgaaacagatgataaatatttatgcttaaaatatgtatgtctaattgagtctcttttttattctgttttcttgtttatggcatttgttgtaacaggatagactttttcctcacctaggaaacctatcccatgcctgtcacttatagttcaggaggaagtttttgcacagaccagagagaaattaaaattagatgataaattgaagatatcttacacacagttttttggtgaacactgattttattggtgtcttagatccctagtctacccaaataattttaacagtactgttttttctaatcctgaagtctgatatttatgactcattagcaggaatcaaaactagtgatcag

SEQ ID NO: 68522 - DNA, 4334 bp, Homo sapiens
  misc_feature (1163)..(1163): n is a, c, g, or t
ctttgatttagtaacataaggtatagatgcatgaaaacataaacagtaaggccaggcacagtggctcacgcctgtaatcccaacactttgggaggccgaggccgggggatcacgaggtcaggagatggagaccatcctggctaacacggtgaccccccatctctactaaaagtacaaaatattagccgggcgtggtggtgggcgcctgtagtcccaggtactggggaggctgaggcagaagcatggcgtgaaccgggaggcggagcttgcagtgagccgagattgcaccactgcactccagcctgggtgacagagcaagacttcgtctaaaaaaaaaacaaaaaaaaacaaaaaaaccataaacaatataggagtgtcataggattataaatagatggcatggataataaaatctacaagtttagagaaaattcgtaattataggtgagaagtattaatgaaaggacaaagcttgttcttaaaggatcagaataggccaagatgaaaaaaggcatccatgggaaaagaactgttcatttctataattttaacaaaatagataatctatgttgaataaaatccataaatactatttccaaatttgattaaggtatttactttgaaaacctgaaacaggaacatatttacagtgttaagtgatttgataattttgtagttctgccctaaaaatcaatatccttaattaacccttcatcagtttcttaagtcatctgtcatcctgaaagcaagttaattattctaaatgttaaataattttggtagtgtctaatctataaaacatacatacactaccagtttttttctacctttaacaaattcgttcccataaaagacaattttatcactaacaaaggataactggcaggcaggtaaaggcagcttcttaggcagccagcgagttggcaggtgggttgggactcgcttgtcaactcattaattttaagcagtcagtttgggggtactgcaggataatcaggagggccgtggggagtcaagaggtgacccgggatgccggtggtggggaaagaaaagaggagcctctggaagcttggaggcaaaattgcgcttgggttcctgttccttgcatccctcctggcttgagtgcgggagaacactttttaaagactcaccttggaaagaangcctccgtcccaggggagaaggagaggcgtctgcagggggcagagaccgcagctacctgccgggtgcgccccccacccaggagcgctcgcttcgccccctttcctccccccgcccccacctccttattggtgctagtttgcagcgcccagctcctgcgccttcgcttcgcgtttgaatctggctcgccccttcgtattatgtctgcactccgaaggaaatttggggacgattatcaggtagtgaccacatcgtccagcggctcgggcttgcagccccaggggccaggccaggaccctcagcagcagcttgtgcccaagaagaagcggcagcggttcgtggacaagaacggccggtgcaatgtacagcacggcaacctgggcagcgagacaagccgctacctctcggacctcttcaccacgctggtggacctcaagtggcgctggaacctcttcatcttcattctcacctacaccgtggcctggcttttcatggcgtccatgtggtgggtgatcgcctacactcggggcgacctgaacaaagcccacgtcggtaactacacgccttgcgtggccaatgtctataacttcccttctgccttcctcttcttcatcgagacggaggccaccatcggctatggctaccgatacatcacagacaagtgccccgagggcatcatcctcttcctcttccagtccatcctgggctccatcgtggacgccttcctcatcggctgcatgttcatcaagatgtcccagcccaagaagcgcgccgagaccctcatgttcagcgagcacgcggtgatctccatgagggacggaaaactcacgcttatgttccgggtgggcaacctgcgcaacagccacatggtctccgcgcagattcgctgcaagctgctcaaatctcggcagacacctgagggtgagttccttccccttgaccaacttgaactggatgtaggttttagtacaggggcagatcaactttttcttgtgtcccccctcacaatttgccacgtgatcgatgccaaaagccccttttatgacctatcccagcgaagcatgcaaactgaacagttcgagattgtcgtcatcctagaaggcattgtggaaacaactgggatgacttgtcaagctcgaacatcatatactgaagatgaagttctttggggtcatcgtttttttcctgtaatttccttagaagagggattctttaaagttgattactcccagttccacgcaacatttgaagtccccaccccaccttacagtgtgaaagagcaggaggaaatgcttctcatgtcgtcccctttaatagcaccagccataactaacagcaaagaaagacataattctgtggaatgcttagatggactagatgatattactacaaaactaccatctaagctgcagaaaattactggaagagaagactttcccaaaaaactcttgaggatgagttctacaacttcagaaaaagcctacagcttgggagacttgcccatgaaacttcaacgaataagttcagttccgggcaactcagaagaaaaactggtatctaaaaccaccaagatgttatctgatcccatgagccagtctgtggctgatttgccaccaaagcttcaaaagatggctggaggagcagctaggatggaagggaaccttccagccaaattaagaaaaatgaactctgatcgcttcacataacaaagcactcccttaggcattatttaatgtttgatttagtaatagtccaatatttggcgatgaggtaattctccctaaggaatctgaaagtatattttcctcccagttctacaagcatatttgagaacccttcctttcccaagtattgcgaatgtgcagaaagcaacagttacggagggaggacatcataaggaagttattaacgggcatgtattatcacatcaagcatgcaataatgtgcaaattttgcatttagttttatggcatgatttatatatggcatatttatattgtatattctggaaaaaaaaatatatatatatatttaaaggggagatactctccctgacatttctaacatatgtattaagccaaacatgagtgaatagctttcagggcgataaaactaaatatatgtctgtgtgtgtgtgtgtatgtatacacacatatacatatatatatacacatacatacacatacatacatacatacatatatatctgataaaattgtgatgttttgttcaaagttgtagttcttgtgcatgtttactttattagagtaggaaggctactggcattaattattaataccaaatattttagccttaaatttttgtcattttaaaatctgatttaatgttttctgctgtttaaggtcttgggaggctttcaattgtattttatatgagagaatcacacaagtttgtgctatctatggccctgcaaaaatataaccattacatgtttaaattgtaaattttagagcataccagtactcagtatagcattgaacatttcttatgatttttaaaagttgctagtactggggagaaataattgttgattaatttgagaattattcctttcctagactaattaaaatctggaaatctgttttgtatatgatctaatacaaagatgagctctgaacaaacactgaatcatgttaatagacagtagccaagttatattgaatatatcagaatctgtgtgaagttacacaattaattgtccctgtttcaaactgagtaaattggaaacattttctttctttttctggaaattttgtccattttaaaaaccaatcattttaagaagacatgacaatgcaatgaaacagatgataaatatttatgcttaaaatatgtatgtctaattgagtctcttttttattctgttttcttgtttatggcatttgttgtaacaggatagactttttcctcacctaggaaacctatcccatgcctgtcacttatagttcaggaggaagtttttgcacagaccagagagaaattaaaattagatgataaattgaagatatcttacacacagttttttggtgaacactgattttattggtgtcttagatccctagtctacccaaataattttaacagtactgttttttctaatcctgaagtctgatatttatgactcattagcaggaatcaaaactagtgatcag

SEQ ID NO: 68523 - DNA, 490 bp, Homo sapiens
tctagtctggcctttttccctgtataggttttatactcaggcttgatcccatcatggctgcgagatggcagtaacaatgctaggcataatatccaaaattaatttacaggtacaggaaagggggcatctctttcgtgtgtctcttttaagagtaagaaaattcttgtagaagtttctctgcattccttcatatactgttggccagaattacatcacatgctgagttgtgaagcagtcattaatgagggtgagagcacatgattgattcagacttatcaagatctgccggggctggctgcataattcccagggcccagtgcaaaatgaaaactcagggcccaaggtaggggtggggaagttaatcttcctttgtcatgggcccaccatctcaacccacagtggaggacaacccaagggattgctgcctgtgtgccaggatgcacagaggcacctagatgatggatgggcaagaggctaccactggtttgcc

SEQ ID NO: 68524 - DNA, 862 bp, Homo sapiens
gtaaggtagttaaattagaaatatgtttgatctccattttacactttttgatgaagttcttgccttcagctttggagtctgttggaatgaaactgtgtctcacagcttgcatctgatgtagcagattgccctgttcaagtcagcatgaacaaagctcgcagaaaggctactaggtaacggatttgagtttattcagtagaaaaaaagggaatgaggacatatctttaggtcccagaagcagcaaaacctcctagttacataacagcagggaaactaggagatgaaatctccaaaattttgtccagtctgtatgaactgcagtgattgtctgtctgctagacacttttttttagcctaattcttgttcgtttcattaccttcatatgtgtgcattgtactggttttgaaatgagcagacattgagaaaacaattttctgattccccattaggaacatatgattttcatttccctttagtgcaaaggaacaaacatcacattgaggagggagaagtgtacccttctttttcagcttaatgttacctctctttaaaaaaaaaacatttttgaaaaatttcttgactgatgacattctagaatttattgattcaatttaaaattccctgcatagtccaaataaacataatttttactcttcaagtcatctaaagagttgtgagaaagagcagtactatgtgttttatccttagagcattatccttctaagtgaactcctttcttattactgagcgtgtgtgtgtgtgtgtgtgtgtgtgtgtgtgtaggataaaattgtaatggccttaaagttgttacctggcatttttggtttcttaaaataggcatccccctactccctttac

SEQ ID NO: 68525 - DNA, 662 bp, Homo sapiens
gaagggttagccgtcactttaacacagtcctcatcaacatcgcaacaaaattaaaggaatgcaaggaaaacctattctgaaagaatgggcacagataatagctagagaaattctgaaaaaatgaatgcaggtgtttaactgtgttttttaactataataaaatgatctggcactggtgctggaatagaccgatcaagggaacagtacggatagtccgttaataaagccacagagatatgctaaggatagcgttttaaactggtgggaaaagactgaagtgttgaataagagttattgataattggccaaccatttggaaagaaaataattatcttgatgcatacacataaaattagaaatttctgtctggcagaaaacatcataaaattagaaaaatattcctgtaatctcagcactttgggaggccaaggcaggtggatcacgaggtcaggagatccaagaccatcctggctaacacggtgaaaccccgtctctactaaaaatacaaaaaattagccgggcgcagtggcggccacctgtagtcccagctactcaggaggctgaggcaggagaatggcatgaacccgggaggcagagcttgcagtgagctgagattgcaccactgcactccagcctgggcgacagagtgagaccccgtctgt

SEQ ID NO: 68526 - DNA, 567 bp, Homo sapiens
tttggtattttttgtagaaatggggttttgccatgttgcccaggctggtcttgaactcctcggctcaagcaatttgcccgactcagcctctcccaaagtgctaagattacagatgtgagctactgcaccgcacctgccttagacaggttttgtgagcacatccaagctcagtaagaagagacatagttggtggggggcagggtggcacagtcagtcatgaggataagatgagtcagagggagcactgcatatttgccaggcctgcccatgttcctaggtgagtcccacaggtaagctgataagctgacatgatggggaaacagtgccgtcatgacccagccaagtcttggagaggtgaatgaatggaggtctgggtacagaaggggtacagcgacagtatgtgcagaagccacagctttgcctgttttcttccccacaaccagaatttgttttcaactgtagaaaggacggtactggtccagctcacaaagcactcagtgagttgcagatgcaaatgcactattcagtatcatatatgaaacagggaagactgagggaggtggacat

SEQ ID NO: 68527 - DNA, 347 bp, Homo sapiens
cagagcttggtcactttgcactttgttcagcacgtgccttttggttctttgctgtgcgagcacagagctgctggaggggtgagggagaagggtagtcctcactcccttaggagatgagtcgggtcccatcttgtcgcagagcttttgtacttcctttacctcccttcctactgtaagctccttgtgggctggacttggcatggagcatctttgaatttcccccaggcaccaaaaaaggccttcaatcataacaatcgaaacaacagtaataacgctggaggtgtccgagaccgttgacagcactttacatgaaccaactcattctgtcatcacaagtttcccatgaa

SEQ ID NO: 68528 - DNA, 327 bp, Homo sapiens
caaactaaatattaaaaattatatttttgtaccacaatgataagaaattatgtgaagatttaaaatgtttaaagtattctaattatagttttgaattgcctgttttgagtgtcagtcagattaactacagaggtcagccacatatcatctctatagtttcttgtattaatattttgcctaatccatcctctatttctcatcacctttcgacagtatgatctttgaagtctttttaagttaatgtatatataccagatttcacttgctcttgccttgattaaacattctgttgattggtgaaaacccttgactgttttccagattttt

SEQ ID NO: 68529 - DNA, 375 bp, Homo sapiens
tgtgggggcacacagtggagctccccgatgtgttctggggagaagaaagagggtctgggactagaaaataggtgagtcttaattctaaattccttgtgcttggcacatattaacaaccattgaactttggtgaatatatgactgaggagcttactgactgaagatgtaaataaaaatatattttcattggaaatcaggtacataagtatctattttggaatggaagggaggttacgatatacattttaagtttcctagaagaaagaaggagtgaagtaaagtgccacatgatcttttcttctttcattccttaaattttttttttgagacggagtctcgctttgttgcccacgctggagtgcagtggtgtgatct

SEQ ID NO: 68530 - DNA, 352 bp, Homo sapiens
ccttttttgctgctgtctcatactccatggtacagtgttccacagtttctttaattattcagccatgggaagaaacggggtgtttccagttttgtgactctcgtgagtaacattctggtgcacatttgtggacagtttgtgtgtgaacattagttttcatttctctggctcaaattcaactgctgggtcatatggtacttagaaaattattaccatttccccaggcctttcctggaaaaaaattatttaagataaatattctgtagagacaggcagcaaaggtggacaacattttctctttttttcattgtttcatttttagttgtaagtgtatgtttttggtagggaaatc

SEQ ID NO: 68531 - DNA, 293 bp, Homo sapiens
aaggtcaagaggcagggagatgagaaacaagtcagcaggcagattgatggagacaaataatttggggtctaggttaggaaataggtttaggttttgtagccccagctgaaaggtacagaccagaaaagccatctcggctgcttagggaagttctgttctcatgcttttgtttatacaggccatagctttctccttcaggactcaaacgacaaccccctgcagaagtgcctgatggaaaaataggttcttagcaagaggagaggctgggatgctccgggcacagggttctgacc

SEQ ID NO: 68532 - DNA, 346 bp, Homo sapiens
tacttgtgatgctcaaggaataaattttagttttctgaaaaagtcacctatgcagagttcctcaggccccaaagctgccagataaatcacagtcagggctggaagggactgtgtctccattttacagaggaaaccaaaactcagagaggttaagccacttccatgagctcacacaataagtgtcaatgggggatttgaatccatgcctttttgattccggatgtggtaacatggagatgcgccacccagatcccccttcaaggatggtgatagtgtttttcctgttcagtttgacacttccagaccgccctgtacataaatcccaataaatgctatgcctccttca

SEQ ID NO: 68533 - DNA, 977 bp, Homo sapiens
accgaaccccgcccgcgccgggagcatctcgcgtccccaacgggcccccgggtcggtttccgcggtggccatgactgcggccgtgttcttcggctgcgccttcattgccttcgggcctgcgctcgccctttatgtcttcaccatcgccaccgagccgttgcgtatcatcttcctcatcgccggagctttcttctggttggtgtctctactgatttcgtcccttgtttggttcatggcaagagtcattattgacaacaaagatggaccaacacagaaatatctgctgatctttggagcgtttgtctctgtctatatccaagaaatgttccgatttgcatattataaactcttaaaaaaagccagtgaaggtttgaagagtataaacccaggtgagacagcaccctctatgcgactgctggcctatgtttctggcttgggctttggaatcatgagtggagtattttcctttgtgaataccctatctgactccttggggccaggcacagtgggcattcatggagattctcctcaattcttcctttattcagctttcatgacgctggtcattatcttgctgcatgtattctggggcattgtattttttgatggctgtgagaagaaaaagtggggcatcctccttatcgttctcctgacccacctgctggtgtcagcccagaccttcataagttcttattatggaataaacctggcgtcagcatttataatcctggtgctcatgggcacctgggcattcttagctgcgggaggcagctgccgaagcctgaaactctgcctgctctgccaagacaagaactttcttctttacaaccagcgctccagataacctcagggaaccagcacttcccaaaccgcagactacatctttagaggaagcacaactgtgcctttttctgaaaatccctttttctggtggaattgagaaagaaataaaactatgcagatatgcgttccattca

SEQ ID NO: 68534 - DNA, 1230 bp, Homo sapiens
ctgtaataagtctcatggtggctggaatgttcttttctaccctttgactttgagctcagtcatgtggcttgaattggccaattagtggttatgatgtaagttagaggcttaaaaagtatttgcatgattggaccttccttcttggactctggtgccatgagaagaagataccttgggaagttaatggccacttagcctggacccttgaatgaatatacccagagccacacagagcccaccccaggagcttgcagcagagttttccagctgatcccagcctttatcagcaatgcacagtcagcctttagacctctttcatgacgctggtcattatcttgctgcatgtattctggggcattgtattttttgatggctgtgagaagaaaaagtggggcatcctccttatcgttctcctgacccacctgctggtgtcagcccagaccttcataagttcttattatggaataaacctggcgtcagcatttataatcctggtgctcatgggcacctgggcattcttagctgcgggaggcagctgccgaagcctgaaactctgcctgctctgccaagacaagaactttcttctttacaaccagcgctccagataacctcagggaaccagcacttcccaaaccgcagactacatctttagaggaagcacaactgtgcctttttctgaaaatccctttttctggtggaattgagaaagaaataaaactatgcagatatgcgttccattcaaaaaaaaaaaaacaacaaaaaaaaagggggggggggcgccaaaaaaatatcccccggggggggcaccccatttgggtggcccccctttttttgtgaaaaaggggggcccccaaaagggggggccataaataaaaagcgagggcgcgggggcagcggcgataaaaaacaaccgcgtggcgaggggaaaaaacagcggagtcacgggggaggaagcctcacttgggaggagaacgaggaccccacacaacggtgggggggggggcgaacaacatagtggggaggaccaaaaccaccactacccacgacaagaagattttataacacgccacaggaggaggacaaatacaaacctcagaggaggggtgattcatgcgcggtggcacacccaacgccgggcatcattattgccggtcgcgcggatgaaaaaagtcgtgcgcaaccacggggagaatttcatatggaccacaacattattatcagccgaggagg

SEQ ID NO: 68535 - DNA, 456 bp, Homo sapiens
agtcctgctaattccctgaatcaggccactgccatctcatgcctgcgttgcactgaggacctccagtctggaagctcattttccatatctttacaaagcagatctatcactctgaactgttgtctcgacccgagttttgataggtattgtgctgggatctgaccattcaaaatacaatcactggaatctgaagaagtattctgtgggagtgaatggaaatatatatgacttttaaatgggcaaagatattagtgaacttctaggtgctgaggaaacaacaaagagcaaagcaaagtccctgtcccccaggagttcgcgttttaacggggaagaaaaataagcaagtgaaatggacgactgtgagaagacggagcagggagatgttactattgcttgtagggtggtcacagaatgcctgcaaaaacaacccttttgaagaattgggaaaaaaataaa

SEQ ID NO: 68536 - DNA, 415 bp, Homo sapiens
cccttttctcccctttttcattactctgctgcattctgccattcatttcctttcctcttcccgcttccctctctgattcatcatttagccaagcacatgcctctccagagccagctgtccactgcttcaggaagaacataagcaccctttcccctccaacacactttgtattaactagtccttggaaatttgacttgaaatcttggcagctgccgaagcctgaaactctgcctgctctgccaagacaagaactttcttctttacaaccagcgctccagataacctcagggaaccagcacttcccaaaccgcagactacatctttagaggaagcacaactgtgcctttttctgaaaatccctttttctggtggaattgagaaagaaataaaactatgcagatatgcgttccattca

SEQ ID NO: 68537 - DNA, 515 bp, Homo sapiens
cccttttctcccctttttcattactctgctgcattctgccattcatttcctttcctcttcccgcttccctctctgattcatcatttagccaagcacatgcctctccagagccagctgtccactgcttcaggaagaacataagcaccctttcccctccaacacactttgtattaactagtccttggaaatttgacttgaaatcttggcaggaaaagagttaacagtgtttttcttcctgtttagtttctggcttgggctttggaatcatgagtggagtattttcctttgtgaataccctatctgactccttggggccaggcacagtgggcattcatggagattctcctcaattcttcctttattcagctttcatgacgctggtcattatcttgctgcatgtattctggggcattgtattttttgatggctgtgagaagaaaaagtggggcatcctccttatcgttctcctgacccacctgctggtgtcagcccaggtgagtgttgccgccatgctc

SEQ ID NO: 68538 - DNA, 1503 bp, Homo sapiens
accgaaccccgcccgcgccgggagcatctcgcgtccccaacgggcccccgggtcggtttccgcggtggccatgactgcggccgtgttcttcggctgcgccttcattgccttcgggcctgcgctcgccctttatgtcttcaccatcgccaccgagccgttgcgtatcatcttcctcatcgccggagctttcttctggttggtgtctctactgatttcgtcccttgtttggttcatggcaagagtcattattgacaacaaagatggaccaacacagaaatatctgctgatctttggagcgtttgtctctgtctatatccaagaaatgttccgatttgcatattataaactcttaaaaaaagccagtgaaggtttgaagagtataaacccaggtgagacagcaccctctatgcgactgctggcctatgtttctggcttgggctttggaatcatgagtggagtattttcctttgtgaataccctatctgactccttggggccaggcacagtgggcattcatggagattctcctcaattcttcctttattcagctttcatgacgctggtcattatcttgctgcatgtattctggggcattgtattttttgatggctgtgagaagaaaaagtggggcatcctccttatcgttctcctgacccacctgctggtgtcagcccagaccttcataagttcttattatggaataaacctggcgtcagcatttataatcctggtgctcatgggcacctgggcattcttagctgcgggaggcagctgccgaagcctgaaactctgcctgctctgccaagacaagaactttcttctttacaaccagcgctccagataacctcagggaaccagcacttcccaaaccgcagactacatctttagaggaagcacaactgtgcctttttctgaaaatccctttttctggtggaattgagaaagaaataaaactatgcagatatgcgttccattcaaaaaaaaaaaaaaaaaaaaaaaaaaaaaaaaaaaaaaaaaaaaaaaaaacaacaaaaaaaaagggggggggggcgccaaaaaaatatcccccggggggggcaccccatttgggtggcccccctttttttgtgaaaaaggggggcccccaaaagggggggccataaataaaaagcgagggcgcgggggcagcggcgataaaaaacaaccgcgtggcgaggggaaaaaacagcggagtcacgggggaggaagcctcacttgggaggagaacgaggaccccacacaacggtgggggggggggcgaacaacatagtggggaggaccaaaaccaccactacccacgacaagaagattttataacacgccacaggaggaggacaaatacaaacctcagaggaggggtgattcatgcgcggtggcacacccaacgccgggcatcattattgccggtcgcgcggatgaaaaaagtcgtgcgcaaccacggggagaatttcatatggaccacaacattattatcagccgaggagg

SEQ ID NO: 68539 - DNA, 1466 bp, Homo sapiens
accgaaccccgcccgcgccgggagcatctcgcgtccccaacgggcccccgggtcggtttccgcggtggccatgactgcggccgtgttcttcggctgcgccttcattgccttcgggcctgcgctcgccctttatgtcttcaccatcgccaccgagccgttgcgtatcatcttcctcatcgccggagctttcttctggttggtgtctctactgatttcgtcccttgtttggttcatggcaagagtcattattgacaacaaagatggaccaacacagaaatatctgctgatctttggagcgtttgtctctgtctatatccaagaaatgttccgatttgcatattataaactcttaaaaaaagccagtgaaggtttgaagagtataaacccaggtgagacagcaccctctatgcgactgctggcctatgtttctggcttgggctttggaatcatgagtggagtattttcctttgtgaataccctatctgactccttggggccaggcacagtgggcattcatggagattctcctcaattcttcctttattcagctttcatgacgctggtcattatcttgctgcatgtattctggggcattgtattttttgatggctgtgagaagaaaaagtggggcatcctccttatcgttctcctgacccacctgctggtgtcagcccagaccttcataagttcttattatggaataaacctggcgtcagcatttataatcctggtgctcatgggcacctgggcattcttagctgcgggaggcagctgccgaagcctgaaactctgcctgctctgccaagacaagaactttcttctttacaaccagcgctccagataacctcagggaaccagcacttcccaaaccgcagactacatctttagaggaagcacaactgtgcctttttctgaaaatccctttttctggtggaattgagaaagaaataaaactatgcagatatgcgttccattcaaaaaaaaaaaaacaacaaaaaaaaagggggggggggcgccaaaaaaatatcccccggggggggcaccccatttgggtggcccccctttttttgtgaaaaaggggggcccccaaaagggggggccataaataaaaagcgagggcgcgggggcagcggcgataaaaaacaaccgcgtggcgaggggaaaaaacagcggagtcacgggggaggaagcctcacttgggaggagaacgaggaccccacacaacggtgggggggggggcgaacaacatagtggggaggaccaaaaccaccactacccacgacaagaagattttataacacgccacaggaggaggacaaatacaaacctcagaggaggggtgattcatgcgcggtggcacacccaacgccgggcatcattattgccggtcgcgcggatgaaaaaagtcgtgcgcaaccacggggagaatttcatatggaccacaacattattatcagccgaggagg

SEQ ID NO: 68540 - DNA, 854 bp, Homo sapiens
accgaaccccgcccgcgccgggagcatctcgcgtccccaacgggcccccgggtcggtttccgcggtggccatgactgcggccgtgttcttcggctgcgccttcattgccttcgggcctgcgctcgccctttatgtcttcaccatcgccaccgagccgttgcgtatcatcttcctcatcgccggagctttcttctggttggtgtctctactgatttcgtcccttgtttggttcatggcaagagtcattattgacaacaaagatggaccaacacagaaatatctgctgatctttggagcgtttgtctctgtctatatccaagaaatgttccgatttgcatattataaactcttaaaaaaagccagtgaaggtttgaagagtataaacccaggtgagacagcaccctctatgcgactgctggcctatgctttcatgacgctggtcattatcttgctgcatgtattctggggcattgtattttttgatggctgtgagaagaaaaagtggggcatcctccttatcgttctcctgacccacctgctggtgtcagcccagaccttcataagttcttattatggaataaacctggcgtcagcatttataatcctggtgctcatgggcacctgggcattcttagctgcgggaggcagctgccgaagcctgaaactctgcctgctctgccaagacaagaactttcttctttacaaccagcgctccagataacctcagggaaccagcacttcccaaaccgcagactacatctttagaggaagcacaactgtgcctttttctgaaaatccctttttctggtggaattgagaaagaaataaaactatgcagatatgcgttccattca

SEQ ID NO: 68541 - DNA, 937 bp, Homo sapiens
agtcctgctaattccctgaatcaggccactgccatctcatgcctgcgttgcactgaggacctccagtctggaagctcattttccatatctttacaaagcagatctatcactctgaactgttgtctcgacccgagttttgatagagctttcttctggttggtgtctctactgatttcgtcccttgtttggttcatggcaagagtcattattgacaacaaagatggaccaacacagaaatatctgctgatctttggagcgtttgtctctgtctatatccaagaaatgttccgatttgcatattataaactcttaaaaaaagccagtgaaggtttgaagagtataaacccaggtgagacagcaccctctatgcgactgctggcctatgtttctggcttgggctttggaatcatgagtggagtattttcctttgtgaataccctatctgactccttggggccaggcacagtgggcattcatggagattctcctcaattcttcctttattcagctttcatgacgctggtcattatcttgctgcatgtattctggggcattgtattttttgatggctgtgagaagaaaaagtggggcatcctccttatcgttctcctgacccacctgctggtgtcagcccagaccttcataagttcttattatggaataaacctggcgtcagcatttataatcctggtgctcatgggcacctgggcattcttagctgcgggaggcagctgccgaagcctgaaactctgcctgctctgccaagacaagaactttcttctttacaaccagcgctccagataacctcagggaaccagcacttcccaaaccgcagactacatctttagaggaagcacaactgtgcctttttctgaaaatccctttttctggtggaattgagaaagaaataaaactatgcagatatgcgttccattca

SEQ ID NO: 68542 - DNA, 767 bp, Homo sapiens
gggacccagagccgccgcgggagctcacagcgtccccaggttttataataatcaagaagcacatgaaagaggcctcttcatcaagcattcttgactaagttatgaaaatggaattgaagtttattttcccccttcatatggagtgtctcatttggtattcattccacacaaatgccactgtttcttcaggtgccatgtaacttcagagaaaggcatgagagaagccgggccttcagcaaggatatgggactggctaagaattaagaagaaagaagcctcactttagaactaatggggtcttgtatgtatagcttattcccccactggatagatatggatacttaaacattgagaaatctttattctctacttgaatagttgagaacaaacgatacactcacgaggaggctaaccttacccatgttgtccatatatttaaatgaaattttataataactccatctgttgaaatgggctgtgtgtttttccgcatgactttcccattttatctcatcaacctgaccttgctggcacaaggtacaatcactgtagtatcctgcttgtttcatcaggaagtggagcaatagtttaatttgttaaggaaatcccaaggaatgaactaaagcttgcgttgtgtgttttcccacaaattgtgttttctttgaatttgtggttgtgagggcatatcgctcatcgacacctgatccacaagtattggctgtttgtcaaggaccccgagaatcctgaagttgtcacgtcatagagat

SEQ ID NO: 68543 - DNA, 4511 bp, Homo sapiens
ggctgtacggccgagattatgtatccgccgtggagccgggtgtgggggcaggcgaaggggagggctgcgggtggaaaggggcgagcccctctcgcccgggactgggaagagcggccacggcgccgggcgaggcggcagggcgaggcagtgccatgctgcctttgtgcaaagttgggcggcgggcggcgcgccgcgcgcaggggccccgcacacccgcgaccgcgcgcagccgtggctgctgctgagtggcgggggcccccccgctccccccggcccttgaaggcggagagagctcgcgtctcgctcggcttcagggtaagtccagctgtgagcagagtgttctgttcttcacttccagcaagccagagtttcataaatggacgctgacatggactacgaaagacccaacgttgaaactatcaaatgtgtggtcgtgggtgacaatgccgtggggaagacgcgcttgatctgtgccagggcgtgcaacaccacactcacgcagtatcagctgctggccacccacgtgccaacagtgtgggcgattgaccagtaccgcgtgtgccaggaggtcttggagcgttctcgggatgttgttgatgaagtgagtgtttctctcaggctttgggatacttttggtgatcatcacaaagacagacgctttgcatatggcaggtctgatgttgtggtcctctgtttttcgattgctaatcccaattccctaaatcatgtgaaaagcatgtggtatccagaaatcaagcacttttgccctcgaacacccgttatccttgttgggtgccagcttgatctccgctatgccgacctggaagctgttaatcgagccaggcgcccgttagcaaggcccataaagagaggggatattttgcccccagaaaaaggccgagaggtagcaaaggaacttggcttaccatactatgaaacaagcgtgtttgaccagtttggtatcaaggatgtgtttgacaatgcaatccgagcagcgctgatttcccgcaggcacctgcaattctggaaatcccacctaaagaaagtccagaaacctttacttcaggcacccttcctacctccaaaagcccctccaccggtcatcaaaattccagagtgtccttccatggggacaaatgaagctgcctgtttactggacaatcctctatgtgccgatgttctgttcatccttcaggaccaggaacacatctttgcacatcgaatttacctcgctacctcttcttccaaattttatgatctgtttttaatggaatgtgaagaatccccaaatgggagtgaaggagcctgtgagaaagagaagcagagcagagatttccaggggcggatattgagtgtcgacccagaggaagaaagggaggagggcccgcctaggattcctcaggccgaccagtggaagtcttcaaacaagagcctggtggaggctctggggctggaagccgagggtgcagttcctgagacacagactttgaccggatggagtaaggggttcattggcatgcacagggaaatgcaagtcaaccccatttcaaagcggatggggcccatgactgtggtcaggatggacgcttcagtccagccaggcccttttcggaccctgctccagtttctttatacgggacaactggatgaaaaggaaaaggatttggtgggcctggctcagatcgcagaggtcctcgagatgttcgatttgaggatgatggtggaaaacatcatgaacaaggaagccttcatgaaccaggagattacgaaagcctttcacgtaaggaaagccaatcggataaaagagtgtctcagcaagggaacgttctcggacgtgacatttaaattggacgatggagccatcagtgcccacaagccgctgctgatctgtagctgtgagtggatggcagccatgttcggggggtcatttgtggaaagtgccaacagtgaggtgtatctcccgaacataaacaagatatcaatgcaagcagtattggattatctctataccaagcagttgtctcctaacttggatctggacccgctggaattaattgccttggcaaacagattttgcctgccacacttggttgcacttgcagaacagcatgccgttcaggagttgaccaaagccgccacgagtggcgtgggcattgacggagaagtgctctcttacttggaattggctcagtttcacaatgcccaccagttggccgcctggtgtttgcaccacatctgcaccaactacaacagtgtatgctccaagttccgtaaggaaatcaaatcaaaatctgcagacaaccaggaatacttcgagcggcaccgctggccccctgtgtggtacctgaaggaagaagatcactaccagcgtgtgaaaagggaacgagagaaggaagatattgcactaaataagcatcgctcaagacgaaagtggtgcttctggaattcatctccagcagtggcctgaagaggaagagaaaaaaaacaaaaaacagaaaccaatcggtaatctgatccaccacttttcaaagcactactataaaattcgtcttgttagagatacgacatagttcaggtttcgggcactgatcttcctccacttttgtgcatttatctttgttaggatcaaagcacaagctcaccatcaatgagcctggacaaaaagggaagctgactctcactgcattccttaaactgatatgtatattttttttgttaggaggcttaataaactttagtctgttattttgtttctttttatacaaagaaaaaaaattcagctttcatgtttctgattccagattggaaaatatttttatatggtctgttgtattttgttgaaatgaaaatactgtgtattactttattttacaggccacaattgattatgaagtcaccctgtgattctctttgcccacatgaccaccgagcattattacgtaattagagggttatccttttgttgtgaaaggaaggaggggactgaaatctcccaaagtgcaaattggagagtgtttaatctttgttctgttgaataacatcggtgtaattacaaagtcaactccaagaatgtgtatttacaatatttgccatgttaagtgctggtaattatatggttatatgtgccatgtaaaatatagtgatatcaaatattctgttgtttccaatgtctagtttcaagaggacaatctttataatcattagaagggcttattaaatcccagcattatccagggcaaactcactggtggacctgaatacataagataccattagtgcgctggtgttcggattgctgtattagggtttacatctctcagtattccttgaacttgccatgcttctgcatgcagattcttcactgacttgaattgagatgggcaagggaaaaggtccctggactccctcctgccatctacaggcttgtcacatctcaccaccagaaacaggcttcctcaggcttctcacctgtggccaacttcactttgtaagacccatatttttaactcttcccagggaaaattcatgttgctgcagaagtaggctaaggcagaccacccacttctgctgaaatgcattgggagcctgtgaaagcacaaagctggaggctgggcgcctgcgttctcctacacggaaaggaatctaattccaagagtctaggaaatggtgctattgtgagttcgttctgactctttctcattctgagttttcagtgttaaactaggaagtgtgacagcaggggagctttcgtgaggcagtcagtcattgcttctctgtaaattaaaatgttacagcacacacatacacacacagagagcatttcaaggccacagctccacacctgccatgggatgttaatgtggcagggggtggggctcattctgttgggaggtcaaattaccaatgccaaggactgttgattttgtttttatttttattttttcttctagcttttcagaagatggaaatgagacagttgagtccaaaccccaatgctgacagccatatgcatttgaaaatctatctagattacagatgggcatttattactggcagtggaaacaccagatagaagatcttaggagaggcccagaaatgcatcaccttgtcatgacaaaagagaaggcagtagagtagggatagttacaaatgcatccatcttaattattttcaataggcttgtaaatcttatcgatggaaggagaaaggagacaagatgtggaagaattgacatgtatcccaccataaaatggtagaagatgagttttcaatgagtagtcatagttgaaattttacaaccaaagctcccatttgattgtaatcttgccaaaatataatggatgtataaatgaacttggggtataagcaataatatccactagtgttgttatcagctactgtaaccaagtggctggttcatttggttgatgctgattatggcctttaaccatggtggtttgttgtgtgttttttatttcacaaaaagccaataaaattgtttagctataaaa

SEQ ID NO: 68544 - DNA, 4393 bp, Homo sapiens
ggctgtacggccgagattatgtatccgccgtggagccgggtgtgggggcaggcgaaggggagggctgcgggtggaaaggggcgagcccctctcgcccgggactgggaagagcggccacggcgccgggcgaggcggcagggcgaggcagtgccatgctgcctttgtgcaaagttgggcggcgggcggcgcgccgcgcgcaggggccccgcacacccgcgaccgcgcgcagccgtggctgctgctgagtggcgggggcccccccgctccccccggcccttgaaggcggagagagctcgcgtctcgctcggcttcagggtaagtccagctgtgagcagagtgttctgttcttcacttccagcaagccagagtttcataaatggacgctgacatggactacgaaagacccaacgttgaaactatcaaatgtgtggtcgtgggtgacaatgccgtggggaagacgcgcttgatctgtgccagggcgtgcaacaccacactcacgcagtatcagctgctggccacccacgtgccaacagtgtgggcgattgaccagtaccgcgtgtgccaggaggtcttggagcgttctcgggatgttgttgatgaagtgagtgtttctctcaggctttgggatacttttggtgatcatcacaaagacagacgctttgcatatggcaggtctgatgttgtggtcctctgtttttcgattgctaatcccaattccctaaatcatgtgaaaagcatgtggtatccagaaatcaagcacttttgccctcgaacacccgttatccttgttgggtgccagcttgatctccgctatgccgacctggaagctgttaatcgagccaggcgcccgttagcaaggcccataaagagaggggatattttgcccccagaaaaaggccgagaggtagcaaaggaacttggcttaccatactatgaaacaagcgtgtttgaccagtttggtatcaaggatgtgtttgacaatgcaatccgagcagcgctgatttcccgcaggcacctgcaattctggaaatcccacctaaagaaagtccagaaacctttacttcaggcacccttcctacctccaaaagcccctccaccggtcatcaaaattccagagtgtccttccatggggacaaatgaagctgcctgtttactggacaatcctctatgtgccgatgttctgttcatccttcaggaccaggaacacatctttgcacatcgaatttacctcgctacctcttcttccaaattttatgatctgtttttaatggaatgtgaagaatccccaaatgggagtgaaggagcctgtgagaaagagaagcagagcagagatttccaggggcggatattgagtgtcgacccagaggaagaaagggaggagggcccgcctaggattcctcaggccgaccagtggaagtcttcaaacaagagcctggtggaggctctggggctggaagccgagggtgcagttcctgagacacagactttgaccggatggagtaaggggttcattggcatgcacagggaaatgcaagtcaaccccatttcaaagcggatggggcccatgactgtggtcaggatggacgcttcagtccagccaggcccttttcggaccctgctccagtttctttatacgggacaactggatgaaaaggaaaaggatttggtgggcctggctcagatcgcagaggtcctcgagatgttcgatttgaggatgatggtggaaaacatcatgaacaaggaagccttcatgaaccaggagattacgaaagcctttcacgtaaggaaagccaatcggataaaagagtgtctcagcaagggaacgttctcggacgtgacatttaaattggacgatggagccatcagtgcccacaagccgctgctgatctgtagctgtgagtggatggcagccatgttcggggggtcatttgtggaaagtgccaacagtgaggtgtatctcccgaacataaacaagatatcaatgcaagcagtattggattatctctataccaagcagttgtctcctaacttggatctggacccgctggaattaattgccttggcaaacagattttgcctgccacacttggttgcacttgcagaacagcatgccgttcaggagttgaccaaagccgccacgagtggcgtgggcattgacggagaagtgctctcttacttggaattggctcagtttcacaatgcccaccagttggccgcctggtgtttgcaccacatctgcaccaactacaacagtgtatgctccaagttccgtaaggaaatcaaatcaaaatctgcagacaaccaggaatacttcgagcggcaccgctggccccctgtgtggtacctgaaggaagaagatcactaccagcgtgtgaaaagggaacgagagaaggaagatattgcactaaataagcatcgctcaagacgaaagtggtgcttctggaattcatctccagcagtggcctgaagaggaagagaaaaaaaacaaaaaacagaaaccaatcggatcaaagcacaagctcaccatcaatgagcctggacaaaaagggaagctgactctcactgcattccttaaactgatatgtatattttttttgttaggaggcttaataaactttagtctgttattttgtttctttttatacaaagaaaaaaaattcagctttcatgtttctgattccagattggaaaatatttttatatggtctgttgtattttgttgaaatgaaaatactgtgtattactttattttacaggccacaattgattatgaagtcaccctgtgattctctttgcccacatgaccaccgagcattattacgtaattagagggttatccttttgttgtgaaaggaaggaggggactgaaatctcccaaagtgcaaattggagagtgtttaatctttgttctgttgaataacatcggtgtaattacaaagtcaactccaagaatgtgtatttacaatatttgccatgttaagtgctggtaattatatggttatatgtgccatgtaaaatatagtgatatcaaatattctgttgtttccaatgtctagtttcaagaggacaatctttataatcattagaagggcttattaaatcccagcattatccagggcaaactcactggtggacctgaatacataagataccattagtgcgctggtgttcggattgctgtattagggtttacatctctcagtattccttgaacttgccatgcttctgcatgcagattcttcactgacttgaattgagatgggcaagggaaaaggtccctggactccctcctgccatctacaggcttgtcacatctcaccaccagaaacaggcttcctcaggcttctcacctgtggccaacttcactttgtaagacccatatttttaactcttcccagggaaaattcatgttgctgcagaagtaggctaaggcagaccacccacttctgctgaaatgcattgggagcctgtgaaagcacaaagctggaggctgggcgcctgcgttctcctacacggaaaggaatctaattccaagagtctaggaaatggtgctattgtgagttcgttctgactctttctcattctgagttttcagtgttaaactaggaagtgtgacagcaggggagctttcgtgaggcagtcagtcattgcttctctgtaaattaaaatgttacagcacacacatacacacacagagagcatttcaaggccacagctccacacctgccatgggatgttaatgtggcagggggtggggctcattctgttgggaggtcaaattaccaatgccaaggactgttgattttgtttttatttttattttttcttctagcttttcagaagatggaaatgagacagttgagtccaaaccccaatgctgacagccatatgcatttgaaaatctatctagattacagatgggcatttattactggcagtggaaacaccagatagaagatcttaggagaggcccagaaatgcatcaccttgtcatgacaaaagagaaggcagtagagtagggatagttacaaatgcatccatcttaattattttcaataggcttgtaaatcttatcgatggaaggagaaaggagacaagatgtggaagaattgacatgtatcccaccataaaatggtagaagatgagttttcaatgagtagtcatagttgaaattttacaaccaaagctcccatttgattgtaatcttgccaaaatataatggatgtataaatgaacttggggtataagcaataatatccactagtgttgttatcagctactgtaaccaagtggctggttcatttggttgatgctgattatggcctttaaccatggtggtttgttgtgtgttttttatttcacaaaaagccaataaaattgtttagctataaaa

SEQ ID NO: 68545 - DNA, 4264 bp, Homo sapiens
gctggacgtgccacactggggtcttctgaaagtaggcgcagcatctgcagctcctcatgcccggccctaaggttttataataatcaagaagcacatgaaagaggcctcttcatcaagcattcttgactaagttatgaaaatggaattgaagtttattttcccccttcatatggtaagtccagctgtgagcagagtgttctgttcttcacttccagcaagccagagtttcataaatggacgctgacatggactacgaaagacccaacgttgaaactatcaaatgtgtggtcgtgggtgacaatgccgtggggaagacgcgcttgatctgtgccagggcgtgcaacaccacactcacgcagtatcagctgctggccacccacgtgccaacagtgtgggcgattgaccagtaccgcgtgtgccaggaggtctgatgttgtggtcctctgtttttcgattgctaatcccaattccctaaatcatgtgaaaagcatgtggtatccagaaatcaagcacttttgccctcgaacacccgttatccttgttgggtgccagcttgatctccgctatgccgacctggaagctgttaatcgagccaggcgcccgttagcaaggcccataaagagaggggatattttgcccccagaaaaaggccgagaggtagcaaaggaacttggcttaccatactatgaaacaagcgtgtttgaccagtttggtatcaaggatgtgtttgacaatgcaatccgagcagcgctgatttcccgcaggcacctgcaattctggaaatcccacctaaagaaagtccagaaacctttacttcaggcacccttcctacctccaaaagcccctccaccggtcatcaaaattccagagtgtccttccatggggacaaatgaagctgcctgtttactggacaatcctctatgtgccgatgttctgttcatccttcaggaccaggaacacatctttgcacatcgaatttacctcgctacctcttcttccaaattttatgatctgtttttaatggaatgtgaagaatccccaaatgggagtgaaggagcctgtgagaaagagaagcagagcagagatttccaggggcggatattgagtgtcgacccagaggaagaaagggaggagggcccgcctaggattcctcaggccgaccagtggaagtcttcaaacaagagcctggtggaggctctggggctggaagccgagggtgcagttcctgagacacagactttgaccggatggagtaaggggttcattggcatgcacagggaaatgcaagtcaaccccatttcaaagcggatggggcccatgactgtggtcaggatggacgcttcagtccagccaggcccttttcggaccctgctccagtttctttatacgggacaactggatgaaaaggaaaaggatttggtgggcctggctcagatcgcagaggtcctcgagatgttcgatttgaggatgatggtggaaaacatcatgaacaaggaagccttcatgaaccaggagattacgaaagcctttcacgtaaggaaagccaatcggataaaagagtgtctcagcaagggaacgttctcggacgtgacatttaaattggacgatggagccatcagtgcccacaagccgctgctgatctgtagctgtgagtggatggcagccatgttcggggggtcatttgtggaaagtgccaacagtgaggtgtatctcccgaacataaacaagatatcaatgcaagcagtattggattatctctataccaagcagttgtctcctaacttggatctggacccgctggaattaattgccttggcaaacagattttgcctgccacacttggttgcacttgcagaacagcatgccgttcaggagttgaccaaagccgccacgagtggcgtgggcattgacggagaagtgctctcttacttggaattggctcagtttcacaatgcccaccagttggccgcctggtgtttgcaccacatctgcaccaactacaacagtgtatgctccaagttccgtaaggaaatcaaatcaaaatctgcagacaaccaggaatacttcgagcggcaccgctggccccctgtgtggtacctgaaggaagaagatcactaccagcgtgtgaaaagggaacgagagaaggaagatattgcactaaataagcatcgctcaagacgaaagtggtgcttctggaattcatctccagcagtggcctgaagaggaagagaaaaaaaacaaaaaacagaaaccaatcggtaatctgatccaccacttttcaaagcactactataaaattcgtcttgttagagatacgacatagttcaggtttcgggcactgatcttcctccacttttgtgcatttatctttgttaggatcaaagcacaagctcaccatcaatgagcctggacaaaaagggaagctgactctcactgcattccttaaactgatatgtatattttttttgttaggaggcttaataaactttagtctgttattttgtttctttttatacaaagaaaaaaaattcagctttcatgtttctgattccagattggaaaatatttttatatggtctgttgtattttgttgaaatgaaaatactgtgtattactttattttacaggccacaattgattatgaagtcaccctgtgattctctttgcccacatgaccaccgagcattattacgtaattagagggttatccttttgttgtgaaaggaaggaggggactgaaatctcccaaagtgcaaattggagagtgtttaatctttgttctgttgaataacatcggtgtaattacaaagtcaactccaagaatgtgtatttacaatatttgccatgttaagtgctggtaattatatggttatatgtgccatgtaaaatatagtgatatcaaatattctgttgtttccaatgtctagtttcaagaggacaatctttataatcattagaagggcttattaaatcccagcattatccagggcaaactcactggtggacctgaatacataagataccattagtgcgctggtgttcggattgctgtattagggtttacatctctcagtattccttgaacttgccatgcttctgcatgcagattcttcactgacttgaattgagatgggcaagggaaaaggtccctggactccctcctgccatctacaggcttgtcacatctcaccaccagaaacaggcttcctcaggcttctcacctgtggccaacttcactttgtaagacccatatttttaactcttcccagggaaaattcatgttgctgcagaagtaggctaaggcagaccacccacttctgctgaaatgcattgggagcctgtgaaagcacaaagctggaggctgggcgcctgcgttctcctacacggaaaggaatctaattccaagagtctaggaaatggtgctattgtgagttcgttctgactctttctcattctgagttttcagtgttaaactaggaagtgtgacagcaggggagctttcgtgaggcagtcagtcattgcttctctgtaaattaaaatgttacagcacacacatacacacacagagagcatttcaaggccacagctccacacctgccatgggatgttaatgtggcagggggtggggctcattctgttgggaggtcaaattaccaatgccaaggactgttgattttgtttttatttttattttttcttctagcttttcagaagatggaaatgagacagttgagtccaaaccccaatgctgacagccatatgcatttgaaaatctatctagattacagatgggcatttattactggcagtggaaacaccagatagaagatcttaggagaggcccagaaatgcatcaccttgtcatgacaaaagagaaggcagtagagtagggatagttacaaatgcatccatcttaattattttcaataggcttgtaaatcttatcgatggaaggagaaaggagacaagatgtggaagaattgacatgtatcccaccataaaatggtagaagatgagttttcaatgagtagtcatagttgaaattttacaaccaaagctcccatttgattgtaatcttgccaaaatataatggatgtataaatgaacttggggtataagcaataatatccactagtgttgttatcagctactgtaaccaagtggctggttcatttggttgatgctgattatggcctttaaccatggtggtttgttgtgtgttttttatttcacaaaaagccaataaaattgtttagctataaaa

SEQ ID NO: 68546 - DNA, 4653 bp, Homo sapiens
ggctgtacggccgagattatgtatccgccgtggagccgggtgtgggggcaggcgaaggggagggctgcgggtggaaaggggcgagcccctctcgcccgggactgggaagagcggccacggcgccgggcgaggcggcagggcgaggcagtgccatgctgcctttgtgcaaagttgggcggcgggcggcgcgccgcgcgcaggggccccgcacacccgcgaccgcgcgcagccgtggctgctgctgagtggcgggggcccccccgctccccccggcccttgaaggcggagagagctcgcgtctcgctcggcttcagggtaagtccagctgtgagcagagtgttctgttcttcacttccagcaagccagagtttcataaatggacgctgacatggactacgaaagacccaacgttgaaactatcaaatgtgtggtcgtgggtgacaatgccgtggggaagacgcgcttgatctgtgccagggcgtgcaacaccacactcacgcagtatcagctgctggccacccacgtgccaacagtgtgggcgattgaccagtaccgcgtgtgccaggaggtcttggagcgttctcgggatgttgttgatgaagtgagtgtttctctcaggctttgggatacttttggtgatcatcacaaagacagacgctttgcatatggcaggtctgatgttgtggtcctctgtttttcgattgctaatcccaattccctaaatcatgtgaaaagcatgtggtatccagaaatcaagcacttttgccctcgaacacccgttatccttgttgggtgccagcttgatctccgctatgccgacctggaagctgttaatcgagccaggcgcccgttagcaaggcccataaagagaggggatattttgcccccagaaaaaggccgagaggtagcaaaggaacttggcttaccatactatgaaacaagcgtgtttgaccagtttggtatcaaggatgtgtttgacaatgcaatccgagcagcgctgatttcccgcaggcacctgcaattctggaaatcccacctaaagaaagtccagaaacctttacttcaggcacccttcctacctccaaaagcccctccaccggtcatcaaaattccagagtgtccttccatggggacaaatgaagctgcctgtttactggacaatcctctatgtgccgatgttctgttcatccttcaggaccaggaacacatctttgcacatcgaatttacctcgctacctcttcttccaaattttatgatctgtttttaatggaatgtgaagaatccccaaatgggagtgaaggagcctgtgagaaagagaagcagagcagagatttccaggggcggatattgagtgtcgacccagaggaagaaagggaggagggcccgcctaggattcctcaggccgaccagtggaagtcttcaaacaagagcctggtggaggctctggggctggaagccgagggtgcagttcctgagacacagactttgaccggatggagtaaggggttcattggcatgcacagggaaatgcaagtcaaccccatttcaaagcggatggggcccatgactgtggtcaggatggacgcttcagtccagccaggcccttttcggaccctgctccagtttctttatacgggacaactggatgaaaaggaaaaggatttggtgggcctggctcagatcgcagaggtcctcgagatgttcgatttgaggatgatggtggaaaacatcatgaacaaggaagccttcatgaaccaggagattacgaaagcctttcacgtaaggaaagccaatcggataaaagagtgtctcagcaagggaacgttctcggacgtgacatttaaattggacgatggagccatcagtgcccacaagccgctgctgatctgtagctgtgagtggatggcagccatgttcggggggtcatttgtggaaagtgccaacagtgaggtgtatctcccgaacataaacaagatatcaatgcaagcagtattggattatctctataccaagcagttgtctcctaacttggatctggacccgctggaattaattgccttggcaaacagattttgcctgccacacttggttgcacttgcagaacagcatgccgttcaggagttgaccaaagccgccacgagtggcgtgggcattgacggagaagtgctctcttacttggaattggctcagtttcacaatgcccaccagttggccgcctggtgtttgcaccacatctgcaccaactacaacagtgtatgctccaagttccgtaaggaaatcaaatcaaaatctgcaggtgagactgtgtgaggcccccattcatccagctctcctcacctctcatggaagcttttatcttctatgtccctggaaaggaacatggtcagcaggcagctcatggatgattcctcgagactggctggtggtcacatattaatacaaccaggaatacttcgagcggcaccgctggccccctgtgtggtacctgaaggaagaagatcactaccagcgtgtgaaaagggaacgagagaaggaagatattgcactaaataagcatcgctcaagacgaaagtggtgcttctggaattcatctccagcagtggcctgaagaggaagagaaaaaaaacaaaaaacagaaaccaatcggtaatctgatccaccacttttcaaagcactactataaaattcgtcttgttagagatacgacatagttcaggtttcgggcactgatcttcctccacttttgtgcatttatctttgttaggatcaaagcacaagctcaccatcaatgagcctggacaaaaagggaagctgactctcactgcattccttaaactgatatgtatattttttttgttaggaggcttaataaactttagtctgttattttgtttctttttatacaaagaaaaaaaattcagctttcatgtttctgattccagattggaaaatatttttatatggtctgttgtattttgttgaaatgaaaatactgtgtattactttattttacaggccacaattgattatgaagtcaccctgtgattctctttgcccacatgaccaccgagcattattacgtaattagagggttatccttttgttgtgaaaggaaggaggggactgaaatctcccaaagtgcaaattggagagtgtttaatctttgttctgttgaataacatcggtgtaattacaaagtcaactccaagaatgtgtatttacaatatttgccatgttaagtgctggtaattatatggttatatgtgccatgtaaaatatagtgatatcaaatattctgttgtttccaatgtctagtttcaagaggacaatctttataatcattagaagggcttattaaatcccagcattatccagggcaaactcactggtggacctgaatacataagataccattagtgcgctggtgttcggattgctgtattagggtttacatctctcagtattccttgaacttgccatgcttctgcatgcagattcttcactgacttgaattgagatgggcaagggaaaaggtccctggactccctcctgccatctacaggcttgtcacatctcaccaccagaaacaggcttcctcaggcttctcacctgtggccaacttcactttgtaagacccatatttttaactcttcccagggaaaattcatgttgctgcagaagtaggctaaggcagaccacccacttctgctgaaatgcattgggagcctgtgaaagcacaaagctggaggctgggcgcctgcgttctcctacacggaaaggaatctaattccaagagtctaggaaatggtgctattgtgagttcgttctgactctttctcattctgagttttcagtgttaaactaggaagtgtgacagcaggggagctttcgtgaggcagtcagtcattgcttctctgtaaattaaaatgttacagcacacacatacacacacagagagcatttcaaggccacagctccacacctgccatgggatgttaatgtggcagggggtggggctcattctgttgggaggtcaaattaccaatgccaaggactgttgattttgtttttatttttattttttcttctagcttttcagaagatggaaatgagacagttgagtccaaaccccaatgctgacagccatatgcatttgaaaatctatctagattacagatgggcatttattactggcagtggaaacaccagatagaagatcttaggagaggcccagaaatgcatcaccttgtcatgacaaaagagaaggcagtagagtagggatagttacaaatgcatccatcttaattattttcaataggcttgtaaatcttatcgatggaaggagaaaggagacaagatgtggaagaattgacatgtatcccaccataaaatggtagaagatgagttttcaatgagtagtcatagttgaaattttacaaccaaagctcccatttgattgtaatcttgccaaaatataatggatgtataaatgaacttggggtataagcaataatatccactagtgttgttatcagctactgtaaccaagtggctggttcatttggttgatgctgattatggcctttaaccatggtggtttgttgtgtgttttttatttcacaaaaagccaataaaattgtttagctataaaa

SEQ ID NO: 68547 - DNA, 4457 bp, Homo sapiens
ggctgtacggccgagattatgtatccgccgtggagccgggtgtgggggcaggcgaaggggagggctgcgggtggaaaggggcgagcccctctcgcccgggactgggaagagcggccacggcgccgggcgaggcggcagggcgaggcagtgccatgctgcctttgtgcaaagttgggcggcgggcggcgcgccgcgcgcaggggccccgcacacccgcgaccgcgcgcagccgtggctgctgctgagtggcgggggcccccccgctccccccggcccttgaaggcggagagagctcgcgtctcgctcggcttcagggtaagtccagctgtgagcagagtgttctgttcttcacttccagcaagccagagtttcataaatggacgctgacatggactacgaaagacccaacgttgaaactatcaaatgtgtggtcgtgggtgacaatgccgtggggaagacgcgcttgatctgtgccagggcgtgcaacaccacactcacgcagtatcagctgctggccacccacgtgccaacagtgtgggcgattgaccagtaccgcgtgtgccaggaggtcttggagcgttctcgggatgttgttgatgaagtgagtgtttctctcaggctttgggatacttttggtgatcatcacaaagacagacgctttgcatatggcaggtctgatgttgtggtcctctgtttttcgattgctaatcccaattccctaaatcatgtgaaaagcatgtggtatccagaaatcaagcacttttgccctcgaacacccgttatccttgttgggtgccagcttgatctccgctatgccgacctggaagctgttaatcgagccaggcgcccgttagcaaggcccataaagagaggggatattttgcccccagaaaaaggccgagaggtagcaaaggaacttggcttaccatactatgaaacaagcgtgtttgaccagtttggtatcaaggatgtgtttgacaatgcaatccgagcagcgctgatttcccgcaggcacctgcaattctggaaatcccacctaaagaaagtccagaaacctttacttcaggcacccttcctacctccaaaagcccctccaccggtcatcaaaattccagagtgtccttccatggggacaaatgaagctgcctgtttactggacaatcctctatgtgccgatgttctgttcatccttcaggaccaggaacacatctttgcacatcgaatttacctcgctacctcttcttccaaattttatgatctgtttttaatggaatgtgaagaatccccaaatgggagtgaaggagcctgtgagaaagagaagcagagcagagatttccaggggcggatattgagtgtcgacccagaggaagaaagggaggagggcccgcctaggattcctcaggccgaccagtggaagtcttcaaacaagagcctggtggaggctctggggctggaagccgagggtgcagttcctgagacacagactttgaccggatggagtaaggggttcattggcatgcacagggaaatgcaagtcaaccccatttcaaagcggatggggcccatgactgtggtcaggatggacgcttcagtccagccaggcccttttcggaccctgctccagtttctttatacgggacaactggatgaaaaggaaaaggatttggtgggcctggctcagatcgcagaggtcctcgagatgttcgatttgaggatgatggtggaaaacatcatgaacaaggaagccttcatgaaccaggagattacgaaagcctttcacgtaaggaaagccaatcggataaaagagtgtctcagcaagggaacgttctcggacgtgacatttaaattggacgatggagccatcagtgcccacaagccgctgctgatctgtagctgtgagtggatggcagccatgttcggggggtcatttgtggaaagtgccaacagtgaggtgtatctcccgaacataaacaagatatcaatgcaagcagtattggattatctctataccaagcagttgtctcctaacttggatctggacccgctggaattaattgccttggcaaacagattttgcctgccacacttggttgcacttgcagaacagcatgccgttcaggagttgaccaaagccgccacgagtggcgtgggcattgacggagaagtgctctcttacttggaattggctcagtttcacaatgcccaccagttggccgcctggtgtttgcaccacatctgcaccaactacaacagtgtatgctccaagttccgtaaggaaatcaaatcaaaatctgcagacaaccaggaatacttcgagcggcaccgctggccccctgtgtggtacctgaaggaagaagatcactaccagcgtgtgaaaagggaacgagagaaggaagatattgcactaaataagcatcgctcaagacgaaagtggtgcttctggaattcatctccagcagtggcctgaagaggaagagaaaaaaaacaaaaaacagaaaccaatcggtaatctgatccaccacttttcaaagcactactataaaattcgtcttgttagagatacgacatagttcaggtttcgggcactgatcttcctccacttttgtgcatttatctttgttaggatcaaagcacaagctcaccatcaatgagcctggacaaaaagggaagctgactctcactgcattccttaaactgatatgtatattttttttgttaggaggcttaataaactttagtctgttattttgtttctttttatacaaagaaaaaaaattcagctttcatgtttctgattccagattggaaaatatttttatatggtctgttgtattttgttgaaatgaaaatactgtgtattactttattttacaggccacaattgattatgaagtcaccctgtgattctctttgcccacatgaccaccgagcattattacgtaattagagggttatccttttgttgtgaaaggaaggaggggactgaaatctcccaaagtgcaaattggagagtgtttaatctttgttctgttgaataacatcggtgtaattacaaagtcaactccaagaatgtgtatttacaatatttgccatgttaagtgctggtaattatatggttatatgtgccatgtaaaatatagtgatatcaaatattctgttgtttccaatgtctagtttcaagaggacaatctttataatcattagaagggcttattaaatcccagcattatccagggcaaactcactggtggacctgaatacataagataccattagtgcgctggtgttcggattgctgtattagggtttacatctctcagtattccttgaacttgccatgcttctgcatgcagattcttcactgacttgaattgagatgggcaagggaaaaggtccctggactccctcctgccatctacaggcttgtcacatctcaccaccagaaacaggcttcctcaggcttctcacctgtggccaacttcactttgtaagacccatatttttaactcttcccagggatgcattgggagcctgtgaaagcacaaagctggaggctgggcgcctgcgttctcctacacggaaaggaatctaattccaagagtctaggaaatggtgctattgtgagttcgttctgactctttctcattctgagttttcagtgttaaactaggaagtgtgacagcaggggagctttcgtgaggcagtcagtcattgcttctctgtaaattaaaatgttacagcacacacatacacacacagagagcatttcaaggccacagctccacacctgccatgggatgttaatgtggcagggggtggggctcattctgttgggaggtcaaattaccaatgccaaggactgttgattttgtttttatttttattttttcttctagcttttcagaagatggaaatgagacagttgagtccaaaccccaatgctgacagccatatgcatttgaaaatctatctagattacagatgggcatttattactggcagtggaaacaccagatagaagatcttaggagaggcccagaaatgcatcaccttgtcatgacaaaagagaaggcagtagagtagggatagttacaaatgcatccatcttaattattttcaataggcttgtaaatcttatcgatggaaggagaaaggagacaagatgtggaagaattgacatgtatcccaccataaaatggtagaagatgagttttcaatgagtagtcatagttgaaattttacaaccaaagctcccatttgattgtaatcttgccaaaatataatggatgtataaatgaacttggggtataagcaataatatccactagtgttgttatcagctactgtaaccaagtggctggttcatttggttgatgctgattatggcctttaaccatggtggtttgttgtgtgttttttatttcacaaaaagccaataaaattgtttagctataaaa

SEQ ID NO: 68548 - DNA, 5034 bp, Homo sapiens
ggctgtacggccgagattatgtatccgccgtggagccgggtgtgggggcaggcgaaggggagggctgcgggtggaaaggggcgagcccctctcgcccgggactgggaagagcggccacggcgccgggcgaggcggcagggcgaggcagtgccatgctgcctttgtgcaaagttgggcggcgggcggcgcgccgcgcgcaggggccccgcacacccgcgaccgcgcgcagccgtggctgctgctgagtggcgggggcccccccgctccccccggcccttgaaggcggagagagctcgcgtctcgctcggcttcagggtaagtccagctgtgagcagagtgttctgttcttcacttccagcaagccagagtttcataaatggacgctgacatggactacgaaagacccaacgttgaaactatcaaatgtgtggtcgtgggtgacaatgccgtggggaagacgcgcttgatctgtgccagggcgtgcaacaccacactcacgcagtatcagctgctggccacccacgtgccaacagtgtgggcgattgaccagtaccgcgtgtgccaggaggtcttggagcgttctcgggatgttgttgatgaagtgagtgtttctctcaggctttgggatacttttggtgatcatcacaaagacagacgctttgcatatggcaggtctgatgttgtggtcctctgtttttcgattgctaatcccaattccctaaatcatgtgaaaagcatgtggtatccagaaatcaagcacttttgccctcgaacacccgttatccttgttgggtgccagcttgatctccgctatgccgacctggaagctgttaatcgagccaggcgcccgttagcaaggcccataaagagaggggatattttgcccccagaaaaaggccgagaggtagcaaaggaacttggcttaccatactatgaaacaagcgtgtttgaccagtttggtatcaaggatgtgtttgacaatgcaatccgagcagcgctgatttcccgcaggcacctgcaattctggaaatcccacctaaagaaagtccagaaacctttacttcaggcacccttcctacctccaaaagcccctccaccggtcatcaaaattccagagtgtccttccatggggacaaatgaagctgcctgtttactggacaatcctctatgtgccgatgttctgttcatccttcaggaccaggaacacatctttgcacatcgaatttacctcgctacctcttcttccaaattttatgatctgtttttaatggaatgtgaagaatccccaaatgggagtgaaggagcctgtgagaaagagaagcagagcagagatttccaggggcggatattgagtgtcgacccagaggaagaaagggaggagggcccgcctaggattcctcaggccgaccagtggaagtcttcaaacaagagcctggtggaggctctggggctggaagccgagggtgcagttcctgagacacagactttgaccggatggagtaaggggttcattggcatgcacagggaaatgcaagtcaaccccatttcaaagcggatggggcccatgactgtggtcaggatggacgcttcagtccagccaggcccttttcggaccctgctccagtttctttatacgggacaactggatgaaaaggaaaaggatttggtgggcctggctcagatcgcagaggtcctcgagatgttcgatttgaggatgatggtggaaaacatcatgaacaaggaagccttcatgaaccaggagattacgaaagcctttcacgtaaggaaagccaatcggataaaagagtgtctcagcaagggaacgttctcggacgtgacatttaaattggacgatggagccatcagtgcccacaagccgctgctgatctgtagctgtgagtggatggcagccatgttcggggggtcatttgtggaaagtgccaacagtgaggtgtatctcccgaacataaacaagatatcaatgcaagcagtattggattatctctataccaagcagttgtctcctaacttggatctggacccgctggaattaattgccttggcaaacagattttgcctgccacacttggttgcacttgcagaacagcatgccgttcaggagttgaccaaagccgccacgagtggcgtgggcattgacggagaagtgctctcttacttggaattggctcagtttcacaatgcccaccagttggccgcctggtgtttgcaccacatctgcaccaactacaacagtgtatgctccaagttccgtaaggaaatcaaatcaaaatctgcagacaaccaggaatacttcgagcggcaccgctggccccctgtgtggtacctgaaggaagaagatcactaccagcgtgtgaaaagggaacgagagaaggaagatattgcactaaataagcatcgctcaagacgaaagtggtgcttctggaattcatctccagcagtggcctgaagaggaagagaaaaaaaacaaaaaacagaaaccaatcggtaatctgatccaccacttttcaaagcactactataaaattcgtcttgttagagatacgacatagttcaggtttcgggcactgatcttcctccacttttgtgcatttatctttgttaggatcaaagcacaagctcaccatcaatgagcctggacaaaaagggaagctgactctcactgcattccttaaactgatatgtatattttttttgttaggaggcttaataaactttagtctgttattttgtttctttttatacaaagaaaaaaaattcagctttcatgtttctgattccagattggaaaatatttttatatggtctgttgtattttgttgaaatgaaaatactgtgtattactttattttacaggccacaattgattatgaagtcaccctgtgattctctttgcccacatgaccaccgagcattattacgtaattagagggttatccttttgttgtgaaaggaaggaggggactgaaatctcccaaagtgcaaattggagagtgtttaatctttgttctgttgaataacatcggtgtaattacaaagtcaactccaagaatgtgtatttacaatatttgccatgttaagtgctggtaattatatggttatatgtgccatgtaaaatatagtgatatcaaatattctgttgtttccaatgtctagtttcaagaggacaatctttataatcattagaagggcttattaaatcccagcattatccagggcaaactcactggtggacctgaatacataagataccattagtgcgctggtgttcggattgctgtattagggtttacatctctcagtattccttgaacttgccatgcttctgcatgcagattcttcactgacttgaattgagatgggcaagggaaaaggtccctggactccctcctgccatctacaggcttgtcacatctcaccaccagaaacaggcttcctcaggcttctcacctgtggccaacttcactttgtaagacccatatttttaactcttcccagggaaaattcatgttgctgcagaagtaggctaaggcagaccacccacttctgctgaaatgcattgggagcctgtgaaagcacaaagctggaggctgggcgcctgcgttctcctacacggaaaggaatctaattccaagagtctaggaaatggtgctattgtgagttcgttctgactctttctcattctgagttttcagtgttaaactaggaagtgtgacagcaggggagctttcgtgaggcagtcagtcattgcttctctgtaaattaaaatgttacagcacacacatacacacacagagagcatttcaaggccacagctccacacctgccatgggatgttaatgtggcagggggtggggctcattctgttgggaggtcaaattaccaatgccaaggactgttgattttgtttttatttttattttttcttctagcttttcagaagatggaaatgagacagttgagtccaaaccccaatgctgacagccatatgcatttgaaaatctatctagattacagatgggcatttattactggcagtggaaacaccagatagaagatcttaggagaggcccagaaatgcatcaccttgtcatgacaaaagagaaggcagtagagtagggatagttacaaatgcatccatcttaattattttcaataggcttgtaaatcttatcgatggaaggagaaaggagacaagatgtggaagaattgacatgtatcccaccataaaatggtagaagatgagttttcaatgagtagtcatagttgaaattttacaaccaaagctcccatttgattgtaatcttgccaaaatataatggatgtataaatgaacttggggtataagcaataatatccactagtgttgttatcagctactgtaaccaagtggctggttcatttggttgatgctgattatggcctttaaccatggtggtttgttgtgtgttttttatttcacaaaaagccaataaaattgtttagctataaaaaaaaaaaaaaaaaaaacacaacaaaacaacaaaaaccaaaaaacaagaaaaaaaaaaagaacaacaagaaaaaaaagggaggaggggcggcacatcaagagccccacaagaggagacacgagcatgcgaacgcacacaccgactttatggacacacaaggtcgcccccataggaaggcccagcatatcaaacgcactacgacgcagcgaccgcgatagaaaaaagacaaagcacaggcagagaccaaacgtgcagaagacagagaaacatgaaggaaacagaagacaaccacaaccagtggggggaggacacaaacacaccagtcgggcaaaacaaaaccccccacgacgaagatgcacgcagaacgcaccgcgaagaagaggacgacataaaacactaccccagacgacgacgcaccggggggcacagcaaaaacacgcagacaataaacggcggagcaaaaagaaaaaagtgatgacagcgaagacgagacgaaagcgacgcacacaaaaactatacaagg

SEQ ID NO: 68549 - DNA, 2531 bp, Homo sapiens
ggctgtacggccgagattatgtatccgccgtggagccgggtgtgggggcaggcgaaggggagggctgcgggtggaaaggggcgagcccctctcgcccgggactgggaagagcggccacggcgccgggcgaggcggcagggcgaggcagtgccatgctgcctttgtgcaaagttgggcggcgggcggcgcgccgcgcgcaggggccccgcacacccgcgaccgcgcgcagccgtggctgctgctgagtggcgggggcccccccgctccccccggcccttgaaggcggagagagctcgcgtctcgctcggcttcagggtaagtccagctgtgagcagagtgttctgttcttcacttccagcaagccagagtttcataaatggacgctgacatggactacgaaagacccaacgttgaaactatcaaatgtgtggtcgtgggtgacaatgccgtggggaagacgcgcttgatctgtgccagggcgtgcaacaccacactcacgcagtatcagctgctggccacccacgtgccaacagtgtgggcgattgaccagtaccgcgtgtgccaggaggtcttggagcgttctcgggatgttgttgatgaagtgagtgtttctctcaggctttgggatacttttggtgatcatcacaaagacagacgctttgcatatggcaggtctgatgttgtggtcctctgtttttcgattgctaatcccaattccctaaatcatgtgaaaagcatgtggtatccagaaatcaagcacttttgccctcgaacacccgttatccttgttgggtgccagcttgatctccgctatgccgacctggaagctgttaatcgagccaggcgcccgttagcaaggcccataaagagaggggatattttgcccccagaaaaaggccgagaggtagcaaaggaacttggcttaccatactatgaaacaagcgtgtttgaccagtttggtatcaaggatgtgtttgacaatgcaatccgagcagcgctgatttcccgcaggcacctgcaattctggaaatcccacctaaagaaagtccagaaacctttacttcaggcacccttcctacctccaaaagcccctccaccggtcatcaaaattccagagtgtccttccatggggacaaatgaagctgcctgtttactggacaatcctctatgtgccgatgttctgttcatccttcaggaccaggaacacatctttgcacatcgaatttacctcgctacctcttcttccaaattttatgatctgtttttaatggaatgtgaagaatccccaaatgggagtgaaggagcctgtgagaaagagaagcagagcagagatttccaggggcggatattgagtgtcgacccagaggaagaaagggaggagggcccgcctaggattcctcaggccgaccagtggaagtcttcaaacaagagcctggtggaggctctggggctggaagccgagggtgcagttcctgagacacagactttgaccggatggagtaaggggttcattggcatgcacagggaaatgcaagtcaaccccatttcaaagcggatggggcccatgactgtggtcaggatggacgcttcagtccagccaggcccttttcggaccctgctccagtttctttatacgggacaactggatgaaaaggaaaaggatttggtgggcctggctcagatcgcagaggtcctcgagatgttcgatttgaggatgatggtggaaaacatcatgaacaaggaagccttcatgaaccaggagattacgaaagcctttcacgtaaggaaagccaatcggataaaagagtgtctcagcaagggaacgttctcggacgtgacatttaaattggacgatggagccatcagtgcccacaagccgctgctgatctgtagctgtgagtggatggcagccatgttcggggggtcatttgtggaaagtgccaacagtgaggtgtatctcccgaacataaacaagatatcaatgcaagcagtattggattatctctataccaagcagttgtctcctaacttggatctggacccgctggaattaattgccttggcaaacagattttgcctgccacacttggttgcacttgcagaacagcatgccgttcaggagttgaccaaagccgccacgagtggcgtgggcattgacggagaagtgctctcttacttggaattggctcagtttcacaatgcccaccagttggccgcctggtgtttgcaccacatctgcaccaactacaacagtgtatgctccaagttccgtaaggaaatcaaatcaaaatctgcaggtgagactgtgtgaggcccccattcatccagctctcctcacctctcatggaagcttttatcttctatgtccctggaaaggaacatggtcagcaggcagctcatggatgattcctcgagactggctggtggtcacatattaatgtgagatgacataaggaattgaaggctgggaattgtctttggagaacttgatgatgaggggagttgggtgggctagagtccagggtgccctg

SEQ ID NO: 68550 - DNA, 2058 bp, Homo sapiens
ggctgtacggccgagattatgtatccgccgtggagccgggtgtgggggcaggcgaaggggagggctgcgggtggaaaggggcgagcccctctcgcccgggactgggaagagcggccacggcgccgggcgaggcggcagggcgaggcagtgccatgctgcctttgtgcaaagttgggcggcgggcggcgcgccgcgcgcaggggccccgcacacccgcgaccgcgcgcagccgtggctgctgctgagtggcgggggcccccccgctccccccggcccttgaaggcggagagagctcgcgtctcgctcggcttcagggtaagtccagctgtgagcagagtgttctgttcttcacttccagcaagccagagtttcataaatggacgctgacatggactacgaaagacccaacgttgaaactatcaaatgtgtggtcgtgggtgacaatgccgtggggaagacgcgcttgatctgtgccagggcgtgcaacaccacactcacgcagtatcagctgctggccacccacgtgccaacagtgtgggcgattgaccagtaccgcgtgtgccaggaggtcttggagcgttctcgggatgttgttgatgaagtgagtgtttctctcaggctttgggatacttttggtgatcatcacaaagacagacgctttgcatatggcaggtctgatgttgtggtcctctgtttttcgattgctaatcccaattccctaaatcatgtgaaaagcatgtggtatccagaaatcaagcacttttgccctcgaacacccgttatccttgttgggtgccagcttgatctccgctatgccgacctggaagctgttaatcgagccaggcgcccgttagcaaggcccataaagagaggggatattttgcccccagaaaaaggccgagaggtagcaaaggaacttggcttaccatactatgaaacaagcgtgtttgaccagtttggtatcaaggatgtgtttgacaatgcaatccgagcagcgctgatttcccgcaggcacctgcaattctggaaatcccacctaaagaaagtccagaaacctttacttcaggcacccttcctacctccaaaagcccctccaccggtcatcaaaattccagagtgtccttccatggggacaaatgaagctgcctgtttactggacaatcctctatgtgccgatgttctgttcatccttcaggaccaggaacacatctttgcacatcgaatttacctcgctacctcttcttccaaattttatgatctgtttttaatggaatgtgaagaatccccaaatgggagtgaaggagcctgtgagaaagagaagcagagcagagatttccaggggcggatattgagtgtcgacccagaggaagaaagggaggagggcccgcctaggattcctcaggccgaccagtggaagtcttcaaacaagagcctggtggaggctctggggctggaagccgagggtgcagttcctgagacacagactttgaccggatggagtaaggggttcattggcatgcacagggaaatgcaagtcaaccccatttcaaagcggatggggcccatgactgtggtcaggatggacgcttcagtccagccaggcccttttcggaccctgctccagtttctttatacgggacaactggatgaaaaggaaaaggatttggtgggcctggctcagatcgcagaggtcctcgagatgttcgatttgaggatgatggtggaaaacatcatgaacaaggaagccttcatgaaccaggagattacgaaagcctttcacgtaaggaaagccaatcggataaaagagtgtctcagcaagggaacgttctcgggtgtatctcccgaacataaacaagatatcaatgcaagcagtattggattatctctataccaagcagttgtctcctaacttggatctggacccgctggaattaattgccttggcaaacagattttgcctgccacacttggttgcacttgcagatttgttcagttgggaagctgaagcaggtctgcataggatatatgaacttaaatgcctttctctggaattcagat

SEQ ID NO: 68551 - DNA, 718 bp, Homo sapiens
gggacccagagccgccgcgggagctcacagcgtccccaggttttataataatcaagaagcacatgaaagaggcctcttcatcaagcattcttgactaagttatgaaaatggaattgaagtttattttcccccttcatatggtgccatgtaacttcagagaaaggcatgagagaagccgggccttcagcaaggatatgggactggctaagaattaagaagaaagaagcctcactttagaactaatggggtcttgtatgtatagcttattcccccactggatagatatggatacttaaacattgagaaatctttattctctacttgaatagttgagaacaaacgatacactcacgaggaggctaaccttacccatgttgtccatatatttaaatgaaattttataataactccatctgttgaaatgggctgtgtgtttttccgcatgactttcccattttatctcatcaacctgaccttgctggcacaaggtacaatcactgtagtatcctgcttgtttcatcaggaagtggagcaatagtttaatttgttaaggaaatcccaaggaatgaactaaagcttgcgttgtgtgttttcccacaaattgtgttttctttgaatttgtggttgtgagggcatatcgctcatcgacacctgatccacaagtattggctgtttgtcaaggaccccgagaatcctgaagttgtcacgtcatagagat

SEQ ID NO: 68552 - DNA, 451 bp, Homo sapiens
aagcgtcccccagcacacacacacacacacacgcgtgcgcgcgcgcgcactcacacacacacacacactggcggaggcgggggtggccagagggattagagagataaagtcactgtcagtcagaaaagataagaatctgggctggacgtgccacactggggtcttctgaaagtaggcgcagcatctgcagctcctcatgcccggccctaaggtgatgcgggattgatttttcttggtttgttagccgtgaaagccccgggctgtaaaaaggtttgggtcaagaactagactttgatttattgaggcttgctttgccctgctatgccacaccttgtggtgtctggagatggggtattttggagcactcatacaaagtttgaactggtattcaagtgagcttgaatactcacttgatttttaacacttgggaattaaaaaaaaatgaagatat

SEQ ID NO: 68553 - DNA, 4583 bp, Homo sapiens
ggctgtacggccgagattatgtatccgccgtggagccgggtgtgggggcaggcgaaggggagggctgcgggtggaaaggggcgagcccctctcgcccgggactgggaagagcggccacggcgccgggcgaggcggcagggcgaggcagtgccatgctgcctttgtgcaaagttgggcggcgggcggcgcgccgcgcgcaggggccccgcacacccgcgaccgcgcgcagccgtggctgctgctgagtggcgggggcccccccgctccccccggcccttgaaggcggagagagctcgcgtctcgctcggcttcagggtaagtccagctgtgagcagagtgttctgttcttcacttccagcaagccagaactcttctatccataggccaacctatgttgcagttgattaaggggtgcagctcccatataaatgctggcagagtttcataaatggacgctgacatggactacgaaagacccaacgttgaaactatcaaatgtgtggtcgtgggtgacaatgccgtggggaagacgcgcttgatctgtgccagggcgtgcaacaccacactcacgcagtatcagctgctggccacccacgtgccaacagtgtgggcgattgaccagtaccgcgtgtgccaggaggtcttggagcgttctcgggatgttgttgatgaagtgagtgtttctctcaggctttgggatacttttggtgatcatcacaaagacagacgctttgcatatggcaggtctgatgttgtggtcctctgtttttcgattgctaatcccaattccctaaatcatgtgaaaagcatgtggtatccagaaatcaagcacttttgccctcgaacacccgttatccttgttgggtgccagcttgatctccgctatgccgacctggaagctgttaatcgagccaggcgcccgttagcaaggcccataaagagaggggatattttgcccccagaaaaaggccgagaggtagcaaaggaacttggcttaccatactatgaaacaagcgtgtttgaccagtttggtatcaaggatgtgtttgacaatgcaatccgagcagcgctgatttcccgcaggcacctgcaattctggaaatcccacctaaagaaagtccagaaacctttacttcaggcacccttcctacctccaaaagcccctccaccggtcatcaaaattccagagtgtccttccatggggacaaatgaagctgcctgtttactggacaatcctctatgtgccgatgttctgttcatccttcaggaccaggaacacatctttgcacatcgaatttacctcgctacctcttcttccaaattttatgatctgtttttaatggaatgtgaagaatccccaaatgggagtgaaggagcctgtgagaaagagaagcagagcagagatttccaggggcggatattgagtgtcgacccagaggaagaaagggaggagggcccgcctaggattcctcaggccgaccagtggaagtcttcaaacaagagcctggtggaggctctggggctggaagccgagggtgcagttcctgagacacagactttgaccggatggagtaaggggttcattggcatgcacagggaaatgcaagtcaaccccatttcaaagcggatggggcccatgactgtggtcaggatggacgcttcagtccagccaggcccttttcggaccctgctccagtttctttatacgggacaactggatgaaaaggaaaaggatttggtgggcctggctcagatcgcagaggtcctcgagatgttcgatttgaggatgatggtggaaaacatcatgaacaaggaagccttcatgaaccaggagattacgaaagcctttcacgtaaggaaagccaatcggataaaagagtgtctcagcaagggaacgttctcggacgtgacatttaaattggacgatggagccatcagtgcccacaagccgctgctgatctgtagctgtgagtggatggcagccatgttcggggggtcatttgtggaaagtgccaacagtgaggtgtatctcccgaacataaacaagatatcaatgcaagcagtattggattatctctataccaagcagttgtctcctaacttggatctggacccgctggaattaattgccttggcaaacagattttgcctgccacacttggttgcacttgcagaacagcatgccgttcaggagttgaccaaagccgccacgagtggcgtgggcattgacggagaagtgctctcttacttggaattggctcagtttcacaatgcccaccagttggccgcctggtgtttgcaccacatctgcaccaactacaacagtgtatgctccaagttccgtaaggaaatcaaatcaaaatctgcagacaaccaggaatacttcgagcggcaccgctggccccctgtgtggtacctgaaggaagaagatcactaccagcgtgtgaaaagggaacgagagaaggaagatattgcactaaataagcatcgctcaagacgaaagtggtgcttctggaattcatctccagcagtggcctgaagaggaagagaaaaaaaacaaaaaacagaaaccaatcggtaatctgatccaccacttttcaaagcactactataaaattcgtcttgttagagatacgacatagttcaggtttcgggcactgatcttcctccacttttgtgcatttatctttgttaggatcaaagcacaagctcaccatcaatgagcctggacaaaaagggaagctgactctcactgcattccttaaactgatatgtatattttttttgttaggaggcttaataaactttagtctgttattttgtttctttttatacaaagaaaaaaaattcagctttcatgtttctgattccagattggaaaatatttttatatggtctgttgtattttgttgaaatgaaaatactgtgtattactttattttacaggccacaattgattatgaagtcaccctgtgattctctttgcccacatgaccaccgagcattattacgtaattagagggttatccttttgttgtgaaaggaaggaggggactgaaatctcccaaagtgcaaattggagagtgtttaatctttgttctgttgaataacatcggtgtaattacaaagtcaactccaagaatgtgtatttacaatatttgccatgttaagtgctggtaattatatggttatatgtgccatgtaaaatatagtgatatcaaatattctgttgtttccaatgtctagtttcaagaggacaatctttataatcattagaagggcttattaaatcccagcattatccagggcaaactcactggtggacctgaatacataagataccattagtgcgctggtgttcggattgctgtattagggtttacatctctcagtattccttgaacttgccatgcttctgcatgcagattcttcactgacttgaattgagatgggcaagggaaaaggtccctggactccctcctgccatctacaggcttgtcacatctcaccaccagaaacaggcttcctcaggcttctcacctgtggccaacttcactttgtaagacccatatttttaactcttcccagggaaaattcatgttgctgcagaagtaggctaaggcagaccacccacttctgctgaaatgcattgggagcctgtgaaagcacaaagctggaggctgggcgcctgcgttctcctacacggaaaggaatctaattccaagagtctaggaaatggtgctattgtgagttcgttctgactctttctcattctgagttttcagtgttaaactaggaagtgtgacagcaggggagctttcgtgaggcagtcagtcattgcttctctgtaaattaaaatgttacagcacacacatacacacacagagagcatttcaaggccacagctccacacctgccatgggatgttaatgtggcagggggtggggctcattctgttgggaggtcaaattaccaatgccaaggactgttgattttgtttttatttttattttttcttctagcttttcagaagatggaaatgagacagttgagtccaaaccccaatgctgacagccatatgcatttgaaaatctatctagattacagatgggcatttattactggcagtggaaacaccagatagaagatcttaggagaggcccagaaatgcatcaccttgtcatgacaaaagagaaggcagtagagtagggatagttacaaatgcatccatcttaattattttcaataggcttgtaaatcttatcgatggaaggagaaaggagacaagatgtggaagaattgacatgtatcccaccataaaatggtagaagatgagttttcaatgagtagtcatagttgaaattttacaaccaaagctcccatttgattgtaatcttgccaaaatataatggatgtataaatgaacttggggtataagcaataatatccactagtgttgttatcagctactgtaaccaagtggctggttcatttggttgatgctgattatggcctttaaccatggtggtttgttgtgtgttttttatttcacaaaaagccaataaaattgtttagctataaaa

SEQ ID NO: 68554 - DNA, 4142 bp, Homo sapiens
ggctgtacggccgagattatgtatccgccgtggagccgggtgtgggggcaggcgaaggggagggctgcgggtggaaaggggcgagcccctctcgcccgggactgggaagagcggccacggcgccgggcgaggcggcagggcgaggcagtgccatgctgcctttgtgcaaagttgggcggcgggcggcgcgccgcgcgcaggggccccgcacacccgcgaccgcgcgcagccgtggctgctgctgagtggcgggggcccccccgctccccccggcccttgaaggcggagagagctcgcgtctcgctcggcttcagggtaagtccagctgtgagcagagtgttctgttcttcacttccagcaagccagagtttcataaatggacgctgacatggactacgaaagacccaacgttgaaactatcaaatgtgtggtcgtgggtgacaatgccgtggggaagacgcgcttgatctgtgccagggcgtgcaacaccacactcacgcagtatcagctgctggccacccacgtgccaacagtgtgggcgattgaccagtaccgcgtgtgccaggaggtcttggagcgttctcgggatgttgttgatgaagtgagtgtttctctcaggctttgggatacttttggtgatcatcacaaagacagacgctttgcatatggcaggtctgatgttgtggtcctctgtttttcgattgctaatcccaattccctaaatcatgtgaaaagcatgtggtatccagaaatcaagcacttttgccctcgaacacccgttatccttgttgggtgccagcttgatctccgctatgccgacctggaagctgttaatcgagccaggcgcccgttagcaaggcccataaagagaggggatattttgcccccagaaaaaggccgagaggtagcaaaggaacttggcttaccatactatgaaacaagcgtgtttgaccagtttggtatcaaggatgtgtttgacaatgcaatccgagcagcgctgatttcccgcaggcacctgcaattctggaaatcccacctaaagaaagtccagaaacctttacttcaggcacccttcctacctccaaaagcccctccaccggtcatcaaaattccagagtgtccttccatggggacaaatgaagctgcctgtttactggacaatcctctatgtgccgatgttctgttcatccttcaggaccaggaacacatctttgcacatcgaatttacctcgctacctcttcttccaaattttatgatctgtttttaatggaatgtgaagaatccccaaatgggagtgaaggagcctgtgagaaagagaagcagagcagagatttccaggggcggatattgagtgtcgacccagaggaagaaagggaggagggcccgcctaggattcctcaggccgaccagtggaagtcttcaaacaagagcctggtggaggctctggggctggaagccgagggtgcagttcctgagacacagactttgaccggatggagtaaggggttcattggcatgcacagggaaatgcaagtcaaccccatttcaaagcggatggggcccatgactgtggtcaggatggacgcttcagtccagccaggcccttttcggaccctgctccagtttctttatacgggacaactggatgaaaaggaaaaggatttggtgggcctggctcagatcgcagaggtcctcgagatgttcgatttgaggatgatggtggaaaacatcatgaacaaggaagccttcatgaaccaggagattacgaaagcctttcacgtaaggaaagccaatcggataaaagagtgtctcagcaagggaacgttctcggacgtgacatttaaattggacgatggagccatcagtgcccacaagccgctgctgatctgtagctgtgagtggatggcagccatgttcggggggtcatttgtggaaagtgccaacagtgaggtgtatctcccgaacataaacaagatatcaatgcaagcagtattggattatctctataccaagcagttgtctcctaacttggatctggacccgctggaattaattgccttggcaaacagattttgcctgccacacttggttgcacttgcagaacagcatgccgttcaggagttgaccaaagccgccacgagtggcgtgggcattgacggagaagtgctctcttacttggaattggctcagtttcacaatgcccaccagttggccgcctggtgtttgcaccacatctgcaccaactacaacagtgtatgctccaagttccgtaaggaaatcaaatcaaaatctgcagacaaccaggaatacttcgagcggcaccgctggccccctgtgtggtacctgaaggaagaagatcactaccagcgtgtgaaaagggaacgagagaaggaagatattgcactaaataagcatcgctcaagacgaaagtggtgcttctggaattcatctccagcagtggcctgaagaggaagagaaaaaaaacaaaaaacagaaaccaatcggccacaattgattatgaagtcaccctgtgattctctttgcccacatgaccaccgagcattattacgtaattagagggttatccttttgttgtgaaaggaaggaggggactgaaatctcccaaagtgcaaattggagagtgtttaatctttgttctgttgaataacatcggtgtaattacaaagtcaactccaagaatgtgtatttacaatatttgccatgttaagtgctggtaattatatggttatatgtgccatgtaaaatatagtgatatcaaatattctgttgtttccaatgtctagtttcaagaggacaatctttataatcattagaagggcttattaaatcccagcattatccagggcaaactcactggtggacctgaatacataagataccattagtgcgctggtgttcggattgctgtattagggtttacatctctcagtattccttgaacttgccatgcttctgcatgcagattcttcactgacttgaattgagatgggcaagggaaaaggtccctggactccctcctgccatctacaggcttgtcacatctcaccaccagaaacaggcttcctcaggcttctcacctgtggccaacttcactttgtaagacccatatttttaactcttcccagggaaaattcatgttgctgcagaagtaggctaaggcagaccacccacttctgctgaaatgcattgggagcctgtgaaagcacaaagctggaggctgggcgcctgcgttctcctacacggaaaggaatctaattccaagagtctaggaaatggtgctattgtgagttcgttctgactctttctcattctgagttttcagtgttaaactaggaagtgtgacagcaggggagctttcgtgaggcagtcagtcattgcttctctgtaaattaaaatgttacagcacacacatacacacacagagagcatttcaaggccacagctccacacctgccatgggatgttaatgtggcagggggtggggctcattctgttgggaggtcaaattaccaatgccaaggactgttgattttgtttttatttttattttttcttctagcttttcagaagatggaaatgagacagttgagtccaaaccccaatgctgacagccatatgcatttgaaaatctatctagattacagatgggcatttattactggcagtggaaacaccagatagaagatcttaggagaggcccagaaatgcatcaccttgtcatgacaaaagagaaggcagtagagtagggatagttacaaatgcatccatcttaattattttcaataggcttgtaaatcttatcgatggaaggagaaaggagacaagatgtggaagaattgacatgtatcccaccataaaatggtagaagatgagttttcaatgagtagtcatagttgaaattttacaaccaaagctcccatttgattgtaatcttgccaaaatataatggatgtataaatgaacttggggtataagcaataatatccactagtgttgttatcagctactgtaaccaagtggctggttcatttggttgatgctgattatggcctttaaccatggtggtttgttgtgtgttttttatttcacaaaaagccaataaaattgtttagctataaaa

SEQ ID NO: 68555 - DNA, 2853 bp, Homo sapiens
tcgagccggaccggtgttatcgatgcaccatcgtcctcgagatgttcgatttgaggatgatggtggaaaacatcatgaacaaggaagccttcatgaaccaggagattacgaaagcctttcacgtaaggaaagccaatcggataaaagagtgtctcagcaagggaacgttctcggacgtgacatttaaattggacgatggagccatcagtgcccacaagccgctgctgatctgtagctgtgagtggatggcagccatgttcggggggtcatttgtggaaagtgccaacagtgaggtgtatctcccgaacataaacaagatatcaatgcaagcagtattggattatctctataccaagcagttgtctcctaacttggatctggacccgctggaattaattgccttggcaaacagattttgcctgccacacttggttgcacttgcagaacagcatgccgttcaggagttgaccaaagccgccacgagtggcgtgggcattgacggagaagtgctctcttacttggaattggctcagtttcacaatgcccaccagttggccgcctggtgtttgcaccacatctgcaccaactacaacagtgtatgctccaagttccgtaaggaaatcaaatcaaaatctgcagacaaccaggaatacttcgagcggcaccgctggccccctgtgtggtacctgaaggaagaagatcactaccagcgtgtgaaaagggaacgagagaaggaagatattgcactaaataagcatcgctcaagacgaaagtggtgcttctggaattcatctccagcagtggcctgaagaggaagagaaaaaaaacaaaaaacagaaaccaatcggtaatctgatccaccacttttcaaagcactactataaaattcgtcttgttagagatacgacatagttcaggtttcgggcactgatcttcctccacttttgtgcatttatctttgttaggatcaaagcacaagctcaccatcaatgagcctggacaaaaagggaagctgactctcactgcattccttaaactgatatgtatattttttttgttaggaggcttaataaactttagtctgttattttgtttctttttatacaaagaaaaaaaattcagctttcatgtttctgattccagattggaaaatatttttatatggtctgttgtattttgttgaaatgaaaatactgtgtattactttattttacaggccacaattgattatgaagtcaccctgtgattctctttgcccacatgaccaccgagcattattacgtaattagagggttatccttttgttgtgaaaggaaggaggggactgaaatctcccaaagtgcaaattggagagtgtttaatctttgttctgttgaataacatcggtgtaattacaaagtcaactccaagaatgtgtatttacaatatttgccatgttaagtgctggtaattatatggttatatgtgccatgtaaaatatagtgatatcaaatattctgttgtttccaatgtctagtttcaagaggacaatctttataatcattagaagggcttattaaatcccagcattatccagggcaaactcactggtggacctgaatacataagataccattagtgcgctggtgttcggattgctgtattagggtttacatctctcagtattccttgaacttgccatgcttctgcatgcagattcttcactgacttgaattgagatgggcaagggaaaaggtccctggactccctcctgccatctacaggcttgtcacatctcaccaccagaaacaggcttcctcaggcttctcacctgtggccaacttcactttgtaagacccatatttttaactcttcccagggaaaattcatgttgctgcagaagtaggctaaggcagaccacccacttctgctgaaatgcattgggagcctgtgaaagcacaaagctggaggctgggcgcctgcgttctcctacacggaaaggaatctaattccaagagtctaggaaatggtgctattgtgagttcgttctgactctttctcattctgagttttcagtgttaaactaggaagtgtgacagcaggggagctttcgtgaggcagtcagtcattgcttctctgtaaattaaaatgttacagcacacacatacacacacagagagcatttcaaggccacagctccacacctgccatgggatgttaatgtggcagggggtggggctcattctgttgggaggtcaaattaccaatgccaaggactgttgattttgtttttatttttattttttcttctagcttttcagaagatggaaatgagacagttgagtccaaaccccaatgctgacagccatatgcatttgaaaatctatctagattacagatgggcatttattactggcagtggaaacaccagatagaagatcttaggagaggcccagaaatgcatcaccttgtcatgacaaaagagaaggcagtagagtagggatagttacaaatgcatccatcttaattattttcaataggcttgtaaatcttatcgatggaaggagaaaggagacaagatgtggaagaattgacatgtatcccaccataaaatggtagaagatgagttttcaatgagtagtcatagttgaaattttacaaccaaagctcccatttgattgtaatcttgccaaaatataatggatgtataaatgaacttggggtataagcaataatatccactagtgttgttatcagctactgtaaccaagtggctggttcatttggttgatgctgattatggcctttaaccatggtggtttgttgtgtgttttttatttcacaaaaagccaataaaattgtttagctataaaa

SEQ ID NO: 68556 - DNA, 4235 bp, Homo sapiens
ggctgtacggccgagattatgtatccgccgtggagccgggtgtgggggcaggcgaaggggagggctgcgggtggaaaggggcgagcccctctcgcccgggactgggaagagcggccacggcgccgggcgaggcggcagggcgaggcagtgccatgctgcctttgtgcaaagttgggcggcgggcggcgcgccgcgcgcaggggccccgcacacccgcgaccgcgcgcagccgtggctgctgctgagtggcgggggcccccccgctccccccggcccttgaaggcggagagagctcgcgtctcgctcggcttcagggtaagtccagctgtgagcagagtgttctgttcttcacttccagcaagccagagtttcataaatggacgctgacatggactacgaaagacccaacgttgaaactatcaaatgtgtggtcgtgggtgacaatgccgtggggaagacgcgcttgatctgtgccagggcgtgcaacaccacactcacgcagtatcagctgctggccacccacgtgccaacagtgtgggcgattgaccagtaccgcgtgtgccaggaggtcttggagcgttctcgggatgttgttgatgaagtgagtgtttctctcaggctttgggatacttttggtgatcatcacaaagacagacgctttgcatatggcaggtctgatgttgtggtcctctgtttttcgattgctaatcccaattccctaaatcatgtgaaaagcatgtggtatccagaaatcaagcacttttgccctcgaacacccgttatccttgttgggtgccagcttgatctccgctatgccgacctggaagctgttaatcgagccaggcgcccgttagcaaggcccataaagagaggggatattttgcccccagaaaaaggccgagaggtagcaaaggaacttggcttaccatactatgaaacaagcgtgtttgaccagtttggtatcaaggatgtgtttgacaatgcaatccgagcagcgctgatttcccgcaggcacctgcaattctggaaatcccacctaaagaaagtccagaaacctttacttcaggcacccttcctacctccaaaagcccctccaccggtcatcaaaattccagagtgtccttccatggggacaaatgaagctgcctgtttactggacaatcctctatgtgccgatgttctgttcatccttcaggaccaggaacacatctttgcacatcgaatttacctcgctacctcttcttccaaattttatgatctgtttttaatggaatgtgaagaatccccaaatgggagtgaaggagcctgtgagaaagagaagcagagcagagatttccaggggcggatattgagtgtcgacccagaggaagaaagggaggagggcccgcctaggattcctcaggccgaccagtggaagtcttcaaacaagagcctggtggaggctctggggctggaagccgagggtgcagttcctgagacacagactttgaccggatggagtaaggggttcattggcatgcacagggaaatgcaagtcaaccccatttcaaagcggatggggcccatgactgtggtcaggatggacgcttcagtccagccaggcccttttcggaccctgctccagtttctttatacgggacaactggatgaaaaggaaaaggatttggtgggcctggctcagatcgcagaggtcctcgagatgttcgatttgaggatgatggtggaaaacatcatgaacaaggaagccttcatgaaccaggagattacgaaagcctttcacgtaaggaaagccaatcggataaaagagtgtctcagcaagggaacgttctcggacgtgacatttaaattggacgatggagccatcagtgcccacaagccgctgctgatctgtagctgtgagtggatggcagccatgttcggggggtcatttgtggaaagtgccaacagtgaggtgtatctcccgaacataaacaagatatcaatgcaagcagtattggattatctctataccaagcagttgtctcctaacttggatctggacccgctggaattaattgccttggcaaacagattttgcctgccacacttggttgcacttgcagaacagcatgccgttcaggagttgaccaaagccgccacgagtggcgtgggcattgacggagaagtgctctcttacttggaattggctcagtttcacaatgcccaccagttggccgcctggtgtttgcaccacatctgcaccaactacaacagtgtatgctccaagttccgtaaggaaatcaaatcaaaatctgcagacaaccaggaatacttcgagcggcaccgctggccccctgtgtggtacctgaaggaagaagatcactaccagcgtgtgaaaagggaacgagagaaggaagatattgcactaaataagcatcgctcaagacgaaagtggtgcttctggaattcatctccagcagtggcctgaagaggaagagaaaaaaaacaaaaaacagaaaccaatcggtaatctgatccaccacttttcaaagcactactataaaattcgtcttgttagagatacgacatagttcaggtttcgggcactgatcttcctccacttttgtgcatttatctttgttaggatcaaagcacaagctcaccatcaatgagcctggacaaaaagggaagctgactctcactgcattccttaaactgatatgtatattttttttgttaggaggcttaataaactttagtctgttattttgtttctttttatacaaagaaaaaaaattcagctttcatgtttctgattccagattggaaaatatttttatatggtctgttgtattttgttgaaatgaaaatactgtgtattactttattttacaggccacaattgattatgaagtcaccctgtgattctctttgcccacatgaccaccgagcattattacgtaattagagggttatccttttgttgtgaaaggaaggaggggactgaaatctcccaaagtgcaaattggagagtgtttaatctttgttctgttgaataacatcggtgtaattacaaagtcaactccaagaatgtgtatttacaatatttgccatgttaagtgctggtaattatatggttatatgtgccatgtaaaatatagtgatatcaaatattctgttgtttccaatgtctagtttcaagaggacaatctttataatcattagaagggcttattaaatcccagcattatccagggcaaactcactggtggacctgaatacataagataccattagtgcgctggtgttcggattgctgtattagggtttacatctctcagtattccttgaacttgccatgcttctgcatgcagattcttcactgacttgaattgagatgggcaagggaaaaggtccctggactccctcctgccatctacaggcttgtcacatctcaccaccagaaacaggcttcctcaggcttctcacctgtggccaacttcactttgtaagacccatatttttaactcttcccagggaaaattcatgttgctgcagaagtaggctaaggcagaccacccacttctgctgaaatgcattgggagcctgtgaaagcacaaagctggaggctgggcgcctgcgttctcctacacggaaaggaatctaattccaagagtctaggaaatggtgctattcttttcagaagatggaaatgagacagttgagtccaaaccccaatgctgacagccatatgcatttgaaaatctatctagattacagatgggcatttattactggcagtggaaacaccagatagaagatcttaggagaggcccagaaatgcatcaccttgtcatgacaaaagagaaggcagtagagtagggatagttacaaatgcatccatcttaattattttcaataggcttgtaaatcttatcgatggaaggagaaaggagacaagatgtggaagaattgacatgtatcccaccataaaatggtagaagatgagttttcaatgagtagtcatagttgaaattttacaaccaaagctcccatttgattgtaatcttgccaaaatataatggatgtataaatgaacttggggtataagcaataatatccactagtgttgttatcagctactgtaaccaagtggctggttcatttggttgatgctgattatggcctttaaccatggtggtttgttgtgtgttttttatttcacaaaaagccaataaaattgtttagctataaaa

SEQ ID NO: 68557 - DNA, 1910 bp, Homo sapiens
ggctgtacggccgagattatgtatccgccgtggagccgggtgtgggggcaggcgaaggggagggctgcgggtggaaaggggcgagcccctctcgcccgggactgggaagagcggccacggcgccgggcgaggcggcagggcgaggcagtgccatgctgcctttgtgcaaagttgggcggcgggcggcgcgccgcgcgcaggggccccgcacacccgcgaccgcgcgcagccgtggctgctgctgagtggcgggggcccccccgctccccccggcccttgaaggcggagagagctcgcgtctcgctcggcttcagggtaagtccagctgtgagcagagtgttctgttcttcacttccagcaagccagagtttcataaatggacgctgacatggactacgaaagacccaacgttgaaactatcaaatgtgtggtcgtgggtgacaatgccgtggggaagacgcgcttgatctgtgccagggcgtgcaacaccacactcacgcagtatcagctgctggccacccacgtgccaacagtgtgggcgattgaccagtaccgcgtgtgccaggaggtcttggagcgttctcgggatgttgttgatgaagtgagtgtttctctcaggctttgggatacttttggtgatcatcacaaagacagacgctttgcatatggcaggtctgatgttgtggtcctctgtttttcgattgctaatcccaattccctaaatcatgtgaaaagcatgtggtatccagaaatcaagcacttttgccctcgaacacccgttatccttgttgggtgccagcttgatctccgctatgccgacctggaagctgttaatcgagccaggcgcccgttagcaaggcccataaagagaggggatattttgcccccagaaaaaggccgagaggtagcaaaggaacttggcttaccatactatgaaacaagcgtgtttgaccagtttggtatcaaggatgtgtttgacaatgcaatccgagcagcgctgatttcccgcaggcacctgcaattctggaaatcccacctaaagaaagtccagaaacctttacttcaggcacccttcctacctccaaaagcccctccaccggtcatcaaaattccagagtgtccttccatggggacaaatgaagctgcctgtttactggacaatcctctatgtgccgatgttctgttcatccttcaggaccaggaacacatctttgcacatcgaatttacctcgctacctcttcttccaaattttatgatctgtttttaatggaatgtgaagaatccccaaatgggagtgaaggagcctgtgagaaagagaagcagagcagagatttccaggggcggatattgagtgtcgacccagaggaagaaagggaggagggcccgcctaggattcctcaggccgaccagtggaagtcttcaaacaagagcctggtggaggctctggggctggaagccgagggtgcagttcctgagacacagactttgaccggatggagtaaggggttcattggcatgcacagggaaatgcaagtcaaccccatttcaaagcggatggggcccatgactgtggtcaggatggacgcttcagtccagccaggcccttttcggaccctgctccagtttctttatacgggacaactggatgaaaaggaaaaggatttggtgggcctggctcagatcgcagaggtcctcgagatgttcgatttgaggatgatggtggaaaacatcatgaacaaggaagccttcatgaaccaggagattacgaaagcctttcacgtaaggaaagccaatcggataaaagagtgtctcagcaagggaacgttctcggacgtgacatttaaattggacgatggacatctgagcccactgacgctgctggtatgctgttcaaaatccttggtgttct

SEQ ID NO: 68558 - DNA, 1178 bp, Homo sapiens
aaatgagactgtgatcgaaatctcccctctttggaatcctgcccttcagataagaagcaatgtgaattaagtgcttcctgggggccgggccccagcacttcacattcactcgattcacagcctccccgtataccgtctccccattttacaggggacaagcaagcagactcccagagaagcctgtgttcctaaccgctgcacctcctgctccttcagcaggatggggtcaccaggttacactccgaggcgtcagttccatccacgtgctcagcagggacgggaagcagctcacacccacttcttgttttccttcccaacatggtcttcttggtcccccaaaatgagcacttcagcctctataacttgagtgtattggcttttggaaattgtgaagatttttctgtatgaagcagccccaggtgaaccagaggctgccttttctggagctgctgaaatccaagggctattttcaagtcggtcagaacctgccctgtaccccccacccaaccctgccgaaatgtcaaggccagaagctgtggcgttggtgcgggtaccacctccttcactctgagcgtgtggccccacaggtacatcactcaggaaggccacaagctggaaacaggggccccgcggccaccagccaccgtcaccaacgcggtgtcctggcggtccgaaggcatcaagtatcggaagaatgaggtgttcttggacgtcatcgagtctgtcaacctcttggtaggcctcttttctttccttcttctgtagggttttatctcttccacgatagaaataaacacagcattttaaaactggcaaagccccgagagccgttctgtgtggtaacagatagcaggattcagtttgggccactcattgaaatgtgagtttgtcttatcttttttttttgagacggaatctcattctgtcgcccaggctagagtgtggtgacacgatctcggctcactgcaacctccgcctcccaggttcaggcgattctcctgcctcagcctcccgtgtagccgggattatagcacccgccaccacgctcggctaaagcttgttttctttattagcatttatgctgactgagaatccatacatgcacattatttttaaaaattagaagcagggtatgaggttagaaagtgaagggctcttatcagtcaccatgcacagaa

SEQ ID NO: 68559 - DNA, 2353 bp, Homo sapiens
ttatggctaggtacgaggctgggtgttaatgcggccgagggtgagctgtcgcgggcggcgcccggccttgctcaacgcccagcagtccccaccgtcgctgccgccgccaccgccctcggccgctgccgccgccaccgccctcggccgctgccgaggcctcctgcagccatcatgtccgccagcgccgtctacgtgctggacctgaagggcaaggtgctcatctgccggaactaccgtggcgacgtggacatgtcagaggtggagcacttcatgcccatcctgatggagaaggaggaggaggggatgctgtcgcccatcctggcccacgggggggtccgtttcatgtggatcaaacacaacaacctgtatctggttgccacatccaagaagaacgcgtgcgtgtcgctggtcttttctttcctctataaggtggtgcaggtgttttccgagtacttcaaggagctggaggaggagagcatccgggacaactttgttatcatctacgagctgctggacgagctcatggacttcggctacccccagaccaccgacagcaagatcctgcaggagtacatcactcaggaaggccacaagctggaaacaggggccccgcggccaccagccaccgtcaccaacgcggtgtcctggcggtccgaaggcatcaagtatcggaagaatgaggtgttcttggacgtcatcgagtctgtcaacctcttggtcagcgccaacggcaatgtcctgcgcagcgagatcgtgggctccatcaagatgcgagtcttcctctcgggcatgcccgagctgcgcctgggcctcaacgacaaggtcctctttgacaacacgggccgcggcaaaagcaaatccgtggagctggaggatgtgaagttccaccagtgtgtgcggctatcacgcttcgagaatgaccgcaccatctccttcatcccacccgacggcgagttcgagctcatgtcctaccgtctcaacacccacgtcaagcctttgatatggatcgagtcggtgatcgagaagcactcccacagccgcatcgagtacatgatcaaggccaaaagccagttcaagcggcggtcaacagccaacaacgtggagatccacattcccgtgcccaatgatgccgactcacccaagttcaagacgacggtggggagcgttaagtgggtccccgagaacagcgagatcgtgtggtccatcaagtccttcccgggcggcaaggagtacctgatgcgggcccacttcggcctgcctagtgtggaggccgaagacaaggagggcaagcccccgatcagtgtcaagttcgagatcccttacttcactacctccggcatccaggtgcgctacctgaagatcattgagaagagtgggtaccaggccctgccctgggtgcgttatatcacgcagaatggagattaccagctccggacccagtgaggggctgtcgcagccaacaccccggcctcggggctcctggtggcagcaccaggggacacacctgccaaacccaccagatggaggggccctccctggtctctggccaccctcccagcctctgcccagggacccctgccttccccaggccatctgctctgccgtcgacactcgtctcagaagcccctttcccagaagaggctggtcttcaagaagtctcgtttctttgcccctgaagtcagtttcaggggaaggatgtgaaatttttccgtgtagaggttacagccttttatgctgttgagctcccaggtaccaaaaagcttggccaacgcttgccagccagccagctgcaggtggcatctgccacgaaggaagcgccagcctcgccaggccagcaggggcgtcgttttgttgccattttgttgaacgttatgggtttatgggtgttcctggaacttgtctttgtgcattcgttgctgtttgtgttaccctcactgtccccatgtcccacccacgtcctacggcactcaggaagcacttggtgaggacgagccctcacccttcttgtcttccttcccagcagcgcccgcagcgggccatttacacgtcgaggctggcacctggcgcgctcgggggccactgtagcgtctgcctgctccctggactcgcaggcctcgcctgtggcgccttcccagggccagcctgggtcacgagatgctgtcactcagccagatcagtattgacccaccaggggaggtggggtttggtgagagacgccagcctcagactttttcccactgagggtccagagagcggggccacgtgtcacccacgtctgcgcttggtcacccgtcctccccaccctgtgtgtgtttatgtcatagttacattaaattccattcattgaatactc

SEQ ID NO: 68560 - DNA, 2371 bp, Homo sapiens
aaatgagactgtgatcgaaatctcccctctttggaatcctgcccttcagataagaagcaatgtgaattaagtgcttcctgggggccgggccccagcacttcacattcactcgattcacagcctccccgtataccgtctccccattttacaggggacaagcaagcagactcccagagaagcctgtgttcctaaccgctgcacctcctgctccttcagcaggatggggtcaccaggttacactccgaggcgtcagttccatccacgtgctcagcagggacgggaagcagctcacacccacttcttgttttccttcccaacatggtcttcttggtcccccaaaatgagcacttcagcctctataacttgagtgtattggcttttggaaattgtgaagatttttctgtatgaagcagccccaggtgaaccagaggctgccttttctggagctgctgaaatccaagggctattttcaagtcggtcagaacctgccctgtaccccccacccaaccctgccgaaatgtcaaggccagaagctgtggcgttggtgcgggtaccacctccttcactctgagcgtgtggccccacaggtacatcactcaggaaggccacaagctggaaacaggggccccgcggccaccagccaccgtcaccaacgcggtgtcctggcggtccgaaggcatcaagtatcggaagaatgaggtgttcttggacgtcatcgagtctgtcaacctcttggtcagcgccaacggcaatgtcctgcgcagcgagatcgtgggctccatcaagatgcgagtcttcctctcgggcatgcccgagctgcgcctgggcctcaacgacaaggtcctctttgacaacacgggccgcggcaaaagcaaatccgtggagctggaggatgtgaagttccaccagtgtgtgcggctatcacgcttcgagaatgaccgcaccatctccttcatcccacccgacggcgagttcgagctcatgtcctaccgtctcaacacccacgtcaagcctttgatatggatcgagtcggtgatcgagaagcactcccacagccgcatcgagtacatgatcaaggccaaaagccagttcaagcggcggtcaacagccaacaacgtggagatccacattcccgtgcccaatgatgccgactcacccaagttcaagacgacggtggggagcgttaagtgggtccccgagaacagcgagatcgtgtggtccatcaagtccttcccgggcggcaaggagtacctgatgcgggcccacttcggcctgcctagtgtggaggccgaagacaaggagggcaagcccccgatcagtgtcaagttcgagatcccttacttcactacctccggcatccaggtgcgctacctgaagatcattgagaagagtgggtaccaggccctgccctgggtgcgttatatcacgcagaatggagattaccagctccggacccagtgaggggctgtcgcagccaacaccccggcctcggggctcctggtggcagcaccaggggacacacctgccaaacccaccagatggaggggccctccctggtctctggccaccctcccagcctctgcccagggacccctgccttccccaggccatctgctctgccgtcgacactcgtctcagaagcccctttcccagaagaggctggtcttcaagaagtctcgtttctttgcccctgaagtcagtttcaggggaaggatgtgaaatttttccgtgtagaggttacagccttttatgctgttgagctcccaggtaccaaaaagcttggccaacgcttgccagccagccagctgcaggtggcatctgccacgaaggaagcgccagcctcgccaggccagcaggggcgtcgttttgttgccattttgttgaacgttatgggtttatgggtgttcctggaacttgtctttgtgcattcgttgctgtttgtgttaccctcactgtccccatgtcccacccacgtcctacggcactcaggaagcacttggtgaggacgagccctcacccttcttgtcttccttcccagcagcgcccgcagcgggccatttacacgtcgaggctggcacctggcgcgctcgggggccactgtagcgtctgcctgctccctggactcgcaggcctcgcctgtggcgccttcccagggccagcctgggtcacgagatgctgtcactcagccagatcagtattgacccaccaggggaggtggggtttggtgagagacgccagcctcagactttttcccactgagggtccagagagcggggccacgtgtcacccacgtctgcgcttggtcacccgtcctccccaccctgtgtgtgtttatgtcatagttacattaaattccattcattgaatactc

SEQ ID NO: 68561 - DNA, 1452 bp, Homo sapiens
acgcgcttgaactggcttttggccttgatcatgtctcgatgcggctgtgggagtgcttctcgatcaccgactcgatccatatcaaaggcttgagcgtgggtgttgagacggtaggacatgagctcgaactcgccgtcgggtgggatgaaggagatggtgcggtcattctcgaaacgtgattgtcaacagccaacaacgtggagatccacattcccgtgcccaatgatgccgactcacccaagttcaagacgacggtggggagcgttaagtgggtccccgagaacagcgagatcgtgtggtccatcaagtccttcccgggcggcaaggagtacctgatgcgggcccacttcggcctgcctagtgtggaggccgaagacaaggagggcaagcccccgatcagtgtcaagttcgagatcccttacttcactacctccggcatccaggtgcgctacctgaagatcattgagaagagtgggtaccaggccctgccctgggtgcgttatatcacgcagaatggagattaccagctccggacccagtgaggggctgtcgcagccaacaccccggcctcggggctcctggtggcagcaccaggggacacacctgccaaacccaccagatggaggggccctccctggtctctggccaccctcccagcctctgcccagggacccctgccttccccaggccatctgctctgccgtcgacactcgtctcagaagcccctttcccagaagaggctggtcttcaagaagtctcgtttctttgcccctgaagtcagtttcaggggaaggatgtgaaatttttccgtgtagaggttacagccttttatgctgttgagctcccaggtaccaaaaagcttggccaacgcttgccagccagccagctgcaggtggcatctgccacgaaggaagcgccagcctcgccaggccagcaggggcgtcgttttgttgccattttgttgaacgttatgggtttatgggtgttcctggaacttgtctttgtgcattcgttgctgtttgtgttaccctcactgtccccatgtcccacccacgtcctacggcactcaggaagcacttggtgaggacgagccctcacccttcttgtcttccttcccagcagcgcccgcagcgggccatttacacgtcgaggctggcacctggcgcgctcgggggccactgtagcgtctgcctgctccctggactcgcaggcctcgcctgtggcgccttcccagggccagcctgggtcacgagatgctgtcactcagccagatcagtattgacccaccaggggaggtggggtttggtgagagacgccagcctcagactttttcccactgagggtccagagagcggggccacgtgtcacccacgtctgcgcttggtcacccgtcctccccaccctgtgtgtgtttatgtcatagttacattaaattccattcattgaatactc

SEQ ID NO: 68562 - DNA, 1341 bp, Homo sapiens
ggcctgcaaatcagaagttacaattgacttcacacggggctcacagatatggccaatggtttcacaacgcatcaacagccaacaacgtggagatccacattcccgtgcccaatgatgccgactcacccaagttcaagacgacggtggggagcgttaagtgggtccccgagaacagcgagatcgtgtggtccatcaagtccttcccgggcggcaaggagtacctgatgcgggcccacttcggcctgcctagtgtggaggccgaagacaaggagggcaagcccccgatcagtgtcaagttcgagatcccttacttcactacctccggcatccaggtgcgctacctgaagatcattgagaagagtgggtaccaggccctgccctgggtgcgttatatcacgcagaatggagattaccagctccggacccagtgaggggctgtcgcagccaacaccccggcctcggggctcctggtggcagcaccaggggacacacctgccaaacccaccagatggaggggccctccctggtctctggccaccctcccagcctctgcccagggacccctgccttccccaggccatctgctctgccgtcgacactcgtctcagaagcccctttcccagaagaggctggtcttcaagaagtctcgtttctttgcccctgaagtcagtttcaggggaaggatgtgaaatttttccgtgtagaggttacagccttttatgctgttgagctcccaggtaccaaaaagcttggccaacgcttgccagccagccagctgcaggtggcatctgccacgaaggaagcgccagcctcgccaggccagcaggggcgtcgttttgttgccattttgttgaacgttatgggtttatgggtgttcctggaacttgtctttgtgcattcgttgctgtttgtgttaccctcactgtccccatgtcccacccacgtcctacggcactcaggaagcacttggtgaggacgagccctcacccttcttgtcttccttcccagcagcgcccgcagcgggccatttacacgtcgaggctggcacctggcgcgctcgggggccactgtagcgtctgcctgctccctggactcgcaggcctcgcctgtggcgccttcccagggccagcctgggtcacgagatgctgtcactcagccagatcagtattgacccaccaggggaggtggggtttggtgagagacgccagcctcagactttttcccactgagggtccagagagcggggccacgtgtcacccacgtctgcgcttggtcacccgtcctccccaccctgtgtgtgtttatgtcatagttacattaaattccattcattgaatactc

SEQ ID NO: 68563 - DNA, 1034 bp, Homo sapiens
tagctgtccatttttctctcatctggtcgctacctgaatgatcagtgatcgagtggagtccaggtgctgcctgggtgcgttatatcacgcgtcaatgtgagattaccagctccggacccagtgaggggctgtcgcagccaacaccccggcctcggggctcctggtggcagcaccaggggacacacctgccaaacccaccagatggaggggccctccctggtctctggccaccctcccagcctctgcccagggacccctgccttccccaggccatctgctctgccgtcgacactcgtctcagaagcccctttcccagaagaggctggtcttcaagaagtctcgtttctttgcccctgaagtcagtttcaggggaaggatgtgaaatttttccgtgtagaggttacagccttttatgctgttgagctcccaggtaccaaaaagcttggccaacgcttgccagccagccagctgcaggtggcatctgccacgaaggaagcgccagcctcgccaggccagcaggggcgtcgttttgttgccattttgttgaacgttatgggtttatgggtgttcctggaacttgtctttgtgcattcgttgctgtttgtgttaccctcactgtccccatgtcccacccacgtcctacggcactcaggaagcacttggtgaggacgagccctcacccttcttgtcttccttcccagcagcgcccgcagcgggccatttacacgtcgaggctggcacctggcgcgctcgggggccactgtagcgtctgcctgctccctggactcgcaggcctcgcctgtggcgccttcccagggccagcctgggtcacgagatgctgtcactcagccagatcagtattgacccaccaggggaggtggggtttggtgagagacgccagcctcagactttttcccactgagggtccagagagcggggccacgtgtcacccacgtctgcgcttggtcacccgtcctccccaccctgtgtgtgtttatgtcatagttacattaaattccattcattgaatactc

SEQ ID NO: 68564 - DNA, 499 bp, Homo sapiens
ttatggctaggtacgaggctgggtgttaatgcggccgagggtgagctgtcgcgggcggcgcccggccttgctcaacgcccagcagtccccaccgtcgctgccgccgccaccgccctcggccgctgccgaggcctcctgcagccatcatgtccgccagcgccgtctacgtgctggacctgaagggcaaggtgctcatctgccggaactaccgtggcgacgtggacatgtcagaggtggagcacttcatgcccatcctgatggagaaggaggaggaggggatgctgtcgcccatcctggcccacgggggggtccgtttcatgtggatcaaacacaacaacctgtatctggttgccacatccaagaagaacgcgtgcgtgtcgctggtcttttctttcctctataaggtggtgcaggtgagtctcgctcggaggggccgtgggcttgggtggaggttgtcttggctctgcttgtggacctccccatacctggccaccctaca

SEQ ID NO: 68565 - DNA, 2344 bp, Homo sapiens
aggctggtacggtcacggtgtatggatccgcgcggctccccgaaccggaagtggaggtgagctgtcgcgggcggcgcccggccttgctcaacgcccagcagtccccaccgtcgctgccgccgccaccgccctcggccgctgccgaggcctcctgcagccatcatgtccgccagcgccgtctacgtgctggacctgaagggcaaggtgctcatctgccggaactaccgtggcgacgtggacatgtcagaggtggagcacttcatgcccatcctgatggagaaggaggaggaggggatgctgtcgcccatcctggcccacgggggggtccgtttcatgtggatcaaacacaacaacctgtatctggttgccacatccaagaagaacgcgtgcgtgtcgctggtcttttctttcctctataaggtggtgcaggtgttttccgagtacttcaaggagctggaggaggagagcatccgggacaactttgttatcatctacgagctgctggacgagctcatggacttcggctacccccagaccaccgacagcaagatcctgcaggagtacatcactcaggaaggccacaagctggaaacaggggccccgcggccaccagccaccgtcaccaacgcggtgtcctggcggtccgaaggcatcaagtatcggaagaatgaggtgttcttggacgtcatcgagtctgtcaacctcttggtcagcgccaacggcaatgtcctgcgcagcgagatcgtgggctccatcaagatgcgagtcttcctctcgggcatgcccgagctgcgcctgggcctcaacgacaaggtcctctttgacaacacgggccgcggcaaaagcaaatccgtggagctggaggatgtgaagttccaccagtgtgtgcggctatcacgcttcgagaatgaccgcaccatctccttcatcccacccgacggcgagttcgagctcatgtcctaccgtctcaacacccacgtcaagcctttgatatggatcgagtcggtgatcgagaagcactcccacagccgcatcgagtacatgatcaaggccaaaagccagttcaagcggcggtcaacagccaacaacgtggagatccacattcccgtgcccaatgatgccgactcacccaagttcaagacgacggtggggagcgttaagtgggtccccgagaacagcgagatcgtgtggtccatcaagtccttcccgggcggcaaggagtacctgatgcgggcccacttcggcctgcctagtgtggaggccgaagacaaggagggcaagcccccgatcagtgtcaagttcgagatcccttacttcactacctccggcatccaggtgcgctacctgaagatcattgagaagagtgggtaccaggccctgccctgggtgcgttatatcacgcagaatggagattaccagctccggacccagtgaggggctgtcgcagccaacaccccggcctcggggctcctggtggcagcaccaggggacacacctgccaaacccaccagatggaggggccctccctggtctctggccaccctcccagcctctgcccagggacccctgccttccccaggccatctgctctgccgtcgacactcgtctcagaagcccctttcccagaagaggctggtcttcaagaagtctcgtttctttgcccctgaagtcagtttcaggggaaggatgtgaaatttttccgtgtagaggttacagccttttatgctgttgagctcccaggtaccaaaaagcttggccaacgcttgccagccagccagctgcaggtggcatctgccacgaaggaagcgccagcctcgccaggccagcaggggcgtcgttttgttgccattttgttgaacgttatgggtttatgggtgttcctggaacttgtctttgtgcattcgttgctgtttgtgttaccctcactgtccccatgtcccacccacgtcctacggcactcaggaagcacttggtgaggacgagccctcacccttcttgtcttccttcccagcagcgcccgcagcgggccatttacacgtcgaggctggcacctggcgcgctcgggggccactgtagcgtctgcctgctccctggactcgcaggcctcgcctgtggcgccttcccagggccagcctgggtcacgagatgctgtcactcagccagatcagtattgacccaccaggggaggtggggtttggtgagagacgccagcctcagactttttcccactgagggtccagagagcggggccacgtgtcacccacgtctgcgcttggtcacccgtcctccccaccctgtgtgtgtttatgtcatagttacattaaattccattcattgaatactc

SEQ ID NO: 68566 - DNA, 2328 bp, Homo sapiens
ttatggctaggtacgaggctgggtgttaatgcggccgagggtgagctgtcgcgggcggcgcccggccttgctcaacgcccagcagtccccaccgtcgctgccgccgccaccgccctcggccgctgccgaggcctcctgcagccatcatgtccgccagcgccgtctacgtgctggacctgaagggcaaggtgctcatctgccggaactaccgtggcgacgtggacatgtcagaggtggagcacttcatgcccatcctgatggagaaggaggaggaggggatgctgtcgcccatcctggcccacgggggggtccgtttcatgtggatcaaacacaacaacctgtatctggttgccacatccaagaagaacgcgtgcgtgtcgctggtcttttctttcctctataaggtggtgcaggtgttttccgagtacttcaaggagctggaggaggagagcatccgggacaactttgttatcatctacgagctgctggacgagctcatggacttcggctacccccagaccaccgacagcaagatcctgcaggagtacatcactcaggaaggccacaagctggaaacaggggccccgcggccaccagccaccgtcaccaacgcggtgtcctggcggtccgaaggcatcaagtatcggaagaatgaggtgttcttggacgtcatcgagtctgtcaacctcttggtcagcgccaacggcaatgtcctgcgcagcgagatcgtgggctccatcaagatgcgagtcttcctctcgggcatgcccgagctgcgcctgggcctcaacgacaaggtcctctttgacaacacgggccgcggcaaaagcaaatccgtggagctggaggatgtgaagttccaccagtgtgtgcggctatcacgcttcgagaatgaccgcaccatctccttcatcccacccgacggcgagttcgagctcatgtcctaccgtctcaacacccacgtcaagcctttgatatggatcgagtcggtgatcgagaagcactcccacagccgcatcgagtacatgatcaaggccaaaagccagttcaagcggcggtcaacagccaacaacgtggagatccacattcccgtgcccaatgatgccgactcacccaagttcaagacgacggtggggagcgttaagtgggtccccgagaacagcgagatcgtgtggtccatcaagtccttcccgggcggcaaggagtacctgatgcgggcccacttcggcctgcctagtgtggaggccgaagacaaggagggcaagcccccgatcagtgtcaagttcgagatcccttacttcactacctccggcatccaggtgcgctacctgaagatcattgagaagagtgggtaccaggccctgccctgggtgcgttatatcacgcagaatggagattaccagctccggacccagtgaggggctgtcgcagccaacaccccggcctcggggctcctggtggcagcaccaggggacacacctgccaaacccaccagatggaggggccctccctggtctctggccaccctcccagcctctgcccagggacccctgccttccccaggccatctgctctgccgtcgacactcgtctcagaagcccctttcccagaagaggctggtcttcaagaagtctcgtttctttgcccctgaagtcagtttcaggggaaggatgtgaaatttttccgtgtagaggttacagccttttatgctgttgagctcccaggtaccaaaaagcttggccaacgcttgccagccagccagctgcaggtggcatctgccacgaaggaagcgccagcctcgccaggccagcaggggcgtcgttttgttgccattttgttgaacgttatgggtttatgggtgttcctggaacttgtctttgtgcattcgttgctgtttgtgttaccctcactgtccccatgtcccacccacgtcctacggcactcaggaagcacttggtgaggacgagccctcacccttcttgtcttccttcccagcagcgcccgcagcgggccatttacacgtcgaggctggcacctggcgcgctcgggggccactgtagcgtctgcctgctccctggactcgcaggcctcgcctgtggcgccttcccagggccagcctgggtcacgagatgctgtcactcagccagatcagtattgacccaccaggggaggtggggtttggtgagagacgccagcctcagactttttcccactgagggtccagagagcggggccacgtgtcacccacgtctgcgcttggtcacccgtcctccccaccctgtgtgtgtttatgtcatagttacattaaattccattcattgaatactc

SEQ ID NO: 68567 - DNA, 2753 bp, Homo sapiens
aggctggtacggtcacggtgtatggatccgcgcggctccccgaaccggaagtggaggtgagctgtcgcgggcggcgcccggccttgctcaacgcccagcagtccccaccgtcgctgccgccgccaccgccctcggccgctgccgaggcctcctgcagccatcatgtccgccagcgccgtctacgtgctggacctgaagggcaaggtgctcatctgccggaactaccgtggcgacgtggacatgtcagaggtggagcacttcatgcccatcctgatggagaaggaggaggaggggatgctgtcgcccatcctggcccacgggggggtccgtttcatgtggatcaaacacaacaacctgtatctggttgccacatccaagaagaacgcgtgcgtgtcgctggtcttttctttcctctataaggtggtgcaggtgttttccgagtacttcaaggagctggaggaggagagcatccgggacaactttgttatcatctacgagctgctggacgagctcatggacttcggctacccccagaccaccgacagcaagatcctgcaggagtacatcactcaggaaggccacaagctggaaacaggggccccgcggccaccagccaccgtcaccaacgcggtgtcctggcggtccgaaggcatcaagtatcggaagaatgaggtgttcttggacgtcatcgagtctgtcaacctcttggtcagcgccaacggcaatgtcctgcgcagcgagatcgtgggctccatcaagatgcgagtcttcctctcgggcatgcccgagctgcgcctgggcctcaacgacaaggtcctctttgacaacacgggccgcggcaaaagcaaatccgtggagctggaggatgtgaagttccaccagtgtgtgcggctatcacgcttcgagaatgaccgcaccatctccttcatcccacccgacggcgagttcgagctcatgtcctaccgtctcaacacccacgtcaagcctttgatatggatcgagtcggtgatcgagaagcactcccacagccgcatcgagtacatgatcaaggccaaaagccagttcaagcggcggtcaacagccaacaacgtggagatccacattcccgtgcccaatgatgccgactcacccaagttcaagacgacggtggggagcgttaagtgggtccccgagaacagcgagatcgtgtggtccatcaagtccttcccgggcggcaaggagtacctgatgcgggcccacttcggcctgcctagtgtggaggccgaagacaaggagggcaagcccccgatcagtgtcaagttcgagatcccttacttcactacctccggcatccaggtgcgctacctgaagatcattgagaagagtgggtaccaggccctgccctgggtgcgttatatcacgcagaatggagattaccagctccggacccagtgaggggctgtcgcagccaacaccccggcctcggggctcctggtggcagcaccaggggacacacctgccaaacccaccagatggaggggccctccctggtctctggccaccctcccagcctctgcccagggacccctgccttccccaggccatctgctctgccgtcgacactcgtctcagaagcccctttcccagaagaggctggtcttcaagaagtctcgtttctttgcccctgaagtcagtttcaggggaaggatgtgaaatttttccgtgtagaggttacagccttttatgctgttgagctcccaggtaccaaaaagcttggccaacgcttgccagccagccagctgcaggtggcatctgccacgaaggaagcgccagcctcgccaggccagcaggggcgtcgttttgttgccattttgttgaacgttatgggtttatgggtgttcctggaacttgtctttgtgcattcgttgctgtttgtgttaccctcactgtccccatgtcccacccacgtcctacggcactcaggaagcacttggtgaggacgagccctcacccttcttgtcttccttcccagcagcgcccgcagcgggccatttacacgtcgaggctggcacctggcgcgctcgggggccactgtagcgtctgcctgctccctggactcgcaggcctcgcctgtggcgccttcccagggccagcctgggtcacgagatgctgtcactcagccagatcagtattgacccaccaggggaggtggggtttggtgagagacgccagcctcagactttttcccactgagggtccagagagcggggccacgtgtcacccacgtctgcgcttggtcacccgtcctccccaccctgtgtgtgtttatgtcatagttacattaaattccattcattgaatactcaaaaaaaaaaaaaaaaaaaaaaaaaaaaaaaaaaaaaaaagaaaaaaacaaaaaaaaaaaaaaaaaaaaaaacaaaaaagaggggggggcgcgcgcccatgaaaatacccccgagcgagggggcgcccacaaatgcggcgagcgccccacgtttttgttggaaagaggaggggcgcccctatagagagggggtctaattatataaagagacgagaagagcggaggggcgtgtgtatacacacagagtgcgtgaggggcggaacaccaggcgagccaggggcgacacatgtgggagagaggcacaccaaaagaggggggggggggacacaaaggcgggggaacacacaccacacgaagaagatataaccgcccccacggggaacacaaaccaaaagtggaggggagaata

SEQ ID NO: 68568 - DNA, 1464 bp, Homo sapiens
ataggctaggagaggccggtgtaatcgacagagggcacatctccttcatcccacccgacggcgagttcgagctcatgtcctaccgtctcaacacccacgtcaagcctttgatatggatcgagtcggtgatcgagaagcactcccacagccgcatcgagtacatgatcaaggccaaaagccagttcaagcggcggtcaacagccaacaacgtggagatccacattcccgtgcccaatgatgccgactcacccaagttcaagacgacggtggggagcgttaagtgggtccccgagaacagcgagatcgtgtggtccatcaagtccttcccgggcggcaaggagtacctgatgcgggcccacttcggcctgcctagtgtggaggccgaagacaaggagggcaagcccccgatcagtgtcaagttcgagatcccttacttcactacctccggcatccaggtgcgctacctgaagatcattgagaagagtgggtaccaggccctgccctgggtgcgttatatcacgcagaatggagattaccagctccggacccagtgaggggctgtcgcagccaacaccccggcctcggggctcctggtggcagcaccaggggacacacctgccaaacccaccagatggaggggccctccctggtctctggccaccctcccagcctctgcccagggacccctgccttccccaggccatctgctctgccgtcgacactcgtctcagaagcccctttcccagaagaggctggtcttcaagaagtctcgtttctttgcccctgaagtcagtttcaggggaaggatgtgaaatttttccgtgtagaggttacagccttttatgctgttgagctcccaggtaccaaaaagcttggccaacgcttgccagccagccagctgcaggtggcatctgccacgaaggaagcgccagcctcgccaggccagcaggggcgtcgttttgttgccattttgttgaacgttatgggtttatgggtgttcctggaacttgtctttgtgcattcgttgctgtttgtgttaccctcactgtccccatgtcccacccacgtcctacggcactcaggaagcacttggtgaggacgagccctcacccttcttgtcttccttcccagcagcgcccgcagcgggccatttacacgtcgaggctggcacctggcgcgctcgggggccactgtagcgtctgcctgctccctggactcgcaggcctcgcctgtggcgccttcccagggccagcctgggtcacgagatgctgtcactcagccagatcagtattgacccaccaggggaggtggggtttggtgagagacgccagcctcagactttttcccactgagggtccagagagcggggccacgtgtcacccacgtctgcgcttggtcacccgtcctccccaccctgtgtgtgtttatgtcatagttacattaaattccattcattgaatactc

SEQ ID NO: 68569 - DNA, 1526 bp, Homo sapiens
aggctggtacggtcacggtgtatggatccgcgcggctccccgaaccggaagtggaggtgagctgtcgcgggcggcgcccggccttgctcaacgcccagcagtccccaccgtcgctgccgccgccaccgccctcggccgctgccgaggcctcctgcagccatcatgtccgccagcgccgtctacgtgctggacctgaagggcaaggtgctcatctgccggaactaccgtggcgacgtggacatgtcagaggtggagcacttcatgcccatcctgatggagaaggaggaggaggggatgctgtcgcccatcctggcccacgggggggtccgtttcatgtggatcaaacacaacaacctgtatctggttgccacatccaagaagaacgcgtgcgtgtcgctggtcttttctttcctctataaggtggtgcaggtgttttccgagtacttcaaggagctggaggaggagagcatccgggacaactttgttatcatctacgagctgctggacgagctcatggacttcggctacccccagaccaccgacagcaagatcctgcaggagtacatcactcaggaaggccacaagctggaaacaggggccccgcggccaccagccaccgtcaccaacgcggtgtcctggcggtccgaaggcatcaagtatcggaagaatgaggtgttcttggacgtcatcgagtctgtcaacctcttggtcagcgccaacggcaatgtcctgcgcagcgagatcgtgggctccatcaagatgcgagtcttcctctcgggcatgcccgagctgcgcctgggcctcaacgacaaggtcctctttgacaacacgggccgcggcaaaagcaaatccgtggagctggaggatgtgaagttccaccagtgtgtgcggctatcacgcttcgagaatgaccgcaccatctccttcatcccacccgacggcgagttcgagctcatgtcctaccgtctcaacacccacgtcaagcctttgatatggatcgagtcggtgatcgagaagcactcccacagccgcatcgagtacatgatcaaggccaaaagccagttcaagcggcggtcaacagccaacaacgtggagatccacattcccgtgcccaatgatgccgactcacccaagttcaagacgacggtggggagcgttaagtgggtccccgagaacagcgagatcgtgtggtccatcaagtccttcccgggcggcaaggagtacctgatgcgggcccacttcggcctgcctagtgtggaggccgaagacaaggagggcaagcccccgatcagtgtcaagttcgagatcccttacttcactacctccggcatccagactcagccagatcagtattgacccaccaggggaggtggggtttggtgagagacgccagcctcagactttttcccactgagggtccagagagcggggccacgtgtcacccacgtctgcgcttggtcacccgtcctccccaccctgtgtgtgtttatgtcatagttacattaaattccattcattgaatactc

SEQ ID NO: 68570 - DNA, 1151 bp, Homo sapiens
aggctggtacggtcacggtgtatggatccgcgcggctccccgaaccggaagtggaggtgagctgtcgcgggcggcgcccggccttgctcaacgcccagcagtccccaccgtcgctgccgccgccaccgccctcggccgctgccgaggcctcctgcagccatcatgtccgccagcgccgtctacgtgctggacctgaagggcaaggtgctcatctgccggaactaccgtggcgacgtggacatgtcagaggtggagcacttcatgcccatcctgatggagaaggaggaggaggggatgctgtcgcccatcctggcccacgggggggtccgtttcatgtggatcaaacacaacaacctgtatctggttgccacatccaagaagaacgcgtgcgtgtcgctggtcttttctttcctctataaggtggtgcaggtgttttccgagtacttcaaggagctggaggaggagagcatccgggacaactttgttatcatctacgagctgctggacgagctcatggacttcggctacccccagaccaccgacagcaagatcctgcaggagtacatcactcaggaaggccacaagctggaaacaggggccccgcggccaccagccaccgtcaccaacgcggtgtcctggcggtccgaaggcatcaagtatcggaagaatgaggtgttcttggacgtcatcgagtctgtcaacctcttggtaggcctcttttctttccttcttctgtagggttttatctcttccacgatagaaataaacacagcattttaaaactggcaaagccccgagagccgttctgtgtggtaacagatagcaggattcagtttgggccactcattgaaatgtgagtttgtcttatcttttttttttgagacggaatctcattctgtcgcccaggctagagtgtggtgacacgatctcggctcactgcaacctccgcctcccaggttcaggcgattctcctgcctcagcctcccgtgtagccgggattatagcacccgccaccacgctcggctaaagcttgttttctttattagcatttatgctgactgagaatccatacatgcacattatttttaaaaattagaagcagggtatgaggttagaaagtgaagggctcttatcagtcaccatgcacagaa

SEQ ID NO: 68571 - DNA, 622 bp, Homo sapiens
attgtagaactgaaaatgcaagcatcttttctcttccttccccaccccaggtgctcatctgccggaactaccgtggcgacgtggacatgtcagaggtggagcacttcatgcccatcctgatggagaaggaggaggaggggatgctgtcgcccatcctggcccacgggggggtccgtttcatgtggatcaaacacaacaacctgtatcgtatccctttgctgggggtgctcccaggggactcctgtgtgggtgttggtgtgtgtgcatatccacacgcctgcaagcagggctggtttgtgcacagcgcaagcattggacacagccatgccctcctggagctccctgctgcctgcggagacaggcagacaatgcacgatgacatgtgtgatgggtgtggggagaggagcaggtgtgacttgaacctcttcagcccaggggcccaggaagggaaatgacaccctggaggaagcctgcagggaggcctggcttctgccagctggaggggtgggcaggcactaggcgtgggtgaaggctctgcagggaagagcctcattccaacagctgcactcggggtggctggagagggggcgtgtagggcagcgaggctggagtggtcagcggg

SEQ ID NO: 68572 - DNA, 406 bp, Homo sapiens
gagaaatacctaatgtgaatgacgagttgatgggtgcagcacaccaacatggcacatgtatacctatgtaacaaacctgcacattgtgacatgtactctagaacttaaagtataataataaaaaaagagaacctttaaaaaaaaatagactgccagatagactaataaataaaaaagagaggttgaaataatcataaatgactaaggggatgttaccccacagaactacaaaaaacaaacaaaaaaacctcagagactactaaaacactcctatgcacacaaactagaaaacctagaagaaatgggtaaatttctggaaacatacaaccaccgaagattgaaccaggaagagattaaagccctgaacagactaataatgagtttcaaaattgaatcagtaataaaa

SEQ ID NO: 68573 - DNA, 1904 bp, Homo sapiens
aaaattagtgcggtgtggtggcacgcacctgtagtcccagctactcgggaggctgaagcgggagggtcccctaagtctaggaggtcgaggcttcagtgagcggtgattgtgccactgcactccagcctgggcgacagagcaagaccctgctttcccctcttgtcctccactaccctcaggaaaccaagaaagaccagcgtggagagttggtcgcccatctgctctaagctgctgtgtattcccctgtaatgtaaacatcgtgaaggtggagacccagttaaccttttaggtggaaggccagatgacagagggcggcatctgacccggaaggccctctgcaaccaggccaaatacatctacagggaaccaatgggaaacatctggggaggacaacccaaataagtatcatgcgagcaagggatggtttgagaactttaaaaatcgctgctgttttgcaacatacgaagttgatggggaggaaggacccttaaatcctgagtgggtatcgagtattccaagcaactggagagaggctttgtgcctcaacaggtcttcaacgccaaggagatgacccatcttttgcagtgcatgccttcctacttttggggcaaaagacaaaaatctggaaagcttagaggaagctaaggacaggatttccctcatttttttgtggcagtgcctcaggtgacaaaatgataaaaccactgctgctttacaaagactctaacaccccacttgtcttttagagataaacgccttcctgttttcttgtaatcacacccagaatcaccactgccactttttggattagttttacaatttttttatccatcaaatccgaagtcatttaacaaaaaaaatctggaaatcagaatgttgctaactgtggacagaggtcccaatcacccagattcattattctttgttcattctaatgttgatactgtgtttctccctcaggaaggccctagctttcttcagcccttgggtcagggtataactgaagcatttgaacataatcaagcatatgtttgaccactttgctgactgtattgaaaaaaccctcaccttactctgaaagaagcatggcaacagtacaatattgccgatgctttggtagtgataaaagaggtgatgggtgatataaaatcagccactcttaagcttgctggaaactgtgggaggatgtgtgaatgatgcatatttccctagagctaatgaagaagttaaaaaaaatcttagtgtctgcaaaacaggtgggtttaagatttattgatattagggaaagtgaaattaatgagctactcaagtttctgtctttggtcatcactgagagtctatttccataggaagaagtctttgcagaggaaattgaatgctgtctgatgctacaattcatatggatcctttcctggattgaagcctgacttttaaaaaaggtttcaataaattgcttatacctatgaagagatgcaaaagaaccttcaaaataaagcaaaggacttgaagaaagagaaggaagacatgaagaagaggatgtcatttaggtgaaggtgatggatacagaatctgagtctgaggggagcctggttgacagagagacaaaaaaagaaattttttttttctgactaaaaaaaaaaaggaaattttgttaacaaaatcaagaatttaaaaaaaatgctgtgagagctgatctatgcatctggtttgtgagccagtattctgtgatggctgcagtttttagagatcctagtagctctacacatctgtcttctgctttcctagaacctgggcaccccatggatgactcactgctggttttgtgtgtgtgtgtgtgtgatttaaaattacattcagtcaactctatagccctatgggctttttgaataaccaaatgctcaaca

SEQ ID NO: 68574 - DNA, 942 bp, Homo sapiens
cttagaggtctgtaaaggagatgactatgctgttagggctgtggtagaaacctttaataacaagtgaaaagagcttgtatttgccaaaatgaacacaggatatgattctttttttgcttttgctttggagttgtatcagctctgtgcggtcacatgggtatctacaaatcaaagcacccatcaaccagatgcatctctgagagttaacagcagaaggtggcataataaaagaagttctcggtagtgaaaaaggttggaaaccaccagctaaaccaatcctcttgtaccaataggagattcaagttgagaggtgggaaagggcctatctcagagtaggtgcttgaatacttcttactagaatgaaagaaggaacttaagatcacacagccatgttactgcaggacggggaatggaacctaggtcttcttatttttggttcagtgttaactcccattctctaagcagactgggcctgttattcaaactgccttcccataggtgcttccctgcttctctcctcacccagagaaggacttacaaacagcttatcttcagaggttttgtgcctgatagttatggaatgtgctggtttgagcagggaggatgtaaggggagggaatgctaaaaggctgtctacttagagtcaggtttcctgggtaagtccctggaaccccatccccttcccctttcttgagaccccaggacttgctccagtaactgccaccctgtgcctttgcttcagggccatgctggataaggagctggctgcctctgtgaacatcctactcaaggcatcttcactgtgagttttgctgttgccattggagggggagtggggggagtgtggggagtgctagggtcaggtcctggctggtgtaaagaacactgaattaaaggaattgtcagaataactcaaaggcatttagataatcaaaaaaaaat

SEQ ID NO: 68575 - DNA, 4759 bp, Homo sapiens
aaaattagtgcggtgtggtggcacgcacctgtagtcccagctactcgggaggctgaagcgggagggtcccctaagtctaggaggtcgaggcttcagtgagcggtgattgtgccactgcactccagcctgggcgacagagcaagaccctgctttcccctcttgtcctccactaccctcaggaaaccaagaaagaccagcgtggagagttggtcgcccatctgctctaagctgctgtgtattcccctgtaatgtaaacatcgtgaaggtggagacccagttaaccttttaggtggaaggccagatgacagagggcggcatctgacccggaaggccctctgcaaccaggccaaatacatctacagggaaccaatgggaaacatctggggaggacaacccaaataagtatcatgcgagcaagggatggtttgagaactttaaaaatcgctgctgttttgcaacatacgaagttgatggggaggaaggacccttaaatcctgagtgggtatcgagtattccaagcaactggagagaggctttgtgcctcaacaggtcttcaacgccaaggagatgacccatcttttgcagtgcatgccttcctacttttggggcaaaagacaaaaatctggaaagcttagaggaagctaaggacaggatttccctcatttttttgtggcagtgcctcaggtgacaaaatgataaaaccactgctgctttacaaagactctaacaccccacttgtcttttagagataaacgccttcctgttttcttgtaatcacacccagaatcaccactgccactttttggattagttttacaatttttttatccatcaaatccgaagtcatttaacaaaaaaaatctggaaatcagaatgttgctaactgtggacagaggtcccaatcacccagattcattattctttgttcattctaatgttgatactgtgtttctccctcaggaaggccctagctttcttcagcccttgggtcagggtataactgaagcatttgaacataatcaagcatatgtttgaccactttgctgactgtattgaaaaaaccctcaccttactctgaaagaagcatggcaacagtacaatattgccgatgctttggtagtgataaaagaggtgatgggtgatataaaatcagccactcttaagcttgctggaaactgtgggaggatgtgtgaatgatgcatatttccctagagctaatgaagaagttaaaaaaaatcttagtgtctgcaaaacaggtgggtttaagatttattgatattagggaaagtgaaattaatgagctactcaagtttctgtctttggtcatcactgagagtctatttccataggaagaagtctttgcagaggaaattgaatgctgtctgatgctacaattcatatggatcctttcctggattgaagcctgacttttaaaaaaggtttcaataaattgcttatacctatgaagagatgcaaaagaaccttcaaaataaagcaaaggacttgaagaaagagaaggaagacatgaagaagaggatgtcatttaggtgaagggccatgctggataaggagctggctgcctctgtgaacatcctactcaaggcatcttcactgctgtacatccttttgaaatcccagagatcttcagtctccctgtggattaaggagatgtgcagtatttaaagtggcttcaggaaggcatggaagaggactgagtggggaaagctttttgtgcatgctgctggctacctccagcggctgcctccagcctccatcagctgcactctggggaagaggaggctgccttctacctcccagcatctctggatttcatgttcctgtcagcacagaggagctaaatggcctgtagaggctgaaggtctgaggctcctaaagctggaagaaaaggctgggccagtcaggccaagcaagaacacagtgtaacttgtctctgagtgcttcatggttaagggggctaagcaggcacaagggcatgaggatggttatatgtacagactgaggggaagaaagcagtgaagatgagacttgccatcttcttgagtcagtaggcctgcctcaggtgcctaggatgtaattgctctgctgcttctcatggggaggagtggccctcatgaccttgtttacctggaagagtgtgggatgaatgcctcctcctatggggactcgcaagtgctttagcaaaaggataaattgctaattgtggcatttcgtggatcagcaggattatttctccttgctaaagaggattttgttggtcctgaattctgaggaggtgggactaggaatgggctccatgagcctgtgtatgactcagggaatattaggactttggcacagcctcatgggttgggagtaagtcttggctcttccctagcctgaatgacagacatcagatcattctggtgctttgtccatgaagatgtagattctgagcccacccaactaatcttttcacttgagcacagaaacagccccgggaatcggacagacccgtgtctttcaggtttgcttcacagagccccaggggttgacaataggtgccttggagactgcctgcatggggatttttaaaaagctttctttgttaaaggtttgtaaaccactcctctgagcctgttttcattttatagattattcagggaactgaactgcacagagatccagaaagtgggtagtgcaggctgtagtgctgataactactgtactacttggatctttgtgctcccaaataccaaatggaagaggatctctgagagtcctttgcaaagatcttgtagggactttaggctggggccttcggaaaattccagaggattccaatggagattttgagggactgactcagaagaacaaagagaatgataatggtgatgtccctgctttttacaacagatcatgttctgatatatatgcaaatctgtgtaaagtaaaccctacctaaaatgtactggggacccaagatggactgcctgtattgcttccaggataaagtccaatttctagctctggtttttataaccttgcttcagctcaccttttccgtcatcatcccctccatctcctctcccacgctgggaaatggatggctgcactatactgtgtgatgttattgctatgttcatgccatcccctctgcctggaatgcccttctgcatgaatgcctgtgaaatgttgttgctcctttgtatggcctggcttccgtggttggcaggaatctcttctttcgtggtattcctgtcatctttgtgcatcacagtcagctttgtattcctagcttgtaagctacttgaggataggggcatgtctgaatctatttaatctcttgcacctgtttggcaaattgatgttttaagtatttaaataactaaagctctctctacagtacatactcacttttgatttatgaattggcaaaattcaacttttttccttgaatattcttaaagtgagatgaattccaaaggagagtgttctgtgtgtggccttcattgagtggttttctgttaccagaaagctcttggtggccttcctcttccctggtgtcaaggttgactgttataggaaatgggaggggagagggccgtttctgccacgcattgtcctaggttcttaacattatttaatccttataatgcaatgttatcctcattttacagatgaaacctgagaccaaagaacatgtaacacataaagtacattgcagagttaggatgtgaacccaactctgattctaaacctaatgctctcactctttcattcagaggttcagtcagttctttgtaggctgtagatccagagaagctgccgtagccaacaataaagttgttagtttttaaaacatctatgtggtaagttggtctggcacttaaaaatgtattgtttcccaggcacggtggttcacacctgtaatcccagcattttgggaggccgaggcaggcggatcattaggtcaaaagattgagaccatcctgaccaacatggtgaaaccccgtctctactaaaagtacaaaaattagctgggtgtggtggcgcatgcctctagtcccagctacctgggaggctgaggcaggagaattgcttgaacccaggaggcagaggttgcagtgagccaagatcatgctactgcactacagcctggcaacaaagcgagactctgtctaaaatatatatatatatatatattgtttactactcaccacagatctgcaggagttcactgatctctaggatctgccttaactccaacttacatgttttggtcactattacaaactgtcatcccagaatgatgctgcagaggctagggctaggacacagaccagtgtttccatgtgggaattccctcccagtatttcttaggaaatgtatgttttttgaatccataatccctagaaaaatcagttgaggaaatgagaagtattgtaattattctgtgaatagtaacacttaccattatggagacatcactagtttgaaagaatccaacttcatcaaatattaacgtaccgagttgaaggctacaagaactgagacaggagcatagcagagagaaacggtcaccatctcattagccctatttttggttgttgtgatgccattacatctgtatatctggccatatcagctgctaatggtgagttcttgcaaacaaaatgatttgataaacaacctaccatactttatacaaatcttatggtgttccgagaaataaactttggaagcaaaataaaaaaaaaat

SEQ ID NO: 68576 - DNA, 1811 bp, Homo sapiens
aaaattagtgcggtgtggtggcacgcacctgtagtcccagctactcgggaggctgaagcgggagggtcccctaagtctaggaggtcgaggcttcagtgagcggtgattgtgccactgcactccagcctgggcgacagagcaagaccctgctttcccctcttgtcctccactaccctcaggaaaccaagaaagaccagcgtggagagttggtcgcccatctgctctaagctgctgtgtattcccctgtaatgtaaacatcgtgaaggtggagacccagttaaccttttaggtggaaggccagatgacagagggcggcatctgacccggaaggccctctgcaaccaggccaaatacatctacagggaaccaatgggaaacatctggggaggacaacccaaataagtatcatgcgagcaagggatggtttgagaactttaaaaatcgctgctgttttgcaacatacgaagttgatggggaggaaggacccttaaatcctgagtgggtatcgagtattccaagcaactggagagaggctttgtgcctcaacaggtcttcaacgccaaggagatgacccatcttttgcagtgcatgccttcctacttttggggcaaaagacaaaaatctggaaagcttagaggaagctaaggacaggatttccctcatttttttgtggcagtgcctcaggtgacaaaatgataaaaccactgctgctttacaaagactctaacaccccacttgtcttttagagataaacgccttcctgttttcttgtaatcacacccagaatcaccactgccactttttggattagttttacaatttttttatccatcaaatccgaagtcatttaacaaaaaaaatctggaaatcagaatgttgctaactgtggacagaggtcccaatcacccagattcattattctttgttcattctaatgttgatactgtgtttctccctcaggaaggccctagctttcttcagcccttgggtcagggtataactgaagcatttgaacataatcaagcatatgtttgaccactttgctgactgtattgaaaaaaccctcaccttactctgaaagaagcatggcaacagtacaatattgccgatgctttggtagtgataaaagaggtgatgggtgatataaaatcagccactcttaagcttgctggaaactgtgggaggatgtgtgaatgatgcatatttccctagagctaatgaagaagttaaaaaaaatcttagtgtctgcaaaacaggaagaagtctttgcagaggaaattgaatgctgtctgatgctacaattcatatggatcctttcctggattgaagcctgacttttaaaaaaggtttcaataaattgcttatacctatgaagagatgcaaaagaaccttcaaaataaagcaaaggacttgaagaaagagaaggaagacatgaagaagaggatgtcatttaggtgaaggtgatggatacagaatctgagtctgaggggagcctggttgacagagagacaaaaaaagaaattttttttttctgactaaaaaaaaaaaggaaattttgttaacaaaatcaagaatttaaaaaaaatgctgtgagagctgatctatgcatctggtttgtgagccagtattctgtgatggctgcagtttttagagatcctagtagctctacacatctgtcttctgctttcctagaacctgggcaccccatggatgactcactgctggttttgtgtgtgtgtgtgtgtgatttaaaattacattcagtcaactctatagccctatgggctttttgaataaccaaatgctcaaca

SEQ ID NO: 68577 - DNA, 360 bp, Homo sapiens
ggtcgctgctcagggaaatgcggaggccagtaggcttacgtgtttaccgcgtagggcaaagccttgccaaattcccggccagcggagcggcgagggtggggactcacgggaagttaaacagcctcgtcggcgtcctcgaggcttacggccgcggctgaggcctccccaggtggagcggtggcctggaggggaatcttgatcctgggccagccacctgtcaagaggaggcggagcgtcatgcctctggaagactggatgaatattctccaggagcctgacgaaggacgtgcgccgccttgttggtgttgatcagtccaccaaggagaagcagctggtcgcagtggccgtacctgtaatccc

SEQ ID NO: 68578 - DNA, 4666 bp, Homo sapiens
aaaattagtgcggtgtggtggcacgcacctgtagtcccagctactcgggaggctgaagcgggagggtcccctaagtctaggaggtcgaggcttcagtgagcggtgattgtgccactgcactccagcctgggcgacagagcaagaccctgctttcccctcttgtcctccactaccctcaggaaaccaagaaagaccagcgtggagagttggtcgcccatctgctctaagctgctgtgtattcccctgtaatgtaaacatcgtgaaggtggagacccagttaaccttttaggtggaaggccagatgacagagggcggcatctgacccggaaggccctctgcaaccaggccaaatacatctacagggaaccaatgggaaacatctggggaggacaacccaaataagtatcatgcgagcaagggatggtttgagaactttaaaaatcgctgctgttttgcaacatacgaagttgatggggaggaaggacccttaaatcctgagtgggtatcgagtattccaagcaactggagagaggctttgtgcctcaacaggtcttcaacgccaaggagatgacccatcttttgcagtgcatgccttcctacttttggggcaaaagacaaaaatctggaaagcttagaggaagctaaggacaggatttccctcatttttttgtggcagtgcctcaggtgacaaaatgataaaaccactgctgctttacaaagactctaacaccccacttgtcttttagagataaacgccttcctgttttcttgtaatcacacccagaatcaccactgccactttttggattagttttacaatttttttatccatcaaatccgaagtcatttaacaaaaaaaatctggaaatcagaatgttgctaactgtggacagaggtcccaatcacccagattcattattctttgttcattctaatgttgatactgtgtttctccctcaggaaggccctagctttcttcagcccttgggtcagggtataactgaagcatttgaacataatcaagcatatgtttgaccactttgctgactgtattgaaaaaaccctcaccttactctgaaagaagcatggcaacagtacaatattgccgatgctttggtagtgataaaagaggtgatgggtgatataaaatcagccactcttaagcttgctggaaactgtgggaggatgtgtgaatgatgcatatttccctagagctaatgaagaagttaaaaaaaatcttagtgtctgcaaaacaggaagaagtctttgcagaggaaattgaatgctgtctgatgctacaattcatatggatcctttcctggattgaagcctgacttttaaaaaaggtttcaataaattgcttatacctatgaagagatgcaaaagaaccttcaaaataaagcaaaggacttgaagaaagagaaggaagacatgaagaagaggatgtcatttaggtgaagggccatgctggataaggagctggctgcctctgtgaacatcctactcaaggcatcttcactgctgtacatccttttgaaatcccagagatcttcagtctccctgtggattaaggagatgtgcagtatttaaagtggcttcaggaaggcatggaagaggactgagtggggaaagctttttgtgcatgctgctggctacctccagcggctgcctccagcctccatcagctgcactctggggaagaggaggctgccttctacctcccagcatctctggatttcatgttcctgtcagcacagaggagctaaatggcctgtagaggctgaaggtctgaggctcctaaagctggaagaaaaggctgggccagtcaggccaagcaagaacacagtgtaacttgtctctgagtgcttcatggttaagggggctaagcaggcacaagggcatgaggatggttatatgtacagactgaggggaagaaagcagtgaagatgagacttgccatcttcttgagtcagtaggcctgcctcaggtgcctaggatgtaattgctctgctgcttctcatggggaggagtggccctcatgaccttgtttacctggaagagtgtgggatgaatgcctcctcctatggggactcgcaagtgctttagcaaaaggataaattgctaattgtggcatttcgtggatcagcaggattatttctccttgctaaagaggattttgttggtcctgaattctgaggaggtgggactaggaatgggctccatgagcctgtgtatgactcagggaatattaggactttggcacagcctcatgggttgggagtaagtcttggctcttccctagcctgaatgacagacatcagatcattctggtgctttgtccatgaagatgtagattctgagcccacccaactaatcttttcacttgagcacagaaacagccccgggaatcggacagacccgtgtctttcaggtttgcttcacagagccccaggggttgacaataggtgccttggagactgcctgcatggggatttttaaaaagctttctttgttaaaggtttgtaaaccactcctctgagcctgttttcattttatagattattcagggaactgaactgcacagagatccagaaagtgggtagtgcaggctgtagtgctgataactactgtactacttggatctttgtgctcccaaataccaaatggaagaggatctctgagagtcctttgcaaagatcttgtagggactttaggctggggccttcggaaaattccagaggattccaatggagattttgagggactgactcagaagaacaaagagaatgataatggtgatgtccctgctttttacaacagatcatgttctgatatatatgcaaatctgtgtaaagtaaaccctacctaaaatgtactggggacccaagatggactgcctgtattgcttccaggataaagtccaatttctagctctggtttttataaccttgcttcagctcaccttttccgtcatcatcccctccatctcctctcccacgctgggaaatggatggctgcactatactgtgtgatgttattgctatgttcatgccatcccctctgcctggaatgcccttctgcatgaatgcctgtgaaatgttgttgctcctttgtatggcctggcttccgtggttggcaggaatctcttctttcgtggtattcctgtcatctttgtgcatcacagtcagctttgtattcctagcttgtaagctacttgaggataggggcatgtctgaatctatttaatctcttgcacctgtttggcaaattgatgttttaagtatttaaataactaaagctctctctacagtacatactcacttttgatttatgaattggcaaaattcaacttttttccttgaatattcttaaagtgagatgaattccaaaggagagtgttctgtgtgtggccttcattgagtggttttctgttaccagaaagctcttggtggccttcctcttccctggtgtcaaggttgactgttataggaaatgggaggggagagggccgtttctgccacgcattgtcctaggttcttaacattatttaatccttataatgcaatgttatcctcattttacagatgaaacctgagaccaaagaacatgtaacacataaagtacattgcagagttaggatgtgaacccaactctgattctaaacctaatgctctcactctttcattcagaggttcagtcagttctttgtaggctgtagatccagagaagctgccgtagccaacaataaagttgttagtttttaaaacatctatgtggtaagttggtctggcacttaaaaatgtattgtttcccaggcacggtggttcacacctgtaatcccagcattttgggaggccgaggcaggcggatcattaggtcaaaagattgagaccatcctgaccaacatggtgaaaccccgtctctactaaaagtacaaaaattagctgggtgtggtggcgcatgcctctagtcccagctacctgggaggctgaggcaggagaattgcttgaacccaggaggcagaggttgcagtgagccaagatcatgctactgcactacagcctggcaacaaagcgagactctgtctaaaatatatatatatatatatattgtttactactcaccacagatctgcaggagttcactgatctctaggatctgccttaactccaacttacatgttttggtcactattacaaactgtcatcccagaatgatgctgcagaggctagggctaggacacagaccagtgtttccatgtgggaattccctcccagtatttcttaggaaatgtatgttttttgaatccataatccctagaaaaatcagttgaggaaatgagaagtattgtaattattctgtgaatagtaacacttaccattatggagacatcactagtttgaaagaatccaacttcatcaaatattaacgtaccgagttgaaggctacaagaactgagacaggagcatagcagagagaaacggtcaccatctcattagccctatttttggttgttgtgatgccattacatctgtatatctggccatatcagctgctaatggtgagttcttgcaaacaaaatgatttgataaacaacctaccatactttatacaaatcttatggtgttccgagaaataaactttggaagcaaaataaaaaaaaaat

SEQ ID NO: 68579 - DNA, 3948 bp, Homo sapiens
cttagaggtctgtaaaggagatgactatgctgttagggctgtggtagaaacctttaataacaagtgaaaagagcttgtatttgccaaaatgaacacaggatatgattctttttttgcttttgctttggagttgtatcagctctgtgcggtcacatgggtatctacaaatcaaagcacccatcaaccagatgcatctctgagagttaacagcagaaggtggcataataaaagaagttctcggtagtgaaaaaggttggaaaccaccagctaaaccaatcctcttgtaccaataggagattcaagttgagaggtgggaaagggcctatctcagagtaggtgcttgaatacttcttactagaatgaaagaaggaacttaagatcacacagccatgttactgcaggacggggaatggaacctaggtcttcttatttttggttcagtgttaactcccattctctaagcagactgggcctgttattcaaactgccttcccataggtgcttccctgcttctctcctcacccagagaaggacttacaaacagcttatcttcagaggttttgtgcctgatagttatggaatgtgctggtttgagcagggaggatgtaaggggagggaatgctaaaaggctgtctacttagagtcaggtttcctgggtaagtccctggaaccccatccccttcccctttcttgagaccccaggacttgctccagtaactgccaccctgtgcctttgcttcagggccatgctggataaggagctggctgcctctgtgaacatcctactcaaggcatcttcactgctgtacatccttttgaaatcccagagatcttcagtctccctgtggattaaggagatgtgcagtatttaaagtggcttcaggaaggcatggaagaggactgagtggggaaagctttttgtgcatgctgctggctacctccagcggctgcctccagcctccatcagctgcactctggggaagaggaggctgccttctacctcccagcatctctggatttcatgttcctgtcagcacagaggagctaaatggcctgtagaggctgaaggtctgaggctcctaaagctggaagaaaaggctgggccagtcaggccaagcaagaacacagtgtaacttgtctctgagtgcttcatggttaagggggctaagcaggcacaagggcatgaggatggttatatgtacagactgaggggaagaaagcagtgaagatgagacttgccatcttcttgagtcagtaggcctgcctcaggtgcctaggatgtaattgctctgctgcttctcatggggaggagtggccctcatgaccttgtttacctggaagagtgtgggatgaatgcctcctcctatggggactcgcaagtgctttagcaaaaggataaattgctaattgtggcatttcgtggatcagcaggattatttctccttgctaaagaggattttgttggtcctgaattctgaggaggtgggactaggaatgggctccatgagcctgtgtatgactcagggaatattaggactttggcacagcctcatgggttgggagtaagtcttggctcttccctagcctgaatgacagacatcagatcattctggtgctttgtccatgaagatgtagattctgagcccacccaactaatcttttcacttgagcacagaaacagccccgggaatcggacagacccgtgtctttcaggtttgcttcacagagccccaggggttgacaataggtgccttggagactgcctgcatggggatttttaaaaagctttctttgttaaaggtttgtaaaccactcctctgagcctgttttcattttatagattattcagggaactgaactgcacagagatccagaaagtgggtagtgcaggctgtagtgctgataactactgtactacttggatctttgtgctcccaaataccaaatggaagaggatctctgagagtcctttgcaaagatcttgtagggactttaggctggggccttcggaaaattccagaggattccaatggagattttgagggactgactcagaagaacaaagagaatgataatggtgatgtccctgctttttacaacagatcatgttctgatatatatgcaaatctgtgtaaagtaaaccctacctaaaatgtactggggacccaagatggactgcctgtattgcttccaggataaagtccaatttctagctctggtttttataaccttgcttcagctcaccttttccgtcatcatcccctccatctcctctcccacgctgggaaatggatggctgcactatactgtgtgatgttattgctatgttcatgccatcccctctgcctggaatgcccttctgcatgaatgcctgtgaaatgttgttgctcctttgtatggcctggcttccgtggttggcaggaatctcttctttcgtggtattcctgtcatctttgtgcatcacagtcagctttgtattcctagcttgtaagctacttgaggataggggcatgtctgaatctatttaatctcttgcacctgtttggcaaattgatgttttaagtatttaaataactaaagctctctctacagtacatactcacttttgatttatgaattggcaaaattcaacttttttccttgaatattcttaaagtgagatgaattccaaaggagagtgttctgtgtgtggccttcattgagtggttttctgttaccagaaagctcttggtggccttcctcttccctggtgtcaaggttgactgttataggaaatgggaggggagagggccgtttctgccacgcattgtcctaggttcttaacattatttaatccttataatgcaatgttatcctcattttacagatgaaacctgagaccaaagaacatgtaacacataaagtacattgcagagttaggatgtgaacccaactctgattctaaacctaatgctctcactctttcattcagaggttcagtcagttctttgtaggctgtagatccagagaagctgccgtagccaacaataaagttgttagtttttaaaacatctatgtggtaagttggtctggcacttaaaaatgtattgtttcccaggcacggtggttcacacctgtaatcccagcattttgggaggccgaggcaggcggatcattaggtcaaaagattgagaccatcctgaccaacatggtgaaaccccgtctctactaaaagtacaaaaattagctgggtgtggtggcgcatgcctctagtcccagctacctgggaggctgaggcaggagaattgcttgaacccaggaggcagaggttgcagtgagccaagatcatgctactgcactacagcctggcaacaaagcgagactctgtctaaaatatatatatatatatatattgtttactactcaccacagatctgcaggagttcactgatctctaggatctgccttaactccaacttacatgttttggtcactattacaaactgtcatcccagaatgatgctgcagaggctagggctaggacacagaccagtgtttccatgtgggaattccctcccagtatttcttaggaaatgtatgttttttgaatccataatccctagaaaaatcagttgaggaaatgagaagtattgtaattattctgtgaatagtaacacttaccattatggagacatcactagtttgaaagaatccaacttcatcaaatattaacgtaccgagttgaaggctacaagaactgagacaggagcatagcagagagaaacggtcaccatctcattagccctatttttggttgttgtgatgccattacatctgtatatctggccatatcagctgctaatggtgagttcttgcaaacaaaatgatttgataaacaacctaccatactttatacaaatcttatggtgttccgagaaataaactttggaagcaaaataaaaaaaaaat

SEQ ID NO: 68580 - DNA, 3384 bp, Homo sapiens
ggtgtaactctgcctgtgtttgcatgccacctccagaaccactaaaatataatttctcagtgggtgactgagtaagactggcagcaattgcaaaagcagattcatgccatgtgtcactcttcacagtcaggaacttatttacctcttggaactttccaaaggaacgatgatggtggcgggccatgctggataaggagctggctgcctctgtgaacatcctactcaaggcatcttcactgctgtacatccttttgaaatcccagagatcttcagtctccctgtggattaaggagatgtgcagtatttaaagtggcttcaggaaggcatggaagaggactgagtggggaaagctttttgtgcatgctgctggctacctccagcggctgcctccagcctccatcagctgcactctggggaagaggaggctgccttctacctcccagcatctctggatttcatgttcctgtcagcacagaggagctaaatggcctgtagaggctgaaggtctgaggctcctaaagctggaagaaaaggctgggccagtcaggccaagcaagaacacagtgtaacttgtctctgagtgcttcatggttaagggggctaagcaggcacaagggcatgaggatggttatatgtacagactgaggggaagaaagcagtgaagatgagacttgccatcttcttgagtcagtaggcctgcctcaggtgcctaggatgtaattgctctgctgcttctcatggggaggagtggccctcatgaccttgtttacctggaagagtgtgggatgaatgcctcctcctatggggactcgcaagtgctttagcaaaaggataaattgctaattgtggcatttcgtggatcagcaggattatttctccttgctaaagaggattttgttggtcctgaattctgaggaggtgggactaggaatgggctccatgagcctgtgtatgactcagggaatattaggactttggcacagcctcatgggttgggagtaagtcttggctcttccctagcctgaatgacagacatcagatcattctggtgctttgtccatgaagatgtagattctgagcccacccaactaatcttttcacttgagcacagaaacagccccgggaatcggacagacccgtgtctttcaggtttgcttcacagagccccaggggttgacaataggtgccttggagactgcctgcatggggatttttaaaaagctttctttgttaaaggtttgtaaaccactcctctgagcctgttttcattttatagattattcagggaactgaactgcacagagatccagaaagtgggtagtgcaggctgtagtgctgataactactgtactacttggatctttgtgctcccaaataccaaatggaagaggatctctgagagtcctttgcaaagatcttgtagggactttaggctggggccttcggaaaattccagaggattccaatggagattttgagggactgactcagaagaacaaagagaatgataatggtgatgtccctgctttttacaacagatcatgttctgatatatatgcaaatctgtgtaaagtaaaccctacctaaaatgtactggggacccaagatggactgcctgtattgcttccaggataaagtccaatttctagctctggtttttataaccttgcttcagctcaccttttccgtcatcatcccctccatctcctctcccacgctgggaaatggatggctgcactatactgtgtgatgttattgctatgttcatgccatcccctctgcctggaatgcccttctgcatgaatgcctgtgaaatgttgttgctcctttgtatggcctggcttccgtggttggcaggaatctcttctttcgtggtattcctgtcatctttgtgcatcacagtcagctttgtattcctagcttgtaagctacttgaggataggggcatgtctgaatctatttaatctcttgcacctgtttggcaaattgatgttttaagtatttaaataactaaagctctctctacagtacatactcacttttgatttatgaattggcaaaattcaacttttttccttgaatattcttaaagtgagatgaattccaaaggagagtgttctgtgtgtggccttcattgagtggttttctgttaccagaaagctcttggtggccttcctcttccctggtgtcaaggttgactgttataggaaatgggaggggagagggccgtttctgccacgcattgtcctaggttcttaacattatttaatccttataatgcaatgttatcctcattttacagatgaaacctgagaccaaagaacatgtaacacataaagtacattgcagagttaggatgtgaacccaactctgattctaaacctaatgctctcactctttcattcagaggttcagtcagttctttgtaggctgtagatccagagaagctgccgtagccaacaataaagttgttagtttttaaaacatctatgtggtaagttggtctggcacttaaaaatgtattgtttcccaggcacggtggttcacacctgtaatcccagcattttgggaggccgaggcaggcggatcattaggtcaaaagattgagaccatcctgaccaacatggtgaaaccccgtctctactaaaagtacaaaaattagctgggtgtggtggcgcatgcctctagtcccagctacctgggaggctgaggcaggagaattgcttgaacccaggaggcagaggttgcagtgagccaagatcatgctactgcactacagcctggcaacaaagcgagactctgtctaaaatatatatatatatatatattgtttactactcaccacagatctgcaggagttcactgatctctaggatctgccttaactccaacttacatgttttggtcactattacaaactgtcatcccagaatgatgctgcagaggctagggctaggacacagaccagtgtttccatgtgggaattccctcccagtatttcttaggaaatgtatgttttttgaatccataatccctagaaaaatcagttgaggaaatgagaagtattgtaattattctgtgaatagtaacacttaccattatggagacatcactagtttgaaagaatccaacttcatcaaatattaacgtaccgagttgaaggctacaagaactgagacaggagcatagcagagagaaacggtcaccatctcattagccctatttttggttgttgtgatgccattacatctgtatatctggccatatcagctgctaatggtgagttcttgcaaacaaaatgatttgataaacaacctaccatactttatacaaatcttatggtgttccgagaaataaactttggaagcaaaataaaaaaaaaat

SEQ ID NO: 68581 - DNA, 3747 bp, Homo sapiens
ggtcgctgctcagggaaatgcggaggccagtaggcttacgtgtttaccgcgtagggcaaagccttgccaaattcccggccagcggagcggcgagggtggggactcacgggaagttaaacagcctcgtcggcgtcctcgaggctccaaaaccaggctctaggcggggacgactgcagccgttatggaggccaccgcggctacggccgcggctgaggcctccccaggtggagcggtggcctggaggggaatcttgatcctgggccagccacctgtcaagaggaggcggagcgtcatgcctctggaagactggatgaatattctccaggagcctgacgaagaagaagtctttgcagaggaaattgaatgctgtctgatgctacaattcatatggatcctttcctggattgaagcctgacttttaaaaaaggtttcaataaattgcttatacctatgaagagatgcaaaagaaccttcaaaataaagcaaaggacttgaagaaagagaaggaagacatgaagaagaggatgtcatttaggtgaagggccatgctggataaggagctggctgcctctgtgaacatcctactcaaggcatcttcactgctgtacatccttttgaaatcccagagatcttcagtctccctgtggattaaggagatgtgcagtatttaaagtggcttcaggaaggcatggaagaggactgagtggggaaagctttttgtgcatgctgctggctacctccagcggctgcctccagcctccatcagctgcactctggggaagaggaggctgccttctacctcccagcatctctggatttcatgttcctgtcagcacagaggagctaaatggcctgtagaggctgaaggtctgaggctcctaaagctggaagaaaaggctgggccagtcaggccaagcaagaacacagtgtaacttgtctctgagtgcttcatggttaagggggctaagcaggcacaagggcatgaggatggttatatgtacagactgaggggaagaaagcagtgaagatgagacttgccatcttcttgagtcagtaggcctgcctcaggtgcctaggatgtaattgctctgctgcttctcatggggaggagtggccctcatgaccttgtttacctggaagagtgtgggatgaatgcctcctcctatggggactcgcaagtgctttagcaaaaggataaattgctaattgtggcatttcgtggatcagcaggattatttctccttgctaaagaggattttgttggtcctgaattctgaggaggtgggactaggaatgggctccatgagcctgtgtatgactcagggaatattaggactttggcacagcctcatgggttgggagtaagtcttggctcttccctagcctgaatgacagacatcagatcattctggtgctttgtccatgaagatgtagattctgagcccacccaactaatcttttcacttgagcacagaaacagccccgggaatcggacagacccgtgtctttcaggtttgcttcacagagccccaggggttgacaataggtgccttggagactgcctgcatggggatttttaaaaagctttctttgttaaaggtttgtaaaccactcctctgagcctgttttcattttatagattattcagggaactgaactgcacagagatccagaaagtgggtagtgcaggctgtagtgctgataactactgtactacttggatctttgtgctcccaaataccaaatggaagaggatctctgagagtcctttgcaaagatcttgtagggactttaggctggggccttcggaaaattccagaggattccaatggagattttgagggactgactcagaagaacaaagagaatgataatggtgatgtccctgctttttacaacagatcatgttctgatatatatgcaaatctgtgtaaagtaaaccctacctaaaatgtactggggacccaagatggactgcctgtattgcttccaggataaagtccaatttctagctctggtttttataaccttgcttcagctcaccttttccgtcatcatcccctccatctcctctcccacgctgggaaatggatggctgcactatactgtgtgatgttattgctatgttcatgccatcccctctgcctggaatgcccttctgcatgaatgcctgtgaaatgttgttgctcctttgtatggcctggcttccgtggttggcaggaatctcttctttcgtggtattcctgtcatctttgtgcatcacagtcagctttgtattcctagcttgtaagctacttgaggataggggcatgtctgaatctatttaatctcttgcacctgtttggcaaattgatgttttaagtatttaaataactaaagctctctctacagtacatactcacttttgatttatgaattggcaaaattcaacttttttccttgaatattcttaaagtgagatgaattccaaaggagagtgttctgtgtgtggccttcattgagtggttttctgttaccagaaagctcttggtggccttcctcttccctggtgtcaaggttgactgttataggaaatgggaggggagagggccgtttctgccacgcattgtcctaggttcttaacattatttaatccttataatgcaatgttatcctcattttacagatgaaacctgagaccaaagaacatgtaacacataaagtacattgcagagttaggatgtgaacccaactctgattctaaacctaatgctctcactctttcattcagaggttcagtcagttctttgtaggctgtagatccagagaagctgccgtagccaacaataaagttgttagtttttaaaacatctatgtggtaagttggtctggcacttaaaaatgtattgtttcccaggcacggtggttcacacctgtaatcccagcattttgggaggccgaggcaggcggatcattaggtcaaaagattgagaccatcctgaccaacatggtgaaaccccgtctctactaaaagtacaaaaattagctgggtgtggtggcgcatgcctctagtcccagctacctgggaggctgaggcaggagaattgcttgaacccaggaggcagaggttgcagtgagccaagatcatgctactgcactacagcctggcaacaaagcgagactctgtctaaaatatatatatatatatatattgtttactactcaccacagatctgcaggagttcactgatctctaggatctgccttaactccaacttacatgttttggtcactattacaaactgtcatcccagaatgatgctgcagaggctagggctaggacacagaccagtgtttccatgtgggaattccctcccagtatttcttaggaaatgtatgttttttgaatccataatccctagaaaaatcagttgaggaaatgagaagtattgtaattattctgtgaatagtaacacttaccattatggagacatcactagtttgaaagaatccaacttcatcaaatattaacgtaccgagttgaaggctacaagaactgagacaggagcatagcagagagaaacggtcaccatctcattagccctatttttggttgttgtgatgccattacatctgtatatctggccatatcagctgctaatggtgagttcttgcaaacaaaatgatttgataaacaacctaccatactttatacaaatcttatggtgttccgagaaataaactttggaagcaaaataaaaaaaaaat

SEQ ID NO: 68582 - DNA, 3432 bp, Homo sapiens
aaaaataggagcatttaaagaaaactaagtgacttgtccatagtcagacagctagtaggggcaaagttagaatttgaacccatgtctgtgagactctaaagctatctggcctaactggccacttattgacagatgggaaacataggctagggagtgacaggccgtgggcctggacaggtggggtgcggcaggttgcagagggcctcccttgaggctggccagttgggttttatcacgagttgattctaatcatagtcacttatagggctttgctttctctccaaaggctgtacatccttttgaaatcccagagatcttcagtctccctgtggattaaggagatgtgcagtatttaaagtggcttcaggaaggcatggaagaggactgagtggggaaagctttttgtgcatgctgctggctacctccagcggctgcctccagcctccatcagctgcactctggggaagaggaggctgccttctacctcccagcatctctggatttcatgttcctgtcagcacagaggagctaaatggcctgtagaggctgaaggtctgaggctcctaaagctggaagaaaaggctgggccagtcaggccaagcaagaacacagtgtaacttgtctctgagtgcttcatggttaagggggctaagcaggcacaagggcatgaggatggttatatgtacagactgaggggaagaaagcagtgaagatgagacttgccatcttcttgagtcagtaggcctgcctcaggtgcctaggatgtaattgctctgctgcttctcatggggaggagtggccctcatgaccttgtttacctggaagagtgtgggatgaatgcctcctcctatggggactcgcaagtgctttagcaaaaggataaattgctaattgtggcatttcgtggatcagcaggattatttctccttgctaaagaggattttgttggtcctgaattctgaggaggtgggactaggaatgggctccatgagcctgtgtatgactcagggaatattaggactttggcacagcctcatgggttgggagtaagtcttggctcttccctagcctgaatgacagacatcagatcattctggtgctttgtccatgaagatgtagattctgagcccacccaactaatcttttcacttgagcacagaaacagccccgggaatcggacagacccgtgtctttcaggtttgcttcacagagccccaggggttgacaataggtgccttggagactgcctgcatggggatttttaaaaagctttctttgttaaaggtttgtaaaccactcctctgagcctgttttcattttatagattattcagggaactgaactgcacagagatccagaaagtgggtagtgcaggctgtagtgctgataactactgtactacttggatctttgtgctcccaaataccaaatggaagaggatctctgagagtcctttgcaaagatcttgtagggactttaggctggggccttcggaaaattccagaggattccaatggagattttgagggactgactcagaagaacaaagagaatgataatggtgatgtccctgctttttacaacagatcatgttctgatatatatgcaaatctgtgtaaagtaaaccctacctaaaatgtactggggacccaagatggactgcctgtattgcttccaggataaagtccaatttctagctctggtttttataaccttgcttcagctcaccttttccgtcatcatcccctccatctcctctcccacgctgggaaatggatggctgcactatactgtgtgatgttattgctatgttcatgccatcccctctgcctggaatgcccttctgcatgaatgcctgtgaaatgttgttgctcctttgtatggcctggcttccgtggttggcaggaatctcttctttcgtggtattcctgtcatctttgtgcatcacagtcagctttgtattcctagcttgtaagctacttgaggataggggcatgtctgaatctatttaatctcttgcacctgtttggcaaattgatgttttaagtatttaaataactaaagctctctctacagtacatactcacttttgatttatgaattggcaaaattcaacttttttccttgaatattcttaaagtgagatgaattccaaaggagagtgttctgtgtgtggccttcattgagtggttttctgttaccagaaagctcttggtggccttcctcttccctggtgtcaaggttgactgttataggaaatgggaggggagagggccgtttctgccacgcattgtcctaggttcttaacattatttaatccttataatgcaatgttatcctcattttacagatgaaacctgagaccaaagaacatgtaacacataaagtacattgcagagttaggatgtgaacccaactctgattctaaacctaatgctctcactctttcattcagaggttcagtcagttctttgtaggctgtagatccagagaagctgccgtagccaacaataaagttgttagtttttaaaacatctatgtggtaagttggtctggcacttaaaaatgtattgtttcccaggcacggtggttcacacctgtaatcccagcattttgggaggccgaggcaggcggatcattaggtcaaaagattgagaccatcctgaccaacatggtgaaaccccgtctctactaaaagtacaaaaattagctgggtgtggtggcgcatgcctctagtcccagctacctgggaggctgaggcaggagaattgcttgaacccaggaggcagaggttgcagtgagccaagatcatgctactgcactacagcctggcaacaaagcgagactctgtctaaaatatatatatatatatatattgtttactactcaccacagatctgcaggagttcactgatctctaggatctgccttaactccaacttacatgttttggtcactattacaaactgtcatcccagaatgatgctgcagaggctagggctaggacacagaccagtgtttccatgtgggaattccctcccagtatttcttaggaaatgtatgttttttgaatccataatccctagaaaaatcagttgaggaaatgagaagtattgtaattattctgtgaatagtaacacttaccattatggagacatcactagtttgaaagaatccaacttcatcaaatattaacgtaccgagttgaaggctacaagaactgagacaggagcatagcagagagaaacggtcaccatctcattagccctatttttggttgttgtgatgccattacatctgtatatctggccatatcagctgctaatggtgagttcttgcaaacaaaatgatttgataaacaacctaccatactttatacaaatcttatggtgttccgagaaataaactttggaagcaaaataaaaaaaaaat

SEQ ID NO: 68583 - DNA, 2934 bp, Homo sapiens
aaaattagtgcggtgtggtggcacgcacctgtagtcccagctactcgggaggctgaagcgggagggtcccctaagtctaggaggtcgaggcttcagtgagcggtgattgtgccactgcactccagcctgggcgacagagcaagaccctgctttcccctcttgtcctccactaccctcaggaaaccaagaaagaccagcgtggagagttggtcgcccatctgctctaagctgctgtgtattcccctgtaatgtaaacatcgtgaaggtggagacccagttaaccttttaggtggaaggccagatgacagagggcggcatctgacccggaaggccctctgcaaccaggccaaatacatctacagggaaccaatgggaaacatctggggaggacaacccaaataagtatcatgcgagcaagggatggtttgagaactttaaaaatcgctgctgttttgcaacatacgaagttgatggggaggaaggacccttaaatcctgagtgggtatcgagtattccaagcaactggagagaggctttgtgcctcaacaggtcttcaacgccaaggagatgacccatcttttgcagtgcatgccttcctacttttggggcaaaagacaaaaatctggaaagcttagaggaagctaaggacaggatttccctcatttttttgtggcagtgcctcaggtgacaaaatgataaaaccactgctgctttacaaagactctaacaccccacttgtcttttagagataaacgccttcctgttttcttgtaatcacacccagaatcaccactgccactttttggattagttttacaatttttttatccatcaaatccgaagtcatttaacaaaaaaaatctggaaatcagaatgttgctaactgtggacagaggtcccaatcacccagattcattattctttgttcattctaatgttgatactgtgtttctccctcaggaaggccctagctttcttcagcccttgggtcagggtataactgaagcatttgaacataatcaagcatatgtttgaccactttgctgactgtattgaaaaaaccctcaccttactctgaaagaagcatggcaacagtacaatattgccgatgctttggtagtgataaaagaggtgatgggtgatataaaatcagccactcttaagcttgctggaaactgtgggaggatgtgtgaatgatgcatatttccctagagctaatgaagaagttaaaaaaaatcttagtgtctgcaaaacaggaagaagtctttgcagaggaaattgaatgctgtctgatgctacaattcatatggatcctttcctggattgaagcctgacttttaaaaaaggtttcaataaattgcttatacctatgaagagatgcaaaagaaccttcaaaataaagcaaaggacttgaagaaagagaaggaagacatgaagaagaggatgtcatttaggtgaagggccatgctggataaggagctggctgcctctgtgaacatcctactcaaggcatcttcactgctgtacatccttttgaaatcccagagatcttcagtctccctgtggattaaggagatgtgcagtatttaaagtggcttcaggaaggcatggaagaggactgagtggggaaagctttttgtgcatgctgctggctacctccagcggctgcctccagcctccatcagctgcactctggggaagaggaggctgccttctacctcccagcatctctggatttcatgttcctgtcagcacagaggagctaaatggcctgtagaggctgaaggtctgaggctcctaaagctggaagaaaaggctgggccagtcaggccaagcaagaacacagtgtaacttgtctctgagtgcttcatggttaagggggctaagcaggcacaagggcatgaggatggttatatgtacagactgaggggaagaaagcagtgaagatgagacttgccatcttcttgagtcagtaggcctgcctcaggtgcctaggatgtaattgctctgctgcttctcatggggaggagtggccctcatgaccttgtttacctggaagagtgtgggatgaatgcctcctcctatggggactcgcaagtgctttagcaaaaggataaattgctaattgtggcatttcgtggatcagcaggattatttctccttgctaaagaggattttgttggtcctgaattctgaggaggtgggactaggaatgggctccatgagcctgtgtatgactcagggaatattaggactttggcacagcctcatgggttgggagtaagtcttggctcttccctagcctgaatgacagacatcagatcattctggtgctttgtccatgaagatgtagattctgagcccacccaactaatcttttcacttgagcacagaaacagccccgggaatcggacagacccgtgtctttcaggtttgcttcacagagccccaggggttgacaataggtgccttggagactgcctgcatggggatttttaaaaagctttctttgttaaaggtttgtaaaccactcctctgagcctgttttcattttatagattattcagggaactgaactgcacagagatccagaaagtgggtagtgcaggctgtagtgctgataactactgtactacttggatctttgtgctcccaaataccaaatggaagaggatctctgagagtcctttgcaaagatcttgtagggactttaggctggggccttcggaaaattccagaggattccaatggagattttgagggactgactcagaagaacaaagagaatgataatggtgatgtccctgctttttacaacagatcatgttctgatatatatgcaaatctgtgtaaagtaaaccctacctaaaatgtactggggacccaagatggactgcctgtattgcttccaggataaagtccaatttctagctc

SEQ ID NO: 68584 - DNA, 262 bp, Homo sapiens
ccaaaaccaggctctaggcggggacgactgcagccgttatggaggccaccgcggctacggccgcggctgaggcctccccaggtggagcggtggcctggaggggaatcttgatcctgggccagccacctgtcaagaggaggcggagcgtcatgcctctggaagactggatgaatattctccaggagcctgacgaaggcgtgagtaatagggacgtgcgccgccttgttggtgttgatcagtccaccaaggagaagcagctggt

SEQ ID NO: 68585 - DNA, 677 bp, Homo sapiens
ggtgtaactctgcctgtgtttgcatgccacctccagaaccactaaaatataatttctcagtgggtgactgagtaagactggcagcaattgcaaaagcagattcatgccatgtgtcactcttcacagtcaggaacttatttacctcttggaactttccaaaggaacgatgatggtggcggtaatgtcacattagtatggagcccttaaattcagcagtgttcaacctgagggaagacagagtaggtcaattctcttggcagcagctgagggaaggagagagcagggagcagggctcagataaggtttgtttggcagggtccaagcacttcatggaatggagacctttggctgtcagagatctgaggaagatttgtcagggcctgctacactctgagggcttgcagtttggatggttgggaacacttcttccttgcactgatggtgctcctatttctatgacacgtgtactagttcagacacaatttattgtgttcaccaattctatgcacagcaatcagactgagattgaaatccagtataatattaaaggtgatctgggccaggcgcagtggctcatacttgtaatcccagcactttgggacgctgagttagggggatcacttgaggccaggagtttgggaccagcctgggccagaaaatgagaccccatctgtaaa

SEQ ID NO: 68586 - DNA, 474 bp, Homo sapiens
  misc_feature (453)..(453): n is a, c, g, or t
agccacttcatttatcctctctgatcttcaggcctacctcatgtcctccccaaagagatggtgggtaagagagaactttgcaaaaggctgccagagcataaataggtcttatgactatgtagcagaaaaatgggacctcaaagaggagagagacctgcaaagcgggggactgctgccattctttgagtggtggctcaaaatatttccccaaactgtccccatctggtcaggatgccccacagccttttactaagatggtgtcttcatctagcctcagcccagctgcagtacctttctggaactcccaccactgatgctcaagaggagagtttaagttcaagagggttaagctctctacccacccgctcatccacagtccctcagacaagcatgcagatacatgctttgtttggttggttggttggttggtcggtcggttggttttgtttcaanacgccatctcaaaaaaataaa

SEQ ID NO: 68587 - DNA, 397 bp, Homo sapiens
attttgttttagtgagccttggggcaatacaaaaaattaagagtgactaagtagaaaataaaggacgggaggataattagaatttgtttttaaaaatcggctagtactttaaaaggtagttcctatagttgcaatatggattaatgactgtttaaaaaagttcataagtttctgctcaaatccaaaactaagatatctaaaaatggtactgacattattaactgcttgaatgcctattgtcaagagtagtgtttggcacccaccacaggtatttattgaaaacataaaggaataaaatgattcccaaatgatatcatcttatgattaatgaatacacatttgaggacctagaacttttagcagtaagatttgcatacgcttttcctattgaatttaa

SEQ ID NO: 68588 - DNA, 356 bp, Homo sapiens
catggaattaactcttctttgtcctcctgtcctgttatacaatagaagctccaagtcttattcacaactttgagtctagtgtgtggctgtatagaacagagattaagagcatgggttcaagggtacgatggacctggatttgaattcaaccgagcaactttttgtgtgacttagaggtagtcacaccacattactcagttttctcatctgtaaattgataatagttcttacctcatagaactattgtgaaaattaaattcactcacatatgtaaagcatttagcttgccccggcagtaaatattcactactattattgcattaagtgctaaaagagtatttcaagtagaattttta

SEQ ID NO: 68589 - DNA, 423 bp, Homo sapiens
gtttcccttctataagatggctaatatgagggctgtgagaactaagggaaagaattcatgaaaattcctcaataaatgttagctgctgctaatactatcatcatcaaagtctgtgtttagaccaggcatggtggctcacacctgtaatcccaacactttgggaggccgaggtgggtggatcacctgaggtcaggaggttgagacctgcctggccaacatggtgaaactccgtccctactaaaaatacaaaaaattagctgggtgtggtggggcatgcctgtaatcccagctactcaggtgactgaggcacgagaatcgtttgagcccaggaggcggaagttgcagtgaaccaagaccgtgccactgcactacagcctgggcgacagagtgagactctgtctcaaaacaaacaaacaaacaaac

SEQ ID NO: 68590 - DNA, 5002 bp, Homo sapiens
  misc_feature (107)..(107): n is a, c, g, or t
  misc_feature (755)..(755): n is a, c, g, or t
  misc_feature (4295)..(4295): n is a, c, g, or t
  misc_feature (4918)..(4918): n is a, c, g, or t
ggatccattttataagctcaaagataattacttttcagactaagaatatttagggtaaaaagtactgttcaacatctctactgaggatgttatgatgtagcacactntataagctggagctaaaggaaactttccttaaagtgctatttactaaaaattggaacacattccttaagacaaatcgaagtgtggcacacaacatccaaacttccatcatagatacagaggtgttaccatctcccactcccaaatttctttgtcacgctgaggatactcaagaggagcaggacatgttggtcgcagcaggagaaacttgaaagcattcacttttatggaactcataagggagagaatctcttatttagtatcgtccttgatacatttattattttaaaagataatgtagccaaatgtcttcctctgtgttaaatctttacaaaactgaaatcttaaaatggtgacaaaaattctacttctgatagaatctattcatttttccaattagatagggcataattcttaatttgcaaaacaaaacgtaatatgcttatgaggttccatcccaaagaacctgctattgagagtagcattcagaataacgggtggaaatgccaactccagagtttcagatcctaccggtaattggggtagggaggggctttgggcggggcctccctagaggaggaggcgttgttagaaagctgtctggccagtccacagctgtcactaatcggggtaagccttgttgtatttgngcgtgtgggtggcattctcaatgagaactagcttcacttgtcatttgagtgaaatctacaacccgaggcggctagtgctcccgcactactgggatctgagatcttcggagatgactgtcgcccgcagtacggagccagcagaagtccgacccttcctgggaatgggctgtaccgagaggtccgactagccccagggttttagtgagggggcagtggaactcagcgagggactgagagcttcacagcatgcacgagtttgatgccagagaaaaagtcgggagataaaggagccgcgtgtcactaaattgccgtcgcagccgcagccactcaagtgccggacttgtgagtactctgcgtctccagtcctcggacagaagttggagaactctcttggagaactccccgagttaggagacgagatctcctaacaattactactttttcttgcgctccccacttgccgctcgctgggacaaacgacagccacagttcccctgacgacaggatggaggccaagggcaggagctgaccagcgccgccctcccccgcccccgacccaggaggtggagatccctccggtccagccacattcaacacccactttctcctccctctgcccctatattcccgaaaccccctcctccttcccttttccctcctccctggagacgggggaggagaaaaggggagtccagtcgtcatgactgagctgaaggcaaagggtccccgggctccccacgtggcgggcggcccgccctcccccgaggtcggatccccactgctgtgtcgcccagccgcaggtccgttcccggggagccagacctcggacaccttgcctgaagtttcggccatacctatctccctggacgggctactcttccctcggccctgccagggacaggacccctccgacgaaaagacgcaggaccagcagtcgctgtcggacgtggagggcgcatattccagagctgaagctacaaggggtgctggaggcagcagttctagtcccccagaaaaggacagcggactgctggacagtgtcttggacactctgttggcgccctcaggtcccgggcagagccaacccagccctcccgcctgcgaggtcaccagctcttggtgcctgtttggccccgaacttcccgaagatccaccggctgcccccgccacccagcgggtgttgtccccgctcatgagccggtccgggtgcaaggttggagacagctccgggacggcagctgcccataaagtgctgccccggggcctgtcaccagcccggcagctgctgctcccggcctctgagagccctcactggtccggggccccagtgaagccgtctccgcaggccgctgcggtggaggttgaggaggaggatggctctgagtccgaggagtctgcgggtccgcttctgaagggcaaacctcgggctctgggtggcgcggcggctggaggaggagccgcggctgtcccgccgggggcggcagcaggaggcgtcgccctggtccccaaggaagattcccgcttctcagcgcccagggtcgccctggtggagcaggacgcgccgatggcgcccgggcgctccccgctggccaccacggtgatggatttcatccacgtgcctatcctgcctctcaatcacgccttattggcagcccgcactcggcagctgctggaagacgaaagttacgacggcggggccggggctgccagcgcctttgccccgccgcggagttcaccctgtgcctcgtccaccccggtcgctgtaggcgacttccccgactgcgcgtacccgcccgacgccgagcccaaggacgacgcgtaccctctctatagcgacttccagccgcccgctctaaagataaaggaggaggaggaaggcgcggaggcctccgcgcgctccccgcgttcctaccttgtggccggtgccaaccccgcagccttcccggatttcccgttggggccaccgcccccgctgccgccgcgagcgaccccatccagacccggggaagcggcggtgacggccgcacccgccagtgcctcagtctcgtctgcgtcctcctcggggtcgaccctggagtgcatcctgtacaaagcggagggcgcgccgccccagcagggcccgttcgcgccgccgccctgcaaggcgccgggcgcgagcggctgcctgctcccgcgggacggcctgccctccacctccgcctctgccgccgccgccggggcggcccccgcgctctaccctgcactcggcctcaacgggctcccgcagctcggctaccaggccgccgtgctcaaggagggcctgccgcaggtctacccgccctatctcaactacctgaggccggattcagaagccagccagagcccacaatacagcttcgagtcattacctcagaagatttgtttaatctgtggggatgaagcatcaggctgtcattatggtgtccttacctgtgggagctgtaaggtcttctttaagagggcaatggaagggcagcacaactacttatgtgctggaagaaatgactgcatcgttgataaaatccgcagaaaaaactgcccagcatgtcgccttagaaagtgctgtcaggctggcatggtccttggaggtcgaaaatttaaaaagttcaataaagtcagagttgtgagagcactggatgctgttgctctcccacagccagtgggcgttccaaatgaaagccaagccctaagccagagattcactttttcaccaggtcaagacatacagttgattccaccactgatcaacctgttaatgagcattgaaccagatgtgatctatgcaggacatgacaacacaaaacctgacacctccagttctttgctgacaagtcttaatcaactaggcgagaggcaacttctttcagtagtcaagtggtctaaatcattgccaggttttcgaaacttacatattgatgaccagataactctcattcagtattcttggatgagcttaatggtgtttggtctaggatggagatcctacaaacacgtcagtgggcagatgctgtattttgcacctgatctaatactaaatgaacagcggatgaaagaatcatcattctattcattatgccttaccatgtggcagatcccacaggagtttgtcaagcttcaagttagccaagaagagttcctctgtatgaaagtattgttacttcttaatacaattcctttggaagggctacgaagtcaaacccagtttgaggagatgaggtcaagctacattagagagctcatcaaggcaattggtttgaggcaaaaaggagttgtgtcgagctcacagcgtttctatcaacttacaaaacttcttgataacttgcatgatcttgtcaaacaacttcatctgtactgcttgaatacatttatccagtcccgggcactgagtgttgaatttccagaaatgatgtctgaagttattgctgcacaattacccaagatattggcagggatggtgaaaccccttctctttcataaaaagtgaatgtcatctttttcttttaaagaattaaattttgtggnatgtctttttgttttggtcaggattatgaggtcttgagtttttataatgttcttctgaaagccttacatttataacatcatagtgtgtaaatttaaaagaaaaattgtgaggttctaattattttcttttataaagtataattagaatgtttaactgttttgtttacccatattttcttgaagaatttacaagattgaaaaagtactaaaattgttaaagtaaactatcttatccatattatttcataccatgtaggtgaggatttttaacttttgcatctaacaaatcatcgacttaagagaaaaaatcttacatgtaataacacaaagctattatatgttatttctaggtaactccctttgtgtcaattatatttccaaaaatgaacctttaaaatggtatgcaaaattttgtctatatatatttgtgtgaggaggaaattcataactttcctcagattttcaaaagtatttttaatgcaaaaaatgtagaaagagtttaaaaccactaaaatagattgatgttcttcaaactaggcaaaacaactcatatgttaagaccattttccagattggaaacacaaatctcttaggaagttaataagtagattcatatcattatncaaatagtattgtgggttttgtaggtttttaaaataaccttttttggggagagaattgtcctctaatgaggtattgcgagtggc

SEQ ID NO: 68591 - DNA, 590 bp, Homo sapiens
cgcgtaccctctctatagcgacttccagccgcccgctctaaagataaaggaggaggaggaaggcgcggaggcctccgcgcgctccccgcgttcctaccttgtggccggtgccaaccccgcagccttcccggatttcccgttggggccaccgcccccgctgccgccgcgagcgaccccatccagacccggggaagcggcggtgacggccgcacccgccagtgcctcagtctcgtctgcgtcctcctcggggtcgaccctggagtgcatcctgtacaaagcggagggcgcgccgccccagcagggcccgttcgcgccgccgccctgcaaggcgccgggcgcgagcggctgcctgctcccgcgggacggcctgccctccacctccgcctctgccgccgccgccggggcggcccccgcgctctaccctgcactcggcctcaacgggctcccgcagctcggctaccaggccgccgtgctcaaggagggcctgccgcaggtctacccgccctatctcaactacctgaggtgagggcccgggacggggcacgcccagcgcgtccgggagtagcggttccgttggcggcggcggccgc

SEQ ID NO: 68592 - DNA, 1938 bp, Homo sapiens
  misc_feature (1231)..(1231): n is a, c, g, or t
  misc_feature (1854)..(1854): n is a, c, g, or t
tgctcagccccaaggagaagggaaccacaaagggcaagtttggaccgagcaggtccacctgcgtcccctgatggcaagcacaagcaccagtgccaaggaagaatccagtgggtggccaccaagcacccagagttgtacacagacctgaagcttggaaacctcctcagctgcaaattctctgcatgggaggcatcctaagctcctgattcaggagagtgggtgctccagatgcctggagatctgctttggcatggaatagagaggggccccctgcaccaagatctctacacaggaggggtcgaaaatttaaaaagttcaataaagtcagagttgtgagagcactggatgctgttgctctcccacagccagtgggcgttccaaatgaaagccaagccctaagccagagattcactttttcaccaggtcaagacatacagttgattccaccactgatcaacctgttaatgagcattgaaccagatgtgatctatgcaggacatgacaacacaaaacctgacacctccagttctttgctgacaagtcttaatcaactaggcgagaggcaacttctttcagtagtcaagtggtctaaatcattgccaggttttcgaaacttacatattgatgaccagataactctcattcagtattcttggatgagcttaatggtgtttggtctaggatggagatcctacaaacacgtcagtgggcagatgctgtattttgcacctgatctaatactaaatgaacagcggatgaaagaatcatcattctattcattatgccttaccatgtggcagatcccacaggagtttgtcaagcttcaagttagccaagaagagttcctctgtatgaaagtattgttacttcttaatacaattcctttggaagggctacgaagtcaaacccagtttgaggagatgaggtcaagctacattagagagctcatcaaggcaattggtttgaggcaaaaaggagttgtgtcgagctcacagcgtttctatcaacttacaaaacttcttgataacttgcatgatcttgtcaaacaacttcatctgtactgcttgaatacatttatccagtcccgggcactgagtgttgaatttccagaaatgatgtctgaagttattgctgcacaattacccaagatattggcagggatggtgaaaccccttctctttcataaaaagtgaatgtcatctttttcttttaaagaattaaattttgtggnatgtctttttgttttggtcaggattatgaggtcttgagtttttataatgttcttctgaaagccttacatttataacatcatagtgtgtaaatttaaaagaaaaattgtgaggttctaattattttcttttataaagtataattagaatgtttaactgttttgtttacccatattttcttgaagaatttacaagattgaaaaagtactaaaattgttaaagtaaactatcttatccatattatttcataccatgtaggtgaggatttttaacttttgcatctaacaaatcatcgacttaagagaaaaaatcttacatgtaataacacaaagctattatatgttatttctaggtaactccctttgtgtcaattatatttccaaaaatgaacctttaaaatggtatgcaaaattttgtctatatatatttgtgtgaggaggaaattcataactttcctcagattttcaaaagtatttttaatgcaaaaaatgtagaaagagtttaaaaccactaaaatagattgatgttcttcaaactaggcaaaacaactcatatgttaagaccattttccagattggaaacacaaatctcttaggaagttaataagtagattcatatcattatncaaatagtattgtgggttttgtaggtttttaaaataaccttttttggggagagaattgtcctctaatgaggtattgcgagtggc

SEQ ID NO: 68593 - DNA, 392 bp, Homo sapiens
tacttaataatttttggagctttaaatatgtattccacatgctatgtgaggcagtaaatgaattttggttttattaaatcattacataaaagagggactgagttcaattatctgaattcctagttactaattaggaatcagataatttctaattatctgaatacctacttcacaacccagccaaaataaagggctggaatgtcatttttaaattctatgattcaataatttattgtacatttaaaaatgactgaaagagtgtaattggattgtttgtaacacaaagaaaggataaattcttgaggtgagggatattccatttacccttgtgtgattattacacattgtatgcctatatcaaaatacctcatacaccacaaaaattgaaaatt

SEQ ID NO: 68594 - DNA, 610 bp, Homo sapiens
ctagaggattccctcgaatcgacggttctctaaagctaatacagttctgggtccttagcgaaaagtgcatacatccttatctttaggaacccaatcttagtgctgacctgcaatactgtaaacatgaaggtggtatttccaactcatcatctgtagatgatgttctaattatgctgagggctgccatccattcccttgaaatgaacatctgcatttggaagattgctggctagaattaggggacagtgtgcaccaatggaaaagaccctttgctgtgtgcaaaaggtattgttccattcaggaagcaacccatgctgacttcctccagtcttgagcactgtgctctaaccacatgggctctattgtttagaaaacacacacacatatattgctgctataggaaaattattctgacaaaatgccttacaaaaagggattagttactactgaaaaacacaaaaatatcagatgttgatatttcaccagcttgaaaagcaaacaaccatgtctaggtactttcccgttatttcctaagatagagcaggtgtggtatctggaagtgtgggcacatggacatgtggatgctccacagtgcctctgaaggagggga

SEQ ID NO: 68595 - DNA, 656 bp, Homo sapiens
ctaaaaagaagtggaagatttcaacattctacccagaagggaggcaacaatgggcagatatctgactttttttctctaaagctaatacagttctgggtccttagcgaaaagtgcatacatccttatctttaggaacccaatcttagtgctgacctgcaatactgtaaacatgaaggtggtatttccaactcatcatctgtagatgatgttctaattatgctgagggctgccatccattcccttgaaatgaacatctgcatttggaagattgctggctagaattaggggacagtgtgcaccaatggaaaagaccctttgctgtgtgcaaaaggtattgttccattcaggaagcaacccatgctgacttcctccagtcttgagcactgtgctctaaccacatgggctctattgtttagaaaacacacacacatatattgctgctataggaaaattattctgacaaaatgccttacaaaaagggattagttactactgaaaaacacaaaaatatcagatgttgatatttcaccagcttgaaaagcaaacaaccatgtctaggtactttcccgttatttcctaagatagagcaggtgtggtatctggaagtgtgggcacatggacatgtggatgctccacagtgcctctgaaggagggga

SEQ ID NO: 68596 - DNA, 725 bp, Homo sapiens
ggttaattctggctccttagaaaggatctaatttttgatggtataggatcctctggaaagcatgccaactgaaggggaatgccggtgtgaattcatgtgtcacatttatacatcagaggcaccaggctcatctgccccccaaaaaagtttcatatgaagttccagtgcatttaaacattgcctgtgttgaatcagaagtctttttggcgtctccacagctcatgaaagcaattgccagctaaatagctgcattctacaaaaggacagtgaactgcttgcttgcagtttaacccagaatcttacttcaaccaccaccatttgactagagataactaactcctgtctcagtttcaccatttctttttgccagcaatgagtcgtagaaggaatgtgcctgggaagtttagaactcaaaatgaaagtatggccagatgggttgacattggaatgaggttgactagaagagtggtgataaaatgactctggaaaaagaatgtcaccctgcattttgttagatatttattccacttcccctgtagccaaaaataaagagaaaattccttgagctccttggaggaatttcttgtgaacaggagcaagtacagcaagcttggcttagaagcctggtagaagaaggagaaaacttgaacagcatcagaaatagaagaagaaaaagacaaaatacatttccttccacagcaagttcatctagcaatggaaaaaga

SEQ ID NO: 68597 - DNA, 344 bp, Homo sapiens
ctgtgctgttgtttaggctgttctgtctgaatgactttgactcctcccactacatttaaggatcatttgcacaaatatttaccaagcactacaatatgccgtgtacttcattcagcctgattcctcacaaggaattggccagtctcagctggccacggtggctcacgcctgtaatcccagcactttgggaggccgaggtgggcagatcacctgaggtcaggagtttaagaccagcctggccaacatggtgaaaccccatctttactaaaaatacaaaacttagctggacatggtggtgggtgcctgtaatctcagctactcgggaggctggggcaggagaatcg

SEQ ID NO: 68598 - DNA, 409 bp, Homo sapiens
gtctcgagtaaataaatctagagtcccccaatctctttcaaattactgttgctctaaagaatcttcaagagctatcactgtaggctgggtgcagtggtacacacctatagtcccagctaatcaggaggctgaggcagaggatcacttgagcccaggagttcgaggctgcgttgagctgtgaccacacctgtgagtagccactgcattccaacctgggcagcatagtgcgatcttgtctcttaatgaataaataaataaatattatcatgaggattgcagttgcagcaggaaaagtcaacacagcacactactttacccctatgctttgtctgaacccaagcctaactctgggaacagggcagttgttctttccctgggttgagaactgcttgttattgctactgaggcc

SEQ ID NO: 68599 - DNA, 203 bp, Homo sapiens
tgacttgtgataacaatttctcaaggcacaaaaattccctatgaaaaacatgtataaactgacttcatcaaattgaaaaaccttgcctcaaaaaacatagttaagaaaaataggaaaacaagccacagactgagaaaatgtccacaatgtctctgataaaaggcttttttccagaatagtaaagaactgttataactcagtta

SEQ ID NO: 68600 - DNA, 429 bp, Homo sapiens
ataagttgttcctgagttggggagagaggactaccggagaggggactacgacaggccaggagggttacactggaagtagtcctcacatggaaacttgagccccagaaaatgtggattacctcatcacatgcagttagattggctggaactccttttatttttaagctttcaagaaattatgaattttaattcctaaatattatttgtctatttagttccagaataacttaatatctctggcaattcttgtcctcaaagagaatatggacattttgtcataaatatgtgtcaattgtatttatttgtttattcatttatttccattcctatcaaactgccttaattttttttaaacatctttttctgagatataaatcatatagcacacatttcatgcatttaaagtatccaattcaatggtttggggta

SEQ ID NO: 68601 - DNA, 442 bp, Homo sapiens
attttcaaatcttaatagctgctttgccatgtgtaaaattagttttcagtatgcaagaatatgagagactagaatagtgtattattgtcatatcataagggttttataatttgtcaggttattttatgtatctttttgcttcagtacaatcatatgctagtggcatagaagattatttcccagctagctgcggtactcatgcctataatctcccagcactttgggaggccgagatgggagaatcgcttgagtccaggagttagagaccagcctgagcaacatagtgaaatcccatctgtacaaaaataataataataaatttagccagttacagtgatgcacacctgtagtcccagctactcaggaggctgaggcagggggttccttgaacttggggtcagggctgcagagtgagctgtggtggtgccactgcactccagcc

SEQ ID NO: 68602 - DNA, 386 bp, Homo sapiens
atccttggactgactgcccctgtctgtatggtagggtggaaggagcactgaccagaaagtggggaagccttagtgtccaaggctctgccactaacagttttgtgacttaggcaggtccctcagtctcagcaggaggggctggaatagataaagtctcttctgctgtggtgccagccctgatcctgtcccccttgggcctctggcctccctttcccccatactaggtgatcctggagtccatggtcagcctgacacaggagttatgccctgtggccatgcgggtggccgagggacacaacaagatgctgagcaatgtggcggagcgtgtcactgtgccccggaacttcatccgaggggcactgctggagcaagcaggacaggacatt

SEQ ID NO: 68603 - DNA, 1678 bp, Homo sapiens
  misc_feature (13)..(13): n is a, c, g, or t
  misc_feature (44)..(44): n is a, c, g, or t
  misc_feature (67)..(67): n is a, c, g, or t
  misc_feature (74)..(74): n is a, c, g, or t
  misc_feature (106)..(106): n is a, c, g, or t
  misc_feature (126)..(126): n is a, c, g, or t
  misc_feature (175)..(175): n is a, c, g, or t
  misc_feature (186)..(186): n is a, c, g, or t
  misc_feature (209)..(209): n is a, c, g, or t
  misc_feature (217)..(217): n is a, c, g, or t
  misc_feature (222)..(222): n is a, c, g, or t
  misc_feature (251)..(251): n is a, c, g, or t
  misc_feature (269)..(269): n is a, c, g, or t
  misc_feature (583)..(583): n is a, c, g, or t
gagatggagtctngctctgtcgccaggctggagtgccgtggtgngatctcgactcactgcgacctcngcctccngggttccagcgattctcctgcttcagcctccngagtagctgggactacaggngcccgccaccatgcccagctaatttttgtatttttagtagagatgaggnttcaccatgtnggccaggatggtcttgatctctngacctcgngatcngcccacctcagcctcccaaagtgctgagnttacaggcatgagccgcngcgcgtggcctcctcttttattaacaggagctttctctgccccattccccccatttataaatgaaagataacaggttttatgtggctgggaatcaaatcatggaaggtgtccttccaacttaagattttgagattccttgtgtaaaaactgttgaagtctgactcttccttgtagctgcctgattacagagcttcagagaggagctgggcaggtcccggtgctctgctgtgccatatgcatgagcagtgctcctttgggtagtcttcagttgactgtagaaggtgtggagtggataagattattgggaagtacngggtaagtcacatagaacaaagatttgatttaaactgactagcttaaatgtcactcctggccgggcgcgtggggaaattatttaaatgtgttggctataaactagtgttatgtcatggatctggatatatgagtatggttataaaaatcaggatgcctggcctgatttggagcttggaaggaggttctgcggctgttgtacacagatactggagtatctgggagatatcctttggatgctgaggtgtgtctgaggccaaaggacagaatataggaatatgggagaatttaggccatgtggtcattgttcacggggccactagtttcactcactaaaggagtgggttcgtagctgcgttggagactgcagcacacccgtagcagtactgtttctcatgcagtggctttcccacagagcccagctcaggtttgctggtctcacatcaaagtgcattcaaagtggggagattgacaaagatgcaggttctgggtcctgtgaccagaaattcggactcctttagtccgacatgaagcttcatctgcctttgtaactagctctgcccatggccgtggcccacaggttgagaaactttgtccagcctattaccattcagttgtatgttttgagctgtcttttattactaagtgaaaactgggtgagattgttgaagagggacgattgccacaggggtttcctgtgttcttaatctcctgaaacttgaggacctcatggttacaccctgccctacaagttttctcttacccgtttattcaggatgtcacacagcattatttattaatatttgaaaggtctacccctgagtaaggagggtggatatatatttttttaagtggaagaaaccaaacttcaactcctatagctctctgtgcttgaatcttgtaacaggctgctcttataagcagtgccccagatccttctaatgggggaacctcacctgcccttgtcaggaaagaagggggaagggcccaggaaccttccagtctgagaggctggtattctggttctttcatcgtgtgacttatactagtgatccctatcttcttgggggcaagtggggaagccattctcctcttg

SEQ ID NO: 68604 - DNA, 1123 bp, Homo sapiens
gcggccgcgcgcgctccccgacgcccgggcccgcggccacgacgtgcgcttcgcggagttcctggcctacctgctggacccgcgcacgcggcgtgaggagcccttcaacgagcactgggagcgcgcgcacgcgctctgccacccgtgtcgcctccgctacgacgtcgtgggcaagttcgagacgctggcggaggacgcggccttcgtgctgggcctggcgggcgcatccgacctgagcttccctgggccgccgcggccccggggagccgccgcctcccgcgacctggcagcgcgcctcttccgggacatcagccccttctaccagcggcgcctcttcgacctctacaagatggacttcctgcttttcaactactccgccccctcctacctgcggctgctctagcggtcctggaggtcctgtggccacgcggggcaagtgcctttccgacaagacccccggggaatgcaggtgctgccggccccaggacccctcttcaagagccactgcgtgcactcacctggccgccgggccagcgggcgcagggcacacctggccaggcttgggggcagcccatctcaggtggccctgcacgcgtgtgcctgcctcggcctgtcgcctgaggcctgcttcctccacttgctccagctgacaggcacctctccaggccccgtagatgggcaaggacttgataaccagggttttaggcttttaaaggccattttgggggtcagccctgcccctgaacctgttcatggtgcatcagaacataatgctgacaccggtgtcagtgtggcccgagcctgtgtcctccccacctcgcccaccctggcaaggacagctgcggccaaggacgaaagccctcccttggctggcctcacgatggggccgtcccgggagccaggtgggagctgccttccactgccatcgggtctcctctcctctcccacgcggctggccctacccaggcgccacttcggtctcagtctggcaagacgctgggtcttcaggctccatgccaacagagcccctggtgcaatgcggtcacaggttttatgggactttggtgagctgggcggtcatggttttgaaataaatgtattttgttactttctgaaatttgga

SEQ ID NO: 68605 - DNA, 380 bp, Homo sapiens
gcttggtattaaacactgaagctttgtgtagaatatgtcagtaggcgatttactacctcaaaaagcagtctttcttttgtaaaggcttatcaatcagaactttggagagaattttccaaactccctaaggaaaattatatttcattgctatgaaagatatttgattttgtgcattttgcttcataaaatgaatttgtttcagattctgaatacttatgatttttgtttgtgtctttatgaattactttaaagcaatttcccttttacatttaaatggtttcagttcttaaaaacatttatgttcaccagaagttggctttttttttttttttcttaaatgaaaagtataagggattttaacctcataaagaataaggaaa

SEQ ID NO: 68606 - DNA, 634 bp, Homo sapiens
aggggaggtgctagaagtcggaccggaagtggaagtggtcttccaaggcttttttgccgctggtgtcaggagtattttcatattccaataccgataaatctttgaggtttctgggtgtctctggggagcccctgggccagattttcctctagactccagcccatctcttcagagcagctctgcttgagttcacagatgactgccaagcttcagacaccctacagaaaaagggttgagacccagtgtggccatgccagctaattggacctcacctcagaaatcctcagccctggctccagaggatcatggcagctcctatgagtgttaaccttgatgcctgaaagaactggaaattatgaagatagattcagaagtcaaatatgttaactaactgcattgaagagtagaagaaaacaatagcctagtaggtttttactgggattagtgaaacaactgctatgttctcagcaacccactccaaagccaaagtcaaaactaaaattgtaaaatatctcaaaaacaataaaaatggtatatatatatcagaagctctggtatatagcaaaactgtactaaaaataatttagaaaaataatttatctcatgcaaatgaataaaaaaatctaaatgaaaa

SEQ ID NO: 68607 - DNA, 971 bp, Homo sapiens
aggggaggtgctagaagtcggaccggaagtggaagtggtcttccaaggcttttttgccgctggtgtcaggagtattttcatattccaataccgataaatctttgaggtttctgggtgtctctggggagcccctgggccagattttcctctagactccagcccatctcttcagagcagctctgcttgagttcacagatgactgccaagcttcagacaccctacagaaaaagggttgagacccagtgtggccatgccagctaattggacctcacctcagaaatcctcagccctggctccagaggatcatggcagctcctatgagtgttaaccttgatgcctgaaagaactggaaattatgaagatagattcagaagtcaaatatgttaactaactgcattgaagagtagaagaaaacaatagcctagtaggtttttactgggattagtgaaacaactgctatgttctcagcaacccactccaaagccaaagtcaaaactaaaattgtaaaatatctcaaaaacaataaaaatggtatatatatatcagaagctctggtatatagcaaaactgtactaaaaataatttagaaaaataatttatctcatgcaaatgaataaaaaaatctaaatgaaaaaaaaccacgccccaaaagggggggggggaaaataccccgggggcgccaatctgcggcaccccgtttatgggaagaagcgccgccacgaggagagcttaaaggacggcgcggcgggtgcaaacgaccgccgcaggggaaaagcgcaggggcattggaagacccctctggggcgggcatggaccccgagaagtacgcgagacaaaactaggcttggtacaggttctgcggaatgtacgtttatactgcacgggacaatcagcaacaagcgacaacgtcacacgcgagcccagcaggcacagatgacactgcccgcacgaggacagcacgacaacgccac

SEQ ID NO: 68608 - DNA, 1775 bp, Homo sapiens
tcagagttgattacacatcacagaattcatactggagagaaaccttatgagtgcagtgactgtgggaagtctttcactaaaaaatcacagctccaagtgcatcagcgaattcacactggagagaagccttacgtgtgtgctgagtgtgggaaggcctttactgacaggtccaatttgaataaacatcagacaacacacactggagacaaaccctacaagtgtggcatctgtgggaaaggcttcgttcagaaatcagtgttcagcgtccatcagagcagccacgcttgagagaaacagtgtgagaaaacccccctgagggttgggtctgattgtacactgttgcacgcatgcagcagaaaaatatgtatattattgtaaatagaaatgaccacagcagaatgtcacacatggctgttctggagagggcctctgagaaggcactgaatgaggcgagggacccttcctacattgtcaccatccccagtaaaccttgggtcattattcatactgacaaggaaccgagtcaatttggtgaataggaaaagccttctcatgaaaactacaatagaatactgttaccaaattcttcctaagaaagatcgtattaagttaacgataatcctgtttactgtggattaggtatagtgccaacaaattgaatgataaaacaacataatacgtagttattttgatagtgatgaatcctaagttatgtgagttgttcgttgtggaacacattgtgtaacagactcctgggtgtttttctttctcattcgaatctaccacagttggtcatatccaaccctcattcagtatttctatcaagaaagagatgctacaaaaaaaaaaagaaaaaacctttatgtatacagacgtaaacctcagaatgtatgttgagtccccactgtcatctaccaagacttgcacccccctcattatctaccatgactgtctctcagcctcacgggccctcagcactttgtgttttgacccccagcaccgtgtcttgtgaactcccatcaccttcaagaaagcttccgaggtaagaattttatggtcatctgggacaacttaaatctcccttctgctgtcatagttcttccaactcagttgcctttttttttttttcgtactcatcactgacttgaagcttagtatctggcttccttaaggatgtaactttcatgtaacagattaataacttatatgaaaaccaacacaaccatatgtttagggctggaaagggccatgacgcctggccatttttcctgttttaccttactcttatgtgtgtcacacttcatcaattccggaaacagtttctggagatctcctcattacctcttttacaatcacctcactccagcatggtgtctgttacctcttcccacttgtgacaatgtctagtaaggtccactctccattctgtgtgatgaccacttattacaaccctcagaataggggacagtggtgtgccccctgcaatacaatggtttctatctcctgatacttttattacacctctagcaggatgtcttgtgatcctccttattgatttttccctcacgatgatgaacaattatctcccgttactcacctagcagtatctaactgtccctaacacagcatgtgggaatgccctcaatacggtggatgctgttaactttcttccttcccctcaggcaatggcggtgacttacaatgaaccataatgtccacatttcccaactgtattttggagcctcttctgtccccttctttctaggaccccagtt

SEQ ID NO: 68609 - DNA, 1624 bp, Homo sapiens
aaaaccatatgagtgcagtaactgtggcaaatccttcatttccaagtcacaacttcaggtacatcaacgtgttcacacaagagtgaagccctatatatgtaccgaatatgggaaggtcttcagcaataattccaacctcgttacacataagaaagttcaaagtagagagaaatcttccatatgtactgagtgtgggaaggcctttacctacaggtcagagttgattattcatcagagaattcacactggagagaaaccttatgaatgcagtgactgtgggaaagccttcactcagaagtcagcactcacagtgcatcagagaattcatacaggagaaaaatcgtatatatgcatgaaatgtggactggccttcattcagaaggcacacttgattgcacatcaaataattcatactggagagaaacctcataaatgtggtcactgtgggaaattgtttacctccaagtcgcaactccatgttcataaacgaattcacacaggagaaaagccctatatgtgcaataaatgtgggaaggcattcaccaaccggtcaaatctcattacacatcagaaaactcatacaggagagaaatcttatatatgttccaaatgtggaaaggccttcacccagaggtcagacttgattacacatcagagaatccatactggggagaagccttatgaatgcaatacttgtggaaaagccttcactcagaagtcacacctcaatatacatcagaaaattcacactggagagagacagtatgaatgccacgaatgtgggaaagccttcaaccagaaatcaatactcattgttcatcagaaaattcatacaggagagaaaccctatgtatgcactgagtgtggaagagctttcatccgcaagtcaaactttattactcatcaaagaattcatactggagagaagccttatgaatgcagtgactgtgggaagtcctttacctccaagtctcagctcctggtgcatcagccagttcacacaggagagaaaccctatgtgtgtgccgagtgcgggaaggcctttagtggcaggtcaaatctcagtaagcaccagaaaactcatactggaaagggccatgacgcctggccatttttcctgttttaccttactcttatgtgtgtcacacttcatcaattccggaaacagtttctggagatctcctcattacctcttttacaatcacctcactccagcatggtgtctgttacctcttcccacttgtgacaatgtctagtaaggtccactctccattctgtgtgatgaccacttattacaaccctcagaataggggacagtggtgtgccccctgcaatacaatggtttctatctcctgatacttttattacacctctagcaggatgtcttgtgatcctccttattgatttttccctcacgatgatgaacaattatctcccgttactcacctagcagtatctaactgtccctaacacagcatgtgggaatgccctcaatacggtggatgctgttaactttcttccttcccctcaggcaatggcggtgacttacaatgaaccataatgtccacatttcccaactgtattttggagcctcttctgtccccttctttctaggaccccagtt

SEQ ID NO: 68610 - DNA, 636 bp, Homo sapiens
gggggtcagtgatgggagtctgtggtcagtgacagagcctgtagggtcagttatggtgatcggtttctgggtgtctctggggagcccctgggccagattttcctctagactccagcccatctcttcagagcagctctgcttgagttcacagatgactgccaagcttcagacaccctacagaaaaagggttgagacccagtgtggccatgccagctaattggacctcacctcagaaatcctcagccctggctccagaggatcatggcagctcctatgagtgttaaccttgatgcctgaaagaactggaaattatgaagatagattcagaagtcaaatatgttaactaactgcattgaagagtagaagaaaacaatagcctaggatcagtgtccttcagggatgtggctatcgatttcagcagagaggaatggcggcacctggacccttctcagagaaacctgtaccgggatgtgatgctggagacctacagccacctgctctcagtaggatatcaagttcctgaagcagaggtggtcatgttggagcaaggaaaggaaccatgggcactgcagggtgagaggccacgtcagagctgcccaggagagaaattatgggaccataatcaatgtagaaaaa

SEQ ID NO: 68611 - DNA, 710 bp, Homo sapiens
aggggaggtgctagaagtcggaccggaagtggaagtggtcttccaaggcttttttgccgctggtgtcaggagtattttcatattccaataccgataaatctttgaggtttctgggtgtctctggggagcccctgggccagattttcctctagactccagcccatctcttcagagcagctctgcttgagttcacagatgactgccaagcttcagacaccctacagaaaaagggttgagacccagtgtggccatgccagctaattggacctcacctcagaaatcctcagccctggctccagaggatcatggcagctcctatgagggatcagtgtccttcagggatgtggctatcgatttcagcagagaggaatggcggcacctggacccttctcagagaaacctgtaccgggatgtgatgctggagacctacagccacctgctctcagtaggatatcaagttcctgaagcagaggtggtcatgttggagcaaggaaaggaaccatgggcactgcagggtgagaggccacgtcagagctgcccagcaccgtgtcttgtgaactcccatcaccttcaagaaagcttccgagggtgaaggtacgctcgagcgtggtcaatgaggacaagtcgaccgagagattcctgagtacgtctatggtcaccctttgcggtaaacttgtgcgctcagaagaagccagggtaacaatgggaca

SEQ ID NO: 68612 - DNA, 676 bp, Homo sapiens
aggggaggtgctagaagtcggaccggaagtggaagtggtcttccaaggcttttttgccgctggtgtcaggagtattttcatattccaataccgataaatctttgaggtttctgggtgtctctggggagcccctgggccagattttcctctagactccagcccatctcttcagagcagctctgcttgagttcacagatgactgccaagcttcagacaccctacagaaaaagggttgagacccagtgtggccatgccagctaattggacctcacctcagaaatcctcagccctggctccagaggatcatggcagctcctatgagggatcagtgtccttcagggatgtggctatcgatttcagcagagaggaatggcggcacctggacccttctcagagaaacctgtaccgggatgtgatgctggagacctacagccacctgctctcagtaggatatcaagttcctgaagcagaggtggtcatgttggagcaaggaaaggaaccatgggcactgcagggtgagaggccacgtcagagctgcccagtgacacaccgactccccctcccttccaccatgactaaaagcttcctggacctcaccagaagccaagcagacactagtgctatgctcgtacagcctccagaagcatgagctaagtaaatctctttttattataaa

SEQ ID NO: 68613 - DNA, 628 bp, Homo sapiens
cggcacgagggatgaacaaaagtgcagggatgactcctgagggtcttacttattaaatgggtcaggcaatgaatgaagactggcttgtaagctacaaggtagtttcgcccatttacacgaagacaatttcatgtattatttaacccgttcctatacactggtgtctctttgctgtccagcatgaaataaatatgaaataaatataagcttacaaattaatgaggtctgacttttattttcaaaataatctgacaattacttggtttcatccttttgtttggattctagcttgctttctcagaacagctagagaatgtgtatgaagtgtgcgtgtggagggggcaagggaagggaataaaaatgcattgcttcagggctgcacatctgtttttaaaaaactctgcaagatctgcccgttaaccactgtcacaactcctgctgtttcctgcaattgcattccaatcagagatgttcgtaccagctcaagatattgcaagtaaacagatttaactgttacaagttagtttcctattctcgtgcctcacagaattcttttttcttctcgagccgatagcacttgcatgtatggtacacataatgagtggtaacccattttctttctttttca

SEQ ID NO: 68614 - DNA, 449 bp, Homo sapiens
ccgtcaccaacatgatttcaaacggagcctgtggcctggtgacctggggccttgcagccagagacagtgaactgtcaggtttgggatggatgagagatttccttcttttgtaaagcggcagaactattgtgaaaggggagtagagaaaagagaacaccaggggctttcctgagcagatcatcactttcagaaaagagtacactgaacgtttaaaatctggaaattgaactccttaaaattatttgcatttgggtgctccttggaaagcctttgtatgccaaagctttgtgtacccagtataaaaatctctgctccagaatggcttgatctccttggagatcaggcagaaaattctgtcttttgcttttctttgcaatacctggttgaaccactgacttaccgtacgttttaactttcctgatatcctaccattatgtgttactatcagc

SEQ ID NO: 68615 - DNA, 500 bp, Homo sapiens
tctttctttgaaaagataaatgacttgcaaaattatagaagacatccttttttacattagagggaaaggagatggacaaatgaatgaataaataaatcagaagcaattgatttttttctgcttgcttctacagcttattgcatgtgaatagccaaagcaattttcactgggctaaattctgagtctattttttaaatctctttcatctaaagaaaatagagtttactttagaaatgctgacacatgccagagtctgaaaagtgctagcatgtgttgctctgaagaaaagaagacatttttctacttttttttttttttttttaaattgctgttcttggacttgggatcctttctttcgatggtgggtaggactttcaataatccgttctgagaagctgctcttgttgtttgtgttatacacatctgttctcccagtcctgttgctgggactgtgagggttcctagcctggagggggttttggaagagttgagagggcaag

SEQ ID NO: 68616 - DNA, 362 bp, Homo sapiens
gtcagttaaatacattggtcatgtatccgattgtttttaatactaatttgaaatgcttcatttttaaatacccaatgtttatatgaatttgcattcacaataatgtttattctttcaattgatctatttctttttcagctctaagctgtctgggttaccatagcttcctaatttattttcataccttgataggttatcattctattctccctgtaatcctctggctatttacatgggtttatttttccagatgaacttgtcaatttgtcaagttccaataaggatgcattgatttcagttggtatttatttagaggtcaatttaggaaaaattaacctctttattttataattttcctattc

SEQ ID NO: 68617 - DNA, 425 bp, Homo sapiens
gtctttgggccctccaacgtggactcaccatgagaggacgatcgtgtgctattccattaaacatgcctccgtctcacgactccagccagggttaaaaccttcagatgttttctcaacacattaagcagaactaaccatcacaaaggcaaaaactaaacccatctgtccccttgtcaggatttttgagattgtcaatggactgaccttgtggctggaaaacattttggaggccgtgtaacaaaagttaaatgtggcagtgaatgcacagagaaattcttagaggtcactagtgaattactaacaccattaccctggcaagagatgatggagtttccattttatctcagaggtttggtgggtgtatggtgatgacttaaaatgacgttaggctacgtagccaacactttcttggaaaggactttccc

SEQ ID NO: 68618 - DNA, 876 bp, Homo sapiens
agaacctagagcccaaggttcagagtcacccatctcagcaagcccagaagtatctgcaatatctacgatggcctcgccctttgctttactgatggtcctggtggtgctcagctgcaagtcaagctgctctctgggctgtgatctccctgagacccacagcctggataacaggaggaccttgatgctcctggcacaaatgagcagaatctctccttcctcctgtctgatggacagacatgactttggatttccccaggaggagtttgatggcaaccagttccagaaggctccagccatctctgtcctccatgagctgatccagcagatcttcaacctctttaccacaaaagattcatctgctgcttgggatgaggacctcctagacaaattctgcaccgaactctaccagcagctgaatgacttggaagcctgtgtgatgcaggaggagagggtgggagaaactcccctgatgaatgcggactccatcttggctgtgaagaaatacttccgaagaatcactctctatctgacagagaagaaatacagcccttgtgcctgggaggttgtcagagcagaaatcatgagatccctctctttatcaacaaacttgcaagaaagattaaggaggaaggaataacatctggtccaacatgaaaacaattcttattgactcatacaccaggtcacgctttcatgaattctgtcatttcaaagactctcacccctgctataactatgaccatgctgataaactgatttatctatttaaatatttatttaactattcataagatttaaattatttttgttcatataacgtcatgtgcacctttacactgtggttagtgtaataaaacatgttccttatatttactc

SEQ ID NO: 68619 - DNA, 1234 bp, Homo sapiens
aggccgagatgtcggggagctgacaagatgccccagtgacatttcagctagaaagagcaagtgtcttgcaaccaagtggtcaaatatcaaataataggtcaagcaggaaggagctgagttctaaccacaaagaggtttctggtaacttacttgacaagcttttgggtgctttgtggcttgacaaagtgatgttctgttgggtatcgctagacagactgttctttatcgccttcagaagatcagacattgacattgattaaactctttaacccttaaaggttaaatccttgcagtttgcatcatggtaagtgaagaacaaaagaatatttgtagtaagaatttgtttttgtatttatcatttaactccctagtgctattaacttctgatgtgaactatagcttttgacaaagagtcttgatacataatctattttttatattatttttcattatggaatctttcattatggatacattagagtataacagtatgtattacagaagtttttttgtcttatctttacagtgacatttgattcaaatatacccaactgctgagaatttttttattggccttggtaaataagattttatactaactatttattagtagccaaattagccaagtgatttatgccatctgagggaacacagcagtattactgtcgtactgtgtaacacatcctattcttgtaatactgaaccactataattagctttatataaaactttagaaagcttatatggagtaaaattatatctttaaccaaatttctcttaattctttccttggaattatttttaatatgacctgtgtaacatgacctgtatgaaattcaacttgcaaatttattataacatggaagtgctatttattgtttttatacagatcatataatttctgcacatttcagaacacctttctctgctgttccaaacaatgattaggatattgttcatacagaaattgatagacaattttttagttcatgtgatatcactgagcttacaattctcactagagaagaacaaggttactatatgtaacctctatgtctaagtgtttgtgtgtgtgtatgcttgtgttgaatctgttttcagatcctactgattttagaggaacaagcagctttgtaaaatgtgccttggaaaggccttggtcttcttgccttgattttataatctgttaatgggataactccaaaaataaatgtgtatgtgtctccatataaaa

SEQ ID NO: 68620 - DNA, 397 bp, Homo sapiens
ccctccaagccatgtgctcccgcacatggtgtgccatttgttaagcccgttggaagagcgaataggaacagctccagtctacagctaccagcgtgagcgacgcagaagacgggtgatttctgcatttccaactgaggtaccgggttcatctcactggggagtgccggacagtgggtgcaggacagtgggtgaagtgcaccgtgcgtgagccgaagcagggcaaggcgtcgcctcacccaggaagtgcaaggggtcagggaattccctttcctagtcaaagaaaggggtgacagatgacacctggaaaatacagccatctgatatttactccccagtgtgacttggtttcttctacatgctgtcaggtacaaaataaaacaaaagatacattttagaa

SEQ ID NO: 68621 - DNA, 2965 bp, Homo sapiens
  misc_feature (488)..(488): n is a, c, g, or t
  misc_feature (541)..(541): n is a, c, g, or t
  misc_feature (754)..(754): n is a, c, g, or t
gagacggaattttgctctgttgcccaggcttcagtgcagtggcatgatctcggctcactgcaacctccgactcccaggttcaagtgattctcctgcctcagcctcaccagtagctgggactacaggcaggcacttccatgcctggctaatttttcaaatttttagtagagacagggtttcatcatgttagccaggatggtctcaaactcctgacctcatgatccacctgcctcagcctcccaaagggctgggattataggcatgagccactgtgcctggcctaagctctaattttttatcttgctgaaattcctatctaaggggcttagggagttatgccctacaaaccataaattctcatcagatgggttttatttaaccctgtatatcaagacttactttccaatcagactctggcataacaagaagaaaatcaaaatgttttacccaaaaatatatttccttgccataccttgaaattgccctgnaaagtctcttgtaggaaaaatccacattctataaagaaccccatttcctcttngttttctttccttccttcccagatccaggagacaatcaactaagagccacatacccttttaggtctaagacatattttacaacctgctctctctctgacgtctggtgtctgagagataccggtgcacaataaaacttggtctccacaaagctttaccttaacctgaacattccttgccattaatcccaggtcttcaaataaactcacccaatngtcagccacaaaatgtttaaatttacctatagcctggaagcccccactttaggttttcccacctttctgaaccaagccaacacagttcttaaatgtatttaattaatgtctcatgccttcctaaagtatataaaaccaagccgtaccccaaccaccttggccacatagtctcaggatttcctgagggctgtgtcacgggccaggttcactcatatttggctcagaataaatctcttcaaatattttacagagtttaactctttttgtcaacagcagcatctgctctgaggatgatggtgtatatttttcagtatctttatagtctcaagtgacagaaacccagtctcaggcaaaggagaatcttttggcttacagaatccagagaatattaacaagacaggggcagacatgcagaggaacaatttgaaccagggacttgaatgactgcaggattcttactccacctcatctcattgtttctgtacatcagtttcattctcgcctgtaggggggctgtctccacatgataggaatcataaccacaaacagcacacaaaatgtgcattccaccagagggagacagcctgatatatttaaatctgtttagaaacacacacacacacacacacacacacacacacacacattggagaggtattatgattggcccagcttaggttacaaagtcatgagaaatgactgctcaaccctggaccaatcaactttagtcatgggatgggatcatataaagatatcacagcttccatggcaacaacatgatttggcttggcagaaagggaagtttctaaagtaaagacactataaggtacagaactttccaaaaggcgagttgctctaccacaaaagggatgaccatatggcttccatcctgggctgacatcttagcaggttgaaggagaagacccctaggaacgcgcaccaaacccataatagtagctatataacctccccagcgttttctgccatgtggttcctcagctgggaagataaatccccaccaaaatcaatcaggggtgccttccaaattctggtgacctgaaacaaagctataactgtagcaattaaccaaaaacatgcacccaatttagggagaaagttttggatacacagccaatctattagccatctcttcccaaggcaggtggtgacttgagaactctgtgcctggtttctgaggactgtttcaccatgcagtggctaatgaggttccggaccctctggggcatccacaaatccttccacaacatccaccctgccccttcacagctgcgctgccggtctttatcagaatttggagccccaagatggaatgactatgaagtaccggaggaatttaactttgcaagttatgtactggactactgggctcaaaaggagaaggtaagagatctgccgtgatggcgatataagaacaagggtggcctcactttccttatcttgctcctactaggctgaaaggtatggaaccaaagttacttctgcctcaacttatcagtgttgtggaagaagcttatatttcaaggttctattcccagcctggccatttccttacttcattgagcctcagtggtttcatctatgaaatgaggaattaactcctttaaaaacaagaaaataggtaaatatatcttttattcaatcagggtactataattgtgaccaggtgcaaagttctagtcacaaggtcagcaaattcgtattagtctgagttctcatcttcagtgaatgggacaatgtgtcttaactggtattcatgtcatcaaacttgggcttgacttgagactgcatgcagaggaggggatagaccacctgaatgtgcacatgagtgtctgacacatttacctatgttaggccatccatcttcccatgaggatggcaagtctaattagattcctccttgtcaactacctacttgactgtggctttaaggtatgtcaagaaaaaccaagccctgtgtcttccagaggttatgtgtttctgcagaaaaccccaagtgcttggtttgtcttctcacaagacacagaccaagagagaagcagtagtgacattaggagtcaggtagacaatggatggtatttatagccactaactcccagctgccaatatggtagtgtaaaaagtcacccagcactgtctttgtacagaagagagaatccccctgagatggaattggagagttaatataatttt

SEQ ID NO: 68622 - DNA, 3948 bp, Homo sapiens
  misc_feature (488)..(488): n is a, c, g, or t
  misc_feature (541)..(541): n is a, c, g, or t
  misc_feature (754)..(754): n is a, c, g, or t
gagacggaattttgctctgttgcccaggcttcagtgcagtggcatgatctcggctcactgcaacctccgactcccaggttcaagtgattctcctgcctcagcctcaccagtagctgggactacaggcaggcacttccatgcctggctaatttttcaaatttttagtagagacagggtttcatcatgttagccaggatggtctcaaactcctgacctcatgatccacctgcctcagcctcccaaagggctgggattataggcatgagccactgtgcctggcctaagctctaattttttatcttgctgaaattcctatctaaggggcttagggagttatgccctacaaaccataaattctcatcagatgggttttatttaaccctgtatatcaagacttactttccaatcagactctggcataacaagaagaaaatcaaaatgttttacccaaaaatatatttccttgccataccttgaaattgccctgnaaagtctcttgtaggaaaaatccacattctataaagaaccccatttcctcttngttttctttccttccttcccagatccaggagacaatcaactaagagccacatacccttttaggtctaagacatattttacaacctgctctctctctgacgtctggtgtctgagagataccggtgcacaataaaacttggtctccacaaagctttaccttaacctgaacattccttgccattaatcccaggtcttcaaataaactcacccaatngtcagccacaaaatgtttaaatttacctatagcctggaagcccccactttaggttttcccacctttctgaaccaagccaacacagttcttaaatgtatttaattaatgtctcatgccttcctaaagtatataaaaccaagccgtaccccaaccaccttggccacatagtctcaggatttcctgagggctgtgtcacgggccaggttcactcatatttggctcagaataaatctcttcaaatattttacagagtttaactctttttgtcaacagcagcatctgctctgaggatgatggtgtatatttttcagtatctttatagtctcaagtgacagaaacccagtctcaggcaaaggagaatcttttggcttacagaatccagagaatattaacaagacaggggcagacatgcagaggaacaatttgaaccagggacttgaatgactgcaggattcttactccacctcatctcattgtttctgtacatcagtttcattctcgcctgtaggggggctgtctccacatgataggaatcataaccacaaacagcacacaaaatgtgcattccaccagagggagacagcctgatatatttaaatctgtttagaaacacacacacacacacacacacacacacacacacacattggagaggtattatgattggcccagcttaggttacaaagtcatgagaaatgactgctcaaccctggaccaatcaactttagtcatgggatgggatcatataaagatatcacagcttccatggcaacaacatgatttggcttggcagaaagggaagtttctaaagtaaagacactataaggtacagaactttccaaaaggcgagttgctctaccacaaaagggatgaccatatggcttccatcctgggctgacatcttagcaggttgaaggagaagacccctaggaacgcgcaccaaacccataatagtagctatataacctccccagcgttttctgccatgtggttcctcagctgggaagataaatccccaccaaaatcaatcaggggtgccttccaaattctggtgacctgaaacaaagctataactgtagcaattaaccaaaaacatgcacccaatttagggagaaagttttggatacacagccaatctattagccatctcttcccaaggcaggtggtgacttgagaactctgtgcctggtttctgaggactgtttcaccatgcagtggctaatgaggttccggaccctctggggcatccacaaatccttccacaacatccaccctgccccttcacagctgcgctgccggtctttatcagaatttggagccccaagatggaatgactatgaagtaccggaggaatttaactttgcaagttatgtactggactactgggctcaaaaggagaaggagggcaagagaggtccaaatccagctttttggtgggtgaatggccaaggggatgaagtaaagtggagcttcagagagatgggagacctaacccgccgtgtagccaacgtcttcacacagacctgtggcctacaacagggagaccatctggccttgatgctgcctcgagttcctgagtggtggctggtggctgtgggctgcatgcgaacagggatcatcttcattcctgcgaccatcctgttgaaggccaaagacattctctatcgactacagttgtctaaagccaagggcattgtgaccatagatgcccttgcctcagaggtggactccatagcttctcagtgcccctctctgaaaaccaagctcctggtgtctgatcacagccgtgaagggtggctggacttccgatcgctggttaaatcagcatccccagaacacacctgtgttaagtcaaagaccttggacccaatggtcatcttcttcaccagtgggaccacaggcttccccaagatggcaaaacactcccatgggttggccttacaaccctccttcccaggaagtaggaaattacggagcctgaagacatctgatgtctcctggtgcctgtcggactcaggatggattgtggctaccatttggaccctggtagaaccatggacagcgggttgtacagtctttatccaccatctgccacagtttgacaccaaggtcatcatacagacattgttgaaataccccattaaccacttttggggggtatcatctatatatcgaatgattctgcagcaggatttcaccagcatcaggttccctgccctggagcactgctatactggcggggaggtcgtgttgcccaaggatcaggaggagtggaaaagacggacgggccttctgctctacgagaactatgggcagtcggaaacgggactaatttgtgccacctactggggaatgaagatcaagccgggtttcatggggaaggccactccaccctatgacgtccaggtcattgatgacaagggcagcatcctgccacctaacacagaaggaaacattggcatcagaatcaaacctgtcaggcctgtgagcctcttcatgtgctatgagggtgacccagagaagacagctaaagtggaatgtggggacttctacaacactggggacagaggaaagatggatgaagagggctacatttgtttcctggggaggagtgatgacatcattaatgcctctgggtatcgcatcgggcctgcagaggttgaaagcgctttggtggagcacccagcggtggcggagtcagccgtggtgggcagcccagacccgattcgaggggaggtggtgaaggcctttattgtcctgaccccacagttcctgtcccatgacaaggatcagctgaccaaggaactgcagcagcatgtcaagtcagtgacagccccatacaagtacccaaggaaggtggagtttgtctcagagctgccaaaaaccatcactggcaagattgaacggaaggaacttcggaaaaaggagactggtcagatgtaatcggcagtgaactcagaacgcactgcacacctaaggcaaatccctggccactttagtctccccactatggtgaggacgagggtggggcattgagagtgttgatttgggaaagtatcaggagtgccatgattccaatgttttccttcttttaaattaaattcagttgctctgcttcctccaagtcctctgtatctttagaatttcccaggtgagcactcataacgcaagtaataaaatactgatatcaacaa

SEQ ID NO: 68623 - DNA, 1169 bp, Homo sapiens
ctcagttgaaaactgcattattgtgagcatgaacaccgctgaccctggcagccagggcatcacacacagtaggtaggaaagaatacctagaggctgcactgggagccctctctagcaagtggtgcttttcattttttttgatcactgttttccaacttgaagacacattggtgacatctactaactcatgaaacatagacccttggcttgagtttcacatttgcgtattttaaaggcttttgacagttttattccattttctgatgtttcctctgttatttcatccacactggtgtcccatgcataaaccagacagtgcttgggtggggcagaagggctgcggcctcctgcagtgtatgattcacaggcctcttgctacaggtcattgatgacaagggcagcatcctgccacctaacacagaaggaaacattggcatcagaatcaaacctgtcaggcctgtgagcctcttcatgtgctatgagggtgacccagagaagacagctaaagtggaatgtggggacttctacaacactggggacagaggaaagatggatgaagagggctacatttgtttcctggggaggagtgatgacatcattaatgcctctgggtatcgcatcgggcctgcagaggttgaaagcgctttggtggagcacccagcggtggcggagtcagccgtggtgggcagcccagacccgattcgaggggaggtggtgaaggcctttattgtcctgaccccacagttcctgtcccatgacaaggatcagctgaccaaggaactgcagcagcatgtcaagtcagtgacagccccatacaagtacccaaggaaggtggagtttgtctcagagctgccaaaaaccatcactggcaagattgaacggaaggaacttcggaaaaaggagactggtcagatgtaatcggcagtgaactcagaacgcactgcacacctaaggcaaatccctggccactttagtctccccactatggtgaggacgagggtggggcattgagagtgttgatttgggaaagtatcaggagtgccatgattccaatgttttccttcttttaaattaaattcagttgctctgcttcctccaagtcctctgtatctttagaatttcccaggtgagcactcataacgcaagtaataaaatactgatatcaacaa

SEQ ID NO: 68624 - DNA, 1002 bp, Homo sapiens
ctcagttgaaaactgcattattgtgagcatgaacaccgctgaccctggcagccagggcatcacacacagtaggtaggaaagaatacctagaggctgcactgggagccctctctagcaagtggtgcttttcattttttttgatcactgttttccaacttgaagacacattggtgacatctactaactcatgaaacatagacccttggcttgagtttcacatttgcgtattttaaaggcttttgacagttttattccattttctgatgtttcctctgttatttcatccacactggtgtcccatgcataaaccagacagtgcttgggtggggcagaagggctgcggcctcctgcagtgtatgattcacaggcctcttgctacaggtcattgatgacaagggcagcatcctgccacctaacacagaaggaaacattggcatcagaatcaaacctgtcaggcctgtgagcctcttcatgtgctatgagggtgacccagagaagacagctaaagtggaatgtggggacttctacaacactggggacagaggtggtgaaggcctttattgtcctgaccccacagttcctgtcccatgacaaggatcagctgaccaaggaactgcagcagcatgtcaagtcagtgacagccccatacaagtacccaaggaaggtggagtttgtctcagagctgccaaaaaccatcactggcaagattgaacggaaggaacttcggaaaaaggagactggtcagatgtaatcggcagtgaactcagaacgcactgcacacctaaggcaaatccctggccactttagtctccccactatggtgaggacgagggtggggcattgagagtgttgatttgggaaagtatcaggagtgccatgattccaatgttttccttcttttaaattaaattcagttgctctgcttcctccaagtcctctgtatctttagaatttcccaggtgagcactcataacgcaagtaataaaatactgatatcaacaa

SEQ ID NO: 68625 - DNA, 527 bp, Homo sapiens
gcaaatcccatgggtacatccaccttctaggggccagggggagaacctgaaatacttggggactccattaaggccaccatatggtgtcagcctgcatgggagactgtggaggggcagaggaggagagtggagaattgttaggaaatggcagcaggactcaatcactgtggatttgctttatcctcaaccaggtggagtttgtctcagagctgccaaaaaccatcactggcaagattgaacggaaggaacttcggaaaaaggagactggtcagatgtaatcggcagtgaactcagaacgcactgcacacctaaggcaaatccctggccactttagtctccccactatggtgaggacgagggtggggcattgagagtgttgatttgggaaagtatcaggagtgccatgattccaatgttttccttcttttaaattaaattcagttgctctgcttcctccaagtcctctgtatctttagaatttcccaggtgagcactcataacgcaagtaataaaatactgatatcaac

SEQ ID NO: 68626 - DNA, 400 bp, Homo sapiens
agtggcagttggcataattggattcagataaacatgtatattattgttttctatttgttgttcttctctgtgttttttaacttctcttttctgccctttttccttttagctgagcattctatatgattttattttctatattatatatctatatagtctactttttcttagattctattagtgagttccccagagtttgtagtatagcattcacaactaatgggccttcaatttcaaatagtactatactggcttcaggaatagtgctggtataatagacagttccgaagtgtgatagactgttcttcctcccatcacatataacattactttcattcattagttcaactgggagctataaactactgaatacattgttgatattattattttttctttt

SEQ ID NO: 68627 - DNA, 268 bp, Homo sapiens
cttgtagttgatatttactgattgaaatgtatatacacaaaaattatgtaaaactgattatctagaggtttcttcattagctagcacaaatagttattgtaaacctttgtcctgtatttttttaaagtctgcaacatggtgaaccagtatgcttgatggctttaatacctgtgtctgcaatttattattcatttgaagcaacaaattcagaattgtttgaaattatgaaggctaaacagcataaatacattgtggtttcttttataaa

SEQ ID NO: 68628 - DNA, 362 bp, Homo sapiens
gtgaggaaagagtcttctcttgaccagaaaatgatacctgtggtgtcttttcctgaaactgaaaacattaaagcattctgatcccagagaaaacaaattctctgggatataagggttcaccttttggaggtggattacacttttcaggacaccagagaaccatagagcaaattacttcttccagagtgctaaatgatcccctggtgccctggaaagagaccgtttacctccaaaaggtgagttgtttattgccagagagtagaatattggctgtaatgcctgctcatccatccttctccatccctgcgaggtatttagggtggaggagatattatccacctgtcaccatggggaaggagact

SEQ ID NO: 68629 - DNA, 591 bp, Homo sapiens
actggacgcggtaactgtcctcttgagagccatcttgcctagctgggccaagccgagatagcacactcaacgcccagcatgccgaggaggaggagacgccgagggtcctccggtgctggcggccgggggcggacctgctctcgcaccgtccgagcggagctttcgttttcagtgagccaggtggagcgcagtctacgggagggccactacgctcagcgcctgagtcgcacggcgccggtctacctcgctgcggttattgagtacctgacggccaaggtcctggagctggcgggcaacgaggcccagaacagcggagagcggaacatcactcccctgctgctggacatggtggttcacaacgacaggctactgagcacccttttcaacacgaccaccatctctcaagtggcccctggcgaggactagcttctgacacccggcccctgggacctgacaggtccactcgtccacccacccggccccaaatcccccggcctgaacccccggccttaaacaccctccccccacaacccaggccccaaagtcttgggccttcattaattctgtcaataaaatgtttcaaggaagcca

SEQ ID NO: 68630 - DNA, 1367 bp, Homo sapiens
ttcttctcagggaacccagacatccatccctcaagattccagtccttgtcctagtccggcccttgacctcagagacgggatcagctcttcctccagcacctaccttgagggtatagaagaatgcaaaccacattggaaacctggagatctgtgttctcatttcagctctgctgactggcttcctgcaagctaccttccctccctgggcctcagtttctctctctgctgagccagaagatgtctaaagacccctttggttccaccctgagagcctgtctccctaacctcaacttcttccccagttcagagaacccaggcatccagctgccccaccccagctctgggtaaacaggaagctgggtgaggggagcaggggtgtgcggaaagtcccagccaggtgtgcaggtctacagggagggggtgggcccgtccctgaggtatgaaagccccctgctctggctctggttcagtctcaatgggggcactggggctggagggcaggggtgggaggctccaggggaggggttccctcctgctagctgtggcaggagccacttctctggtgaccttgttgctggcggtgcctatcactgtcctggctgtgctggccttagtgccccaggatcagggaggactggtaacggagacggccgaccccggggcacaggcccagcaaggactggggtttcagaagctgccagaggaggagccagaaacagatctcagccccgggctcccagctgcccacctcataggcgctccgctgaaggggcaggggctaggctgggagacgacgaaggaacaggcgtttctgacgagcgggacgcagttctcggacgccgaggggctggcgctcccgcaggacggcctctattacctctactgtctcgtcggctaccggggccgggcgccccctggcggcggggacccccagggccgctcggtcacgctgcgcagctctctgtaccgggcggggggcgcctacgggccgggcactcccgagctgctgctcgagggcgccgagacggtgactccagtgctggacccggccaggagacaagggtacgggcctctctggtacacgagcgtggggttcggcggcctggtgcagctccggaggggcgagagggtgtacgtcaacatcagtcaccccgatatggtggacttcgcgagagggaagaccttctttggggccgtgatggtggggtgagggaatatgagtgcgtggtgcgagtgcgtgaatattgggggcccggacgcccaggaccccatggcagtgggaaaaatgtaggagactgtttggaaattgattttgaacctgatgaaaataaagaatggaaagcttcagtgctgccgataaagatgct

SEQ ID NO: 68631 - DNA, 617 bp, Homo sapiens
  misc_feature (3)..(3): n is a, c, g, or t
  misc_feature (36)..(36): n is a, c, g, or t
  misc_feature (38)..(38): n is a, c, g, or t
  misc_feature (100)..(100): n is a, c, g, or t
  misc_feature (108)..(110): n is a, c, g, or t
  misc_feature (112)..(112): n is a, c, g, or t
  misc_feature (136)..(137): n is a, c, g, or t
  misc_feature (163)..(163): n is a, c, g, or t
  misc_feature (179)..(179): n is a, c, g, or t
  misc_feature (297)..(297): n is a, c, g, or t
  misc_feature (312)..(312): n is a, c, g, or t
aangaagaaagggagaaaaggatagaagcatttttngntgctctctcttcccctggtggtgttgtggtggtgttggtgtaaaaaaaaaaaaaaaaaaaanctcccccnnntnttcttctctgtgtggctcaagtannctggtgtgatcccctggcctactcgnggcagtatcaggtcanaatgatgctgggcaaatgcctttctgaatgaattgtatatcagaggggttccacggggtgtccactctttttaatgtgaggacattttttgcttatctgtgatggtggatatcatganaaattatgcacaacnccttttttcttaaatagctcatcagctatcgttagtgtattttatgcatagctcaggacaatttttcttctttcagtgtggcccagggaagccaaaaggttggaacccagaattctagaccttctttggggccgtgatggtggggtgagggaatatgagtgcgtggtgcgagtgcgtgaatattgggggcccggacgcccaggaccccatggcagtgggaaaaatgtaggagactgtttggaaattgattttgaacctgatgaaaataaagaatggaaagcttcagtgctgccgataaagatgct

SEQ ID NO: 68632 - DNA, 1321 bp, Homo sapiens
ttcttctcagggaacccagacatccatccctcaagattccagtccttgtcctagtccggcccttgacctcagagacgggatcagctcttcctccagcacctaccttgagggtatagaagaatgcaaaccacattggaaacctggagatctgtgttctcatttcagctctgctgactggcttcctgcaagctaccttccctccctgggcctcagtttctctctctgctgagccagaagatgtctaaagacccctttggttccaccctgagagcctgtctccctaacctcaacttcttccccagttcagagaacccaggcatccagctgccccaccccagctctgggtaaacaggaagctgggtgaggggagcaggggtgtgcggaaagtcccagccaggtgtgcaggtctacagggagggggtgggcccgtccctgaggtatgaaagccccctgctctggctctggttcagtctcaatgggggcactggggctggagggcaggggtgggaggctccaggggaggggttccctcctgctagctgtggcaggagccacttctctggtgaccttgttgctggcggtgcctatcactgtcctggctgtgctggccttagtgccccaggatcagggaggactgggtttcagaagctgccagaggaggagccagaaacagatctcagccccgggctcccagctgcccacctcataggcgctccgctgaaggggcaggggctaggctgggagacgacgaaggaacaggcgtttctgacgagcgggacgcagttctcggacgccgaggggctggcgctcccgcaggacggcctctattacctctactgtctcgtcggctaccggggccgggcgccccctggcggcggggacccccagggccgctcggtcacgctgcgcagctctctgtaccgggcggggggcgcctacgggccgggcactcccgagctgctgctcgagggcgccgagacggtgactccagtgctggacccggccaggagacaagggtacgggcctctctggtacacgagcgtggggttcggcggcctggtgcagctccggaggggcgagagggtgtacgtcaacatcagtcaccccgatatggtggacttcgcgagagggaagaccttctttggggccgtgatggtggggtgagggaatatgagtgcgtggtgcgagtgcgtgaatattgggggcccggacgcccaggaccccatggcagtgggaaaaatgtaggagactgtttggaaattgattttgaacctgatgaaaataaagaatggaaagcttcagtgctgccgataaagatgct

SEQ ID NO: 68633 - DNA, 1946 bp, Homo sapiens
ttcttctcagggaacccagacatccatccctcaagattccagtccttgtcctagtccggcccttgacctcagagacgggatcagctcttcctccagcacctaccttgagggtatagaagaatgcaaaccacattggaaacctggagatctgtgttctcatttcagctctgctgactggcttcctgcaagctaccttccctccctgggcctcagtttctctctctgctgagccagaagatgtctaaagacccctttggttccaccctgagagcctgtctccctaacctcaacttcttccccagttcagagaacccaggcatccagctgccccaccccagctctgggtaaacaggaagctgggtgaggggagcaggggtgtgcggaaagtcccagccaggtgtgcaggtctacagggagggggtgggcccgtccctgaggtatgaaagccccctgctctggctctggttcagtctcaatgggggcactggggctggagggcaggggtgggaggctccaggggaggggttccctcctgctagctgtggcaggagccacttctctggtgaccttgttgctggcggtgcctatcactgtcctggctgtgctggccttagtgccccaggatcagggaggactggtgagtggctgcaacaggccctggtggagagttgtatcttgcggatgcttggctccctctggttgtgcctgtggtcttttgccccctctggctcagctggctcggctgtccctggtggggatgtcttgtctctttgctgactctctttccatgttcctgtgatgttgtgcttgtgtcccgacataagccccttgtgtctcctctcctcttcccgaggtacatctgtttctccgcccaagtacctatgccttgcttgttctcccttctaaggaggtgtgtgttggggatggtgctggtaggagaaaccccaggcctgcagcttgggtccactttcagaggggtaggggtgacatgagctgaatctgaactctgggcactgtgaccccacccaaccaggtaacggagacggccgaccccggggcacaggcccagcaaggactgggtaagagcagactgtctctccttccccgcttcagaccctcaggggctcccagctccctgctgcgtccccagatacctcttcctctaggaatccaggctccccatccctgcgccctgttctctcaagggtagcctgcatgggtggctgccctgcccccaatcgtggactctttgccccttccagggtttcagaagctgccagaggaggagccagaaacagatctcagccccgggctcccagctgcccacctcataggcgctccgctgaaggggcaggggctaggctgggagacgacgaaggaacaggcgtttctgacgagcgggacgcagttctcggacgccgaggggctggcgctcccgcaggacggcctctattacctctactgtctcgtcggctaccggggccgggcgccccctggcggcggggacccccagggccgctcggtcacgctgcgcagctctctgtaccgggcggggggcgcctacgggccgggcactcccgagctgctgctcgagggcgccgagacggtgactccagtgctggacccggccaggagacaagggtacgggcctctctggtacacgagcgtggggttcggcggcctggtgcagctccggaggggcgagagggtgtacgtcaacatcagtcaccccgatatggtggacttcgcgagagggaagaccttctttggggccgtgatggtggggtgagggaatatgagtgcgtggtgcgagtgcgtgaatattgggggcccggacgcccaggaccccatggcagtgggaaaaatgtaggagactgtttggaaattgattttgaacctgatgaaaataaagaatggaaagcttcagtgctgccgataaagatgct

SEQ ID NO: 68634 - DNA, 412 bp, Homo sapiens
tgcaaccttaagttagacaaagagttcttaaacacaacagcaacagcataatccatgaaaggaaaaactgaaaaaattgacttcatcaaaattaaaaacttttgtgcttcaagaaacatcagtaagaaaatgaaaagcaagccacagtctgggagaaaatatacacaaatactatttctggtaaaggatttgtatccagaatatataaaaatcacttgtaagttaataataagacaagccaattaaaaatgggcaacagttgaataggtatttcaccaaagaaatatgaatggctaataagcatttgaaaaggtgctcaacatcattagtcgtgaggtaaatgaaaattaaaactacaaggagatgctattatacttcgtgcccagtagaaggaatataataaaaagacaaa

SEQ ID NO: 68635 - DNA, 416 bp, Homo sapiens
tcggaatcttcattgtttaggcaggaatttgaggagcagatgttatgccccttgaacaggccctttaattcgccttagtactgtgtctaatgactcttaatcctgtccttttaactctgtggctagcagatttcggagtgaagtgagacaggaatgatgagcttgaagctgaacatttcattttaatgttggcaaagtagtctacagatagtacatgacaaacagtgagacagagggaacatgttaaaagtgttcctatatagcagaaaaacaatgtgaacattagtgtgggatcactgaaattttgggtttcccgtcaaatgtagatagaacagtttggttgattagtttgccagagaaatggagccattgactgtttctactttgtcttcttaaacttttatattttttagatt

SEQ ID NO: 68636 - DNA, 2913 bp, Homo sapiens
  misc_feature (729)..(729): n is a, c, g, or t
  misc_feature (1176)..(1176): n is a, c, g, or t
  misc_feature (2830)..(2830): n is a, c, g, or t
tcacttacccattccataattagtttccttgtatgtaaaatcaggggataataatgtcaacaaatagttatctgcttaacattgttttattaaaaagcaggtatgttcgcatgaataaaacaaccttcccttttaaactccttgtttggcatcctcaaacctctcagcttgtttcagatgggaacttcaacccaatatcaggtcacagtgcccaggttgatctgtactccgtgtgggctctgaaagcatcacccctgcagaggctggaagccctagtcttcccaggggatgccttgtctgcaggtactgcccccagcctgcagtgaactctggaccttttattgatcctgtgtgcatctggctccactctgataccaggaagaatgggggttgctggccctggacttggtcctggacaaataaatgtgtttgtcaaagccctttcctgacatcggttgtctctagcccaggtggcactgtggagggtaattagttctctttattagagggaacatcaggaagctctgcgctgctcaccgtggacacatgtaaaaagattttgttaatgcagctgttacttgccttttcattatgctaatgggcagcctgtaagaaatgtaacttcctgtcactggcaccaagcaacacctatcagacaaagcattgtttcttctcactgttgataagtgtgacttgtggggaccagcgataggatgctcatttttatcngctaagtgcacagcgcttgtaaaaaaccagcagtggccttgttaccacttgacgtgacactaggtttagctgtttacattgacacactgctgcacccttttagagctgcagccaggggtcagattcattagaaagcgtcagcgccgatagtgaagcagcatctggtgggattctctctgctctcctgttggaagcagcaaggcaaggcgcttgcatcttgaaatgggtgatttttaaatcttttcttcgtttgattatttgagaacccctgtttgttccttgaccctacatgaagaagatgagagagaaagagctggacatagcattcaccccagtgatgaagaatgggaatgttggggcctgctgtttgttgcttttctttttgctgatgtgtggctcttcgttgcccaaaaggtctgcagagagggagttaaatgcatgtgtttntcttgcacagcagcaaggctaaaatgtggaagtaagctaagtaaacctttataattagtcctttatgtctttctccttttgcctccctatgtatgagtattgccttgataaatttggtgaccatacttcccttataatgctggaagccacatatcttttggttctatgttgttatccctttagtcatttaggatatggaggatgatcacccagaatccttggttcattttgcaatcactgtgaccagatgagttgctgataacctagagcagccagagtgcttgttgcattaagagccagagcccaggccttcacttttgccacatgtgactctatgtccatgaaactatgtgcaggacaatgcacacggcaattgagaaggttctggagacctttcataatgttgtgtgagggctcgctggccaccatggcagagagagcaacatcctccttaccttcagaaacctctggcaccaccagcattgctgacatatctcacgccctgtcacagcttcttagttcaacaggctgcaaaagctcctccccacctccacctgttcataaggatgtaaggataattagtgcattttctcaagttcaatgatacactcattttgaaaagcaactaccgcattatcctgcccttgcccttgggaactggatcccttcatttgtcgagaataccccttgccaggccttttcatctagccgctgctcacactgcaccggggcttctgtctgggtgattcttgctgggtcatgccaggaggtatttggcatttccctaaagcccatcatgtgaagtaagagtaccaccgaatcacgaagctctgagaagttttgttaagatcagtcatggcttgatcagtccaagcattaggatacctagtttgcaagtccagtgttgtccacctggcctggaatttaccaactgctctgtggagagctctcatcccacttatgaactgtgctgcttatctgcactttctttttctgtatgcccagtacgtagctatgaagggaggatcccaggggccagaagccaggggaccatgtagtgtcttagtgtggtttatatgtcattgcagtctccatccaggtcttttccagatcctgggatgctgccaagaatttccatgcacaggaagacagagatggtcatggtgatatacagacttatacagaagacgtttttctatctttggggggcttttgacccctttccactcacttgaattcacacagaataattatatgctcttctgagggcttactgctgggtcagaaaagcagggagagttgcttttggatagtaatccccactgctggccaccagcagctgcagcctccacagcagctgcttcccctcgcctccatgccaccatctccccttcatatccactatctccttgtctctctgcaggtcatttataatcagcagtcatggcgtacaggcctcattagtgatatagccattccttcagtgcttcagaaataatcatttagaaaaaaatgcacggtttccatcccttgagagcccatgagtgatgaatttatttcagtttggctggcttggctgtcttgctcagccttatttccatatttatttcaacaaacaatgtagggtgggaacaagaaaacacatgctgggtgnacacacacgctgcatatctgctccctaagttgattcctcttggggaaggatgaaaaggaatgccaacgaaagaaccctccatt

SEQ ID NO: 68637 - DNA, 210 bp, Homo sapiens
gcttctgttaattcatcaaataattccttaggctaataaaacagttatagttcaagacatttgcaccccaacaaaggagtacaaagattgaatgaaatataataatactgaagaattattatgaagaaaattattttctggactaaatgctattaagtcaatttaattccttgatctattttctgtatactacatataaattgattctaa

SEQ ID NO: 68638 - DNA, 485 bp, Homo sapiens
ttcatttaaaattatcttattactgcttcccaggttgctatgatccgaaaccattgcttacattgagtaaccttttccatgtttatctcagtatgctgtgcccctcacccctgagccctggtgtatttcagcacaaagccaagatgtattgttgaaacccagggtccaggaagacagccacttagcaaatgggtgggaggattctaacacagatgcctgctacctgctgctcgtgctattgtgcttatttcacaggtgaattctgactgtttaagaagcacttttattgctactcattgtactcaagcttcagaaaattgtaatggagatttagatttagtaaacaagattcagtgaaaaattttagacatattaaaagtttaatcacaggattatttatcgagaccataatccccatggaatgggcctcggtattaaaaagttaaaatgctaaattatattattaaaattatttttctcttttt

SEQ ID NO: 68639 - DNA, 518 bp, Homo sapiens
atcttcaaaaacgttatcttatctctggcacactctggccttaacccggagtccgatgtctctgggataatgatggtgaatgctcatgagatccagaaagcaatatgttaaccatacagtgttcaaaaccgttcatcagatggagacactggtatgtgcatattccgcggcacagcagcagaaaggatggcgggcctttatgttgtctgataatgcagctctttgaaacattgctggcggactctcttcacatcatgtcacacaggacaagaaacgggacaggccctctctgcttctcaattcatcgacctgccatacaatacaacaaaccagctttttcaaggccccctgaatgaaggcctgtgcctgcaagggaaatttaattggatttctttatgggttgcaacaatccaatgaaaaattatgtaagaatggcatgattcagtttcagcatgcacttgaataataataatttttttatttataacaagaattctttaaaaaaataataagaattt

SEQ ID NO: 68640 - DNA, 553 bp, Homo sapiens
aggctccacacctagtacatcattgaaatcccttacttaccaaggctttcaccaaaagtaaaagttgctaagagttaacattgtaatatgtaattgagactgctgaaaaaataggtttagattcaagatgtgtaaggagaatgaaatgtgttttttataagagattatatgaaggtatgagaatgtaaattttttgcctaggttagagggttaaaggattgttttaaattaaataaagctaaaggttagaacaagttgtggaaagtttatgaaaaattgattgtaagagattctatgtgtgaacaaattggctaaagttaaaatggcattattcagttttttctataaattggacattggaataaaagcacaacagagttttcttagaacgttgttctgctctgagaaaaaaaaattgtaaagggttgtaaaaggcttataaaaattttactttatggtcaaattagttaaaactgaatagatttataagatgttattaaaaactagctttagcattaaaaatacactaataaaaacataaaatttggatttt

SEQ ID NO: 68641 - DNA, 2695 bp, Homo sapiens
accgcaggagccgtgcagccgcggaccaatgagcgggcgccggacgacctgtggcccaatggcggcggcgcgcgggcacgctgggggccggccagacgggccgacttttccagaagacccggatagttcctcccggccacgccgcgccggctctgggcactcagcatcgtttccttttcctccgctggagcagctatggcggcggtgaagaccctgaaccccaaggccgaggtggcccgagcgcaggcggcgctggcggtcaacatcagcgcagcgcggggtctgcaggacgtgctaaggaccaacctggggcccaagggcaccatgaagatgctcgtttctggcgctggagacatcaaacttactaaagacggcaatgtgctgcttcacgaaatgcaaattcaacacccaacagcttccttaatagcaaaggtagcaacagcccaggatgatataactggtgatggtacgacttctaatgtcctaatcattggagagctgctgaaacaggcggatctctacatttctgaaggccttcatcctagaataatcactgaaggatttgaagctgcaaaggaaaaggcccttcagtttttggaagaagtcaaagtaagcagagagatggacagggaaacacttatagatgtggccagaacatctcttcgtactaaagttcatgctgaacttgcagatgtcttaacagaggctgtagtggactccattttggccattaaaaagcaagatgaacctattgatctcttcatgattgagatcatggagatgaaacataaatctgaaactgatacaagcttaatcagagggcttgttttggaccacggagcacggcatcctgatatgaagaaaagggtggaggatgcatacatcctcacttgtaacgtgtcattagagtatgagaaaacagaagtgaattctggctttttttacaagagtgcagaagagagagaaaaactcgtgaaagctgaaagaaaattcattgaagatagggttaaaaaaataatagaactgaaaaggaaagtctgtggcgattcagataaaggatttgttgttattaatcaaaagggaattgaccccttttccttagatgctctttcaaaagaaggcatagtcgctctgcgcagagctaaaaggagaaatatggagaggctgactcttgcttgtggtggggtagccctgaattcttttgacgacctaagtcctgactgcttgggacatgcaggacttgtatatgagtatacattgggagaagagaagtttacctttattgagaaatgtaacaaccctcgttctgtcacattattgatcaaaggaccaaataagcacacactcactcagatcaaagatgcagtgagggacggcttgagggctgtcaaaaatgctattgatgatggctgtgtggttccaggtgctggtgccgtggaagtggcaatggcagaagccctgattaaacataagcccagtgtaaagggcagggcacagcttggagtccaagcatttgctgatgcattgctcattattcccaaggttcttgctcagaactctggttttgaccttcaggaaacattagttaaaattcaagcagaacattcagaatcaggtcagcttgtgggtgtggacctgaacacaggtgagccaatggtggcagcagaagtaggcgtatgggataactattgtgtaaagaaacagcttcttcactcctgcactgtgattgccaccaacattctcttggttgatgagatcatgcgagctggaatgtcttctctgaaaggttgaattgaagcttcctctgtatctgaatcttgaagactgcaaagtgatcctgaggattacagctgtggaatttttgtccaagcttcaaataattttgaaagaaattttcccatatgaaaaaaggagagaacactggcatctgttgaaatttggaagttctgaaattatagtatttttaaaaattgcactgaagtgtatacacataaagcaggtcttttatccagtgaacaggatgttttgctttagcagcagtgacataaaattccatgttagataagcatatgttacttaccttgttattaaatatttcttgaaaagcaaattttaatggtttaattttatgtggacgtatgttaaattatccaactaccctattgttaagcatttggttttaaaatttttatgctaatataaatgctcaagtaatttaaaatattgaaagcatccctgttggtataaatttctgagtaaatgcattggatcagttggactttgaacgcctttgaaatggctttgctaaaatgctcccgccacaaagttgtaggaaatgggaagaggagtcaactagaggcaagggagttgagagagctgcaactgtaaagggcaagaacaggcagaggtaaaaagatgatggaaggtgtggtgactaagggccacggttattgggtgaaatttgagattgtaggccaactgtattttcaagcttctgaacttaggcaaaatattcatcgcaaagtctctagcgtcatatttttctcacccaaattacgtttccacgagattatttatatatagttggtctatctctgcagtccttgaaggtgaagttgtgtgttactaggctgtgttttgggatgtcagcagtggcctgaagtgagttgtgcaataaatgttaagttgaaacctc

SEQ ID NO: 68642 - DNA, 2108 bp, Homo sapiens
accgcaggagccgtgcagccgcggaccaatgagcgggcgccggacgacctgtggcccaatggcggcggcgcgcgggcacgctgggggccggccagacgggccgacttttccagaagacccggatagttcctcccggccacgccgcgccggctctgggcactcagcatcgtttccttttcctccgctggagcagctatggcggcggtgaagaccctgaaccccaaggccgaggtggcccgagcgcaggcggcgctggcggtcaacatcagcgcagcgcggggtctgcaggacgtgctaaggaccaacctggggcccaagggcaccatgaagatgctcgtttctggcgctggagacatcaaacttactaaagacggcaatgtgctgcttcacgaaatgcaaattcaacacccaacagcttccttaatagcaaaggtagcaacagcccaggatgatataactggtgatggtacgacttctaatgtcctaatcattggagagctgctgaaacaggcggatctctacatttctgaaggccttcatcctagaataatcactgaaggatttgaagctgcaaaggaaaaggcccttcagtttttggaagaagtcaaagtaagcagagagatggacagggaaacacttatagatgtggccagaacatctcttcgtactaaagttcatgctgaacttgcagatgtcttaacagaggctgtagtggactccattttggccattaaaaagcaagatgaacctattgatctcttcatgattgagatcatggagatgaaacataaatctgaaactgatacaagcttaatcagagggcttgttttggaccacggagcacggcatcctgatatgaagaaaagggtggaggatgcatacatcctcacttgtaacgtgtcattagagtatgagaaaacagaagtgaattctggctttttttacaagagtgcagaagagagagaaaaactcgtgaaagctgaaagaaaattcattgaagatagggttaaaaaaataatagaactgaaaaggaaagtctgtggcgattcagataaaggatttgttgttattaatcaaaagggaattgaccccttttccttagatgctctttcaaaagaaggcatagtcgctctgcgcagagctaaaaggagaaatatggagaggctgactcttgcttgtggtggggtagccctgaattcttttgacgacctaagtcctgactgcttgggacatgcaggacttgtatatgagtatacattgggagaagagaagtttacctttattgagaaatgtaacaaccctcgttctgtcacattattgatcaaaggaccaaataagcacacactcactcagatcaaagatgcagtgagggacggcttgagggctgtcaaaaatgctattgatgatggctgtgtggttccaggtgctggtgccgtggaagtggcaatggcagaagccctgattaaacataagcccagtgtaaagggcagggcacagcttggagtccaagcatttgctgatgcattgctcattattcccaaggttcttgctcagaactctggttttgaccttcaggaaacattagttaaaattcaagcagaacattcagaatcaggtcagcttgtgggtgtggacctgaacacaggtgagccaatggtggcagcagaagtaggcgtatgggataactattgtgtaaagaaacagcttcttcactcctgcactgtgattgccaccaacattctcttggttgatgagatcatgcgagctggaatgtcttctctgaaaggttgaattgaagcttcctctgtatctgaatcttgaagactgcaaagtgatcctgaggattacagctgtggaatttttgtccaagcttcaaataattttgaaagaaattttcccatatgaaaaaaggagagaacactggcatctgttgaaatttggaagttctgaaattatagtatttttaaaaattgcactgaagtgtatacacataaagcaggtcttttatccagtgaacaggatgttttgctttagcagcagtgacataaaattccatgttagataagcatatgttacttaccttgttattaaatatttcttgaaaagca

SEQ ID NO: 68643 - DNA, 1140 bp, Homo sapiens
  misc_feature (18)..(18): n is a, c, g, or t
aaggctaggtacgaggcnggtgtgaatcgataaagcaggtcttttatccagtgaacaggatgttttgctttagcagcagtgacataaaattccatgttagataagcatatgttacttaccttgttattaaatatttcttgaaaagcaaattttaatggtttaattttatgtggacgtatgttaaattatccaactaccctattgttaagcatttggttttaaaatttttatgctaatataaatgctcaagtaatttaaaatattgaaagcatccctgttggtataaatttctgagtaaatgcattggatcagttggactttgaacgcctttgaaatggctttgctaaaatgctcccgccacaaagttgtaggaaatgggaagaggagtcaactagaggcaagggagttgagagagctgcaactgtaaagggcaagaacaggcagaggtaaaaagatgatggaaggtgtggtgactaagggccacggttattgggtgaaatttgagattgtaggccaactgtattttcaagcttctgaacttaggcaaaatattcatcgcaaagtctctagcgtcatatttttctcacccaaattacgtttccacgagattatttatatatagttggtctatctctgcagtccttgaaggtgaagttgtgtgttactaggctgtgttttgggatgtcagcagtggcctgaagtgagttgtgcaataaatgttaagttgaaacctcaaaaaaaaaaaaaaaaaaaaaaaaaaaaaaaaaaggggggggggggcaaaaagaaaatcccgggggggggccaattgggggaccccgtttttttgaaaagggggggggccaatgggggggggataaaaagaagggaggggggggggaaaacacggggggggggggacaaccgcgccggggccttgggggaagacccctcctgggggggccaattggggccaccccaagaagatagagccgggaaaaacctggtgtaaggggacccaggatgcggggggaatttgccctttctaatagcggcgcacactcaaagagaagcgagagaaacaagaagagaacaagcaagggacgcaaatgtaaaggaggaacagaaagaaaaaagctactaggcacgacatactacgcc

SEQ ID NO: 68644 - DNA, 782 bp, Homo sapiens
  misc_feature (18)..(18): n is a, c, g, or t
aaggctaggtacgaggcnggtgtgaatcggctgtagtggactccattttggccattaaaaagcaagatgaacctattgatctcttcatgattgagatcatggagatgaaacataaatctgaaactgatacaagcttaatcagagggcttgttttggaccacggagcacggcatcctgatatgaagaaaagggtggaggatgcatacatcctcacttgtaacgtgtcattagagtatgagaaaacagaagtgaattctggctttttttacaagagtgcagaagagagagaaaaactcgtgaaagctgaaagaaaattcattgaagatagggttaaaaaaataatagaactgaaaaggaaagtctgtggcgattcagataaaggatttgttgttattaatcaaaagggaattgaccccttttccttagatgctctttcaaaagaaggcatagtcgctctgcgcagagctaaaaggagaaatatggagaggctgactcttgcttgtggtggggtagccctgaattcttttgacgacctaagtcctgactgcttgggacatgcaggacttgtatatgagtatacattgggagaagagaagtttacctttattgagaaatgtaacaaccctcgttctgtcacattattgatcaaaggaccaaataagcacacactcactcagatcaaagatgcagtgagggacggcttgaggggggccatggcttgggctggggggggcccgggcgggcgggggaggcgggggacccttaaaacccggtgggggcgc

SEQ ID NO: 68645 - DNA, 581 bp, Homo sapiens
gcggccgcctactactactaaattcgcggccgcgtcgacagactgcaaagtgatcctgaggattacagctgtggaatttttgtccaagcttcaaataattttgaaagaaattttcccatatgaaaaaaggagagaacactggcatctgttgaaatttggaagttctgaaattatagtatttttaaaaattgcactgaagtgtatacacataaagcaggtcttttatccagtgaacaggatgttttgctttagcagcagtgacataaaattccatgttagataagcatatgttacttaccttgttattaaatatttcttgaaaagcaaaaaaaaagaaaaaagatcaggaataataacatagtcttatggtgaactttggtgttctcccactaagctacatggcctcccttatcactgaatactgctaaaaaaacactggctaagtactgggtgatggactataggcaaccatcaggcaattcaagcagatgcttcttaacccttctgcaggctataaacggtacttcctgctgtctcataccagttcccctggagatccaggtataggggacatatgtagg

SEQ ID NO: 68646 - DNA, 528 bp, Homo sapiens
  misc_feature (234)..(234): n is a, c, g, or t
  misc_feature (236)..(236): n is a, c, g, or t
ctattttgggagttaaaattccttgaagacccagcatctgtcgttcttgtaaaagtaaaatccaattcccttgttttgttcttgggttcagcataagtggcttgcctttttcttttatgtgccaatgctgccattgccaccatcaagacccagcgtaccgtccagtttgtggattggtgcccaactggcttcaaggttggcatcaactaccagcctcccactgtggtgcctggngnagacctggccaaggtacagagagctgtgtgcatgctgaaaagaaacagcttcttcactcctgcactgtgattgccaccaacattctcttggttgatgagatcatgcgagctggaatgtcttctctgaaaggttgaattgaagcttcctctgtatctgaatcttgaagactgcaaagtgatcctgaggattacagctgtggaatttttgtccaagcttcaaataattttgaaagaaattttcccatatgaaaaaaggagtaaaccgtcgattcgacgggatcctctagatcta

SEQ ID NO: 68647 - DNA, 3101 bp, Homo sapiens
accgcaggagccgtgcagccgcggaccaatgagcgggcgccggacgacctgtggcccaatggcggcggcgcgcgggcacgctgggggccggccagacgggccgacttttccagaagacccggatagttcctcccggccacgccgcgccggctctgggcactcagcatcgtttccttttcctccgctggagcagctatggcggcggtgaagaccctgaaccccaaggccgaggtggcccgagcgcaggcggcgctggcggtcaacatcagcgcagcgcggggtctgcaggacgtgctaaggaccaacctggggcccaagggcaccatgaagatgctcgtttctggcgctggagacatcaaacttactaaagacggcaatgtgctgcttcacgaaatgcaaattcaacacccaacagcttccttaatagcaaaggtagcaacagcccaggatgatataactggtgatggtacgacttctaatgtcctaatcattggagagctgctgaaacaggcggatctctacatttctgaaggccttcatcctagaataatcactgaaggatttgaagctgcaaaggaaaaggcccttcagtttttggaagaagtcaaagtaagcagagagatggacagggaaacacttatagatgtggccagaacatctcttcgtactaaagttcatgctgaacttgcagatgtcttaacagaggctgtagtggactccattttggccattaaaaagcaagatgaacctattgatctcttcatgattgagatcatggagatgaaacataaatctgaaactgatacaagcttaatcagagggcttgttttggaccacggagcacggcatcctgatatgaagaaaagggtggaggatgcatacatcctcacttgtaacgtgtcattagagtatgagaaaacagaagtgaattctggctttttttacaagagtgcagaagagagagaaaaactcgtgaaagctgaaagaaaattcattgaagatagggttaaaaaaataatagaactgaaaaggaaagtctgtggcgattcagataaaggatttgttgttattaatcaaaagggaattgaccccttttccttagatgctctttcaaaagaaggcatagtcgctctgcgcagagctaaaaggagaaatatggagaggctgactcttgcttgtggtggggtagccctgaattcttttgacgacctaagtcctgactgcttgggacatgcaggacttgtatatgagtatacattgggagaagagaagtttacctttattgagaaatgtaacaaccctcgttctgtcacattattgatcaaaggaccaaataagcacacactcactcagatcaaagatgcagtgagggacggcttgagggctgtcaaaaatgctattgatgatggctgtgtggttccaggtgctggtgccgtggaagtggcaatggcagaagccctgattaaacataagcccagtgtaaagggcagggcacagcttggagtccaagcatttgctgatgcattgctcattattcccaaggttcttgctcagaactctggttttgaccttcaggaaacattagttaaaattcaagcagaacattcagaatcaggtcagcttgtgggtgtggacctgaacacaggtgagccaatggtggcagcagaagtaggcgtatgggataactattgtgtaaagaaacagcttcttcactcctgcactgtgattgccaccaacattctcttggttgatgagatcatgcgagctggaatgtcttctctgaaaggttgaattgaagcttcctctgtatctgaatcttgaagactgcaaagtgatcctgaggattacagctgtggaatttttgtccaagcttcaaataattttgaaagaaattttcccatatgaaaaaaggagagaacactggcatctgttgaaatttggaagttctgaaattatagtatttttaaaaattgcactgaagtgtatacacataaagcaggtcttttatccagtgaacaggatgttttgctttagcagcagtgacataaaattccatgttagataagcatatgttacttaccttgttattaaatatttcttgaaaagcaaattttaatggtttaattttatgtggacgtatgttaaattatccaactaccctattgttaagcatttggttttaaaatttttatgctaatataaatgctcaagtaatttaaaatattgaaagcatccctgttggtataaatttctgagtaaatgcattggatcagttggactttgaacgcctttgaaatggctttgctaaaatgctcccgccacaaagttgtaggaaatgggaagaggagtcaactagaggcaagggagttgagagagctgcaactgtaaagggcaagaacaggcagaggtaaaaagatgatggaaggtgtggtgactaagggccacggttattgggtgaaatttgagattgtaggccaactgtattttcaagcttctgaacttaggcaaaatattcatcgcaaagtctctagcgtcatatttttctcacccaaattacgtttccacgagattatttatatatagttggtctatctctgcagtccttgaaggtgaagttgtgtgttactaggctgtgttttgggatgtcagcagtggcctgaagtgagttgtgcaataaatgttaagttgaaacctcaaaaaaaaaaaaaaaaaaaaaaaaaaaaaaaaaaggggggggggggcaaaaagaaaatcccgggggggggccaattgggggaccccgtttttttgaaaagggggggggccaatgggggggggataaaaagaagggaggggggggggaaaacacggggggggggggacaaccgcgccggggccttgggggaagacccctcctgggggggccaattggggccaccccaagaagatagagccgggaaaaacctggtgtaaggggacccaggatgcggggggaatttgccctttctaatagcggcgcacactcaaagagaagcgagagaaacaagaagagaacaagcaagggacgcaaatgtaaaggaggaacagaaagaaaaaagctactaggcacgacatactacgcc

SEQ ID NO: 68648 - DNA, 2762 bp, Homo sapiens
accgcaggagccgtgcagccgcggaccaatgagcgggcgccggacgacctgtggcccaatggcggcggcgcgcgggcacgctgggggccggccagacgggccgacttttccagaagacccggatagttcctcccggccacgccgcgccggctctgggcactcagcatcgtttccttttcctccgctggagcagctatggcggcggtgaagaccctgaaccccaaggccgaggtggcccgagcgcaggcggcgctggcggtcaacatcagcgcagcgcggggtctgcaggacgtgctaaggaccaacctggggcccaagggcaccatgaagatgctcgtttctggcgctggagacatcaaacttactaaagacggcaatgtgctgcttcacgaaatgcaaattcaacacccaacagcttccttaatagcaaaggtagcaacagcccaggatgatataactggtgatggtacgacttctaatgtcctaatcattggagagctgctgaaacaggcggatctctacatttctgaaggccttcatcctagaataatcactgaaggatttgaagctgcaaaggaaaaggcccttcagtttttggaagaagtcaaagtaagcagagagatggacagggaaacacttatagatgtggccagaacatctcttcgtactaaagttcatgctgaacttgcagatgtcttaacagaggctgtagtggactccattttggccattaaaaagcaagatgaacctattgatctcttcatgattgagatcatggagatgaaacataaatctgaaactgatacaagcttaatcagagggcttgttttggaccacggagcacggcatcctgatatgaagaaaagggtggaggatgcatacatcctcacttgtaacgtgtcattagagtatgagaaaacagaagtgaattctggctttttttacaagagtgcagaagagagagaaaaactcgtgaaagctgaaagaaaattcattgaagatagggttaaaaaaataatagaactgaaaaggaaagtctgtggcgattcagataaaggatttgttgttattaatcaaaagggaattgaccccttttccttagatgctctttcaaaagaaggcatagtcgctctgcgcagagctaaaaggagaaatatggagaggctgactcttgcttgtggtggggtagccctgaattcttttgacgacctaagtcctgactgcttgggacatgcaggacttgtatatgagtatacattgggagaagagaagtttacctttattgagaaatgtaacaaccctcgttctgtcacattattgatcaaaggaccaaataagcacacactcactcagatcaaagatgcagtgagggacggcttgagggctgtcaaaaatgctattgatgatggctgtgtggttccaggtgctggtgccgtggaagtggcaatggcagaagccctgattaaacataagcccagtgtaaagggcagggcacagcttggagtccaagcatttgctgatgcattgctcattattcccaaggttcttgctcagaactctggttttgaccttcaggaaacattagttaaaattcaagcagaacattcagaatcaggtcagcttgtgggtgtggacctgaacacaggtgagccaatggtggcagcagaagtaggcgtatgggataactattgtgtaaagaaacagcttcttcactcctgcactgtgattgccaccaacattctcttggttgatgagatcatgcgagctggaatgtcttctctgaaaggttgaattgaagcttcctctgtatctgaatcttgaagactgcaaagtgatcctgaggattacagctgtggaatttttgtccaagcttcaaataattttgaaagaaattttcccatatgaaaaaaggagagaacactggcatctgttgaaatttggaagttctgaaattatagtatttttaaaaattgcactgaagtgtatacacataaagcaggtcttttatccagtgaacaggatgttttgctttagcagcagtgacataaaattccatgttagataagcatatgttacttaccttgttattaaatatttcttgaaaagcaaattttaatggtttaattttatgtggacgtatgttaaattatccaactaccctattgttaagcatttggttttaaaatttttatgctaatataaatgctcaagtaatttaaaatattgaaagcatccctgttggtataaatttctgagtaaatgcattggatcagttggactttgaacgcctttgaaatggctttgctaaaatgctcccgccacaaagttgtaggaaatgggaagaggagtcaactagaggcaagggagttgagagagctgcaactgtaaagggcaagaacaggcagaggtaaaaagatgatggaaggtgtggtgactaagggccacggttattgggtgaaatttgagattgtaggccaactgtattttcaagcttctgaacttaggcaaaatattcatcgcaaagtctctagcgtcatatttttctcacccaaattacgtttccacgagattatttatatatagttggtctatctctgcagtccttgaaggtgaagttgtgtgttactaggctgtgttttgggatgtcagcagtggcctgaagtgagttgtgcaataaatgttaagttgaaacctcaaaaaaaagataagagtcgccgagctaatccgtgagagggtatttatcggccggcggcggttcacgg

SEQ ID NO: 68649 - DNA, 2673 bp, Homo sapiens
accgcaggagccgtgcagccgcggaccaatgagcgggcgccggacgacctgtggcccaatggcggcggcgcgcgggcacgctgggggccggccagacgggccgacttttccagaagacccggatagttcctcccggccacgccgcgccggctctgggcactcagcatcgtttccttttcctccgctggagcagctatggcggcggtgaagaccctgaaccccaaggccgaggtggcccgagcgcaggcggcgctggcggtcaacatcagcgcagcgcggggtctgcaggacgtgctaaggaccaacctggggcccaagggcaccatgaagatgctcgtttctggcgctggagacatcaaacttactaaagacggcaatgtgctgcttcacgaaatgcaaattcaacacccaacagcttccttaatagcaaaggtagcaacagcccaggatgatataactggtgatggtacgacttctaatgtcctaatcattggagagctgctgaaacaggcggatctctacatttctgaaggccttcatcctagaataatcactgaaggatttgaagctgcaaaggaaaaggcccttcagtttttggaagaagtcaaagtaagcagagagatggacagggaaacacttatagatgtggccagaacatctcttcgtactaaagttcatgctgaacttgcagatgtcttaacagaggctgtagtggactccattttggccattaaaaagcaagatgaacctattgatctcttcatgattgagatcatggagatgaaacataaatctgaaactgatacaagcttaatcagagggcttgttttggaccacggagcacggcatcctgatatgaagaaaagggtggaggatgcatacatcctcacttgtaacgtgtcattagagtatgagaaaacagaagtgaattctggctttttttacaagagtgcagaagagagagaaaaactcgtgaaagctgaaagaaaattcattgaagatagggttaaaaaaataatagaactgaaaaggaaagtctgtggcgattcagataaaggatttgttgttattaatcaaaagggaattgaccccttttccttagatgctctttcaaaagaaggcatagtcgctctgcgcagagctaaaaggagaaatatggagaggctgactcttgcttgtggtggggtagccctgaattcttttgacgacctaagtcctgactgcttgggacatgcaggacttgtatatgagtatacattgggagaagagaagtttacctttattgagaaatgtaacaaccctcgttctgtcacattattgatcaaaggaccaaataagcacacactcactcagatcaaagatgcagtgagggacggcttgagggctgtcaaaaatgctattgatgatggctgtgtggttccaggtgctggtgccgtggaagtggcaatggcagaagccctgattaaacataagcccagtgtaaagggcagggcacagcttggagtccaagcatttgctgatgcattgctcattattcccaaggttcttgctcagaactctggttttgaccttcaggaaacattagttaaaattcaagcagaacattcagaatcaggtcagcttgtgggtgtggacctgaacacaggtgagccaatggtggcagcagaagtaggcgtatgggataactattgtgtaaagaaacagcttcttcactcctgcactgtgattgccaccaacattctcttggttgatgagatcatgcgagctggaatgtcttctctgaaaggttgaattgaagcttcctctgtatctgaatcttgaagactgcaaagtgatcctgaggattacagctgtggaatttttgtccaagcttcaaataattttgaaagaaattttcccatatgaaaaaaggagagaacactggcatctgttgaaatttggaagttctgaaattatagtatttttaaaaattgcactgaagtgtatacacataaagcaggtcttttatccagtgaacaggatgttttgctttagcagcagtgacataaaattccatgttagataagcatatgttacttaccttgttattaaatatttcttgaaaagcaaattttaatggtttaattttatgtggacgtatgttaaattatccaactaccctattgttaagcatttggttttaaaatttttatgctaatataaatgctcaagtaatttaaaatattgaaagcatccctgttggtataaatttctgagtaaatgcattggatcagttggactttgaacgcctttgaaatggctttgctaaaatgctcccgccacaaagttgtaggaaatgggaagaggagtcaactagaggcaagggagttgagagagctgcaactgtaaagggcaagaacaggcagaggtaaaaagatgatggaaggtgtggtgactaagggccacggttattgggtgaaatttgagattgtaggccaactgtattttcaagcttctgaacttaggcaaaatattcatcgcaaagtctctagcgtcatatttttctcacccaaattacgtttccacgagattatttatatatagttggtctatctctgcagtccttaggctgtgttttgggatgtcagcagtggcctgaagtgagttgtgcaataaatgttaagttgaaacctc

SEQ ID NO: 68650 - DNA, 2748 bp, Homo sapiens
  misc_feature (1313)..(1313): n is a, c, g, or t
accgcaggagccgtgcagccgcggaccaatgagcgggcgccggacgacctgtggcccaatggcggcggcgcgcgggcacgctgggggccggccagacgggccgacttttccagaagacccggatagttcctcccggccacgccgcgccggctctgggcactcagcatcgtttccttttcctccgctggagcagctatggcggcggtgaagaccctgaaccccaaggccgaggtggcccgagcgcaggcggcgctggcggtcaacatcagcgcagcgcggggtctgcaggacgtgctaaggaccaacctggggcccaagggcaccatgaagatgctcgtttctggcgctggagacatcaaacttactaaagacggcaatgtgctgcttcacgaaatgcaaattcaacacccaacagcttccttaatagcaaaggtagcaacagcccaggatgatataactggtgatggtacgacttctaatgtcctaatcattggagagctgctgaaacaggcggatctctacatttctgaaggccttcatcctagaataatcactgaaggatttgaagctgcaaaggaaaaggcccttcagtttttggaagaagtcaaagtaagcagagagatggacagggaaacacttatagatgtggccagaacatctcttcgtactaaagttcatgctgaacttgcagatgtcttaacagaggctgtagtggactccattttggccattaaaaagcaagatgaacctattgatctcttcatgattgagatcatggagatgaaacataaatctgaaactgatacaagcttaatcagagggcttgttttggaccacggagcacggcatcctgatatgaagaaaagggtggaggatgcatacatcctcacttgtaacgtgtcattagagtatgagaaaacagaagtgaattctggctttttttacaagagtgcagaagagagagaaaaactcgtgaaagctgaaagaaaattcattgaagatagggttaaaaaaataatagaactgaaaaggaaagtctgtggcgattcagataaaggatttgttgttattaatcaaaagggaattgaccccttttccttagatgctctttcaaaagaaggcatagtcgctctgcgcagagctaaaaggagaaatatggagaggctgactcttgcttgtggtggggtagccctgaattcttttgacgacctaagtcctgactgcttgggacatgcaggacttgtatatgagtatacattgagtcctgcatgtcccaagcagtcaggactttgtatattgagtagtacactttnggagaagagaagtttacctttattgagaaatgtaacaaccctcgttctgtcacattattgatcaaaggaccaaataagcacacactcactcagatcaaagatgcagtgagggacggcttgagggctgtcaaaaatgctattgatgatggctgtgtggttccaggtgctggtgccgtggaagtggcaatggcagaagccctgattaaacataagcccagtgtaaagggcagggcacagcttggagtccaagcatttgctgatgcattgctcattattcccaaggttcttgctcagaactctggttttgaccttcaggaaacattagttaaaattcaagcagaacattcagaatcaggtcagcttgtgggtgtggacctgaacacaggtgagccaatggtggcagcagaagtaggcgtatgggataactattgtgtaaagaaacagcttcttcactcctgcactgtgattgccaccaacattctcttggttgatgagatcatgcgagctggaatgtcttctctgaaaggttgaattgaagcttcctctgtatctgaatcttgaagactgcaaagtgatcctgaggattacagctgtggaatttttgtccaagcttcaaataattttgaaagaaattttcccatatgaaaaaaggagagaacactggcatctgttgaaatttggaagttctgaaattatagtatttttaaaaattgcactgaagtgtatacacataaagcaggtcttttatccagtgaacaggatgttttgctttagcagcagtgacataaaattccatgttagataagcatatgttacttaccttgttattaaatatttcttgaaaagcaaattttaatggtttaattttatgtggacgtatgttaaattatccaactaccctattgttaagcatttggttttaaaatttttatgctaatataaatgctcaagtaatttaaaatattgaaagcatccctgttggtataaatttctgagtaaatgcattggatcagttggactttgaacgcctttgaaatggctttgctaaaatgctcccgccacaaagttgtaggaaatgggaagaggagtcaactagaggcaagggagttgagagagctgcaactgtaaagggcaagaacaggcagaggtaaaaagatgatggaaggtgtggtgactaagggccacggttattgggtgaaatttgagattgtaggccaactgtattttcaagcttctgaacttaggcaaaatattcatcgcaaagtctctagcgtcatatttttctcacccaaattacgtttccacgagattatttatatatagttggtctatctctgcagtccttgaaggtgaagttgtgtgttactaggctgtgttttgggatgtcagcagtggcctgaagtgagttgtgcaataaatgttaagttgaaacctc

SEQ ID NO: 68651 - DNA, 2540 bp, Homo sapiens
atactaaattagtcgaccacgctgtacggctggagcagctatggcggcggtgaagaccctgaaccccaaggccgaggtggcccgagcgcaggcggcgctggcggtcaacatcagcgcagcgcggggtctgcaggacgtgctaaggaccaacctggggcccaagggcaccatgaagatgctcgtttctggcgctggagacatcaaacttactaaagacggcaatgtgctgcttcacgaaatgcaaattcaacacccaacagcttccttaatagcaaaggtagcaacagcccaggatgatataactggtgatggtacgacttctaatgtcctaatcattggagagctgctgaaacaggcggatctctacatttctgaaggccttcatcctagaataatcactgaaggatttgaagctgcaaaggaaaaggcccttcagtttttggaagaagtcaaagtaagcagagagatggacagggaaacacttatagatgtggccagaacatctcttcgtactaaagttcatgctgaacttgcagatgtcttaacagaggctgtagtggactccattttggccattaaaaagcaagatgaacctattgatctcttcatgattgagatcatggagatgaaacataaatctgaaactgatacaagcttaatcagagggcttgttttggaccacggagcacggcatcctgatatgaagaaaagggtggaggatgcatacatcctcacttgtaacgtgtcattagagtatgagaaaacagaagtgaattctggctttttttacaagagtgcagaagagagagaaaaactcgtgaaagctgaaagaaaattcattgaagatagggttaaaaaaataatagaactgaaaaggaaagtctgtggcgattcagataaaggatttgttgttattaatcaaaagggaattgaccccttttccttagatgctctttcaaaagaaggcatagtcgctctgcgcagagctaaaaggagaaatatggagaggctgactcttgcttgtggtggggtagccctgaattcttttgacgacctaagtcctgactgcttgggacatgcaggacttgtatatgagtatacattgggagaagagaagtttacctttattgagaaatgtaacaaccctcgttctgtcacattattgatcaaaggaccaaataagcacacactcactcagatcaaagatgcagtgagggacggcttgagggctgtcaaaaatgctattgatgatggctgtgtggttccaggtgctggtgccgtggaagtggcaatggcagaagccctgattaaacataagcccagtgtaaagggcagggcacagcttggagtccaagcatttgctgatgcattgctcattattcccaaggttcttgctcagaactctggttttgaccttcaggaaacattagttaaaattcaagcagaacattcagaatcaggtcagcttgtgggtgtggacctgaacacaggtgagccaatggtggcagcagaagtaggcgtatgggataactattgtgtaaagaaacagcttcttcactcctgcactgtgattgccaccaacattctcttggttgatgagatcatgcgagctggaatgtcttctctgaaaggttgaattgaagcttcctctgtatctgaatcttgaagactgcaaagtgatcctgaggattacagctgtggaatttttgtccaagcttcaaataattttgaaagaaattttcccatatgaaaaaaggagagaacactggcatctgttgaaatttggaagttctgaaattatagtatttttaaaaattgcactgaagtgtatacacataaagcaggtcttttatccagtgaacaggatgttttgctttagcagcagtgacataaaattccatgttagataagcatatgttacttaccttgttattaaatatttcttgaaaagcaaattttaatggtttaattttatgtggacgtatgttaaattatccaactaccctattgttaagcatttggttttaaaatttttatgctaatataaatgctcaagtaatttaaaatattgaaagcatccctgttggtataaatttctgagtaaatgcattggatcagttggactttgaacgcctttgaaatggctttgctaaaatgctcccgccacaaagttgtaggaaatgggaagaggagtcaactagaggcaagggagttgagagagctgcaactgtaaagggcaagaacaggcagaggtaaaaagatgatggaaggtgtggtgactaagggccacggttattgggtgaaatttgagattgtaggccaactgtattttcaagcttctgaacttaggcaaaatattcatcgcaaagtctctagcgtcatatttttctcacccaaattacgtttccacgagattatttatatatagttggtctatctctgcagtccttgaaggtgaagttgtgtgttactaggctgtgttttgggatgtcagcagtggcctgaagtgagttgtgcaataaatgttaagttgaaacctc

SEQ ID NO: 68652 - DNA, 2651 bp, Homo sapiens
accgcaggagccgtgcagccgcggaccaatgagcgggcgccggacgacctgtggcccaatggcggcggcgcgcgggcacgctgggggccggccagacgggccgacttttccagaagacccggatagttcctcccggccacgccgcgccggctctgggcactcagcatcgtttccttttcctccgctggagcagctatggcggcggtgaagaccctgaaccccaaggccgaggtggcccgagcgcaggcggcgctggcggtcaacatcagcgcagcgcggggtctgcaggacgtgctaaggaccaacctggggcccaagggcaccatgaagatgctcgtttctggcgctggagacatcaaacttactaaagacggcaatgtgctgcttcacgaaatgcaaattcaacacccaacagcttccttaatagcaaaggtagcaacagcccaggatgatataactggtgatggtacgacttctaatgtcctaatcattggagagctgctgaaacaggcggatctctacatttctgaaggccttcatcctagaataatcactgaaggatttgaagctgcaaaggaaaaggcccttcagtttttggaagaagtcaaagtaagcagagagatggacagggaaacacttatagatgtggccagaacatctcttcgtactaaagttcatgctgaacttgcagatgtcttaacagaggctgtagtggactccattttggccattaaaaagcaagatgaacctattgatctcttcatgattgagatcatggagatgaaacataaatctgaaactgatacaagcttaatcagagggcttgttttggaccacggagcacggcatcctgatatgaagaaaagggtggaggatgcatacatcctcacttgtaacgtgtcattagagtatgagaaaacagaagtgaattctggctttttttacaagagtgcagaagagagagaaaaactcgtgaaagctgaaagaaaattcattgaagatagggttaaaaaaataatagaactgaaaaggaaagtctgtggcgattcagataaaggatttgttgttattaatcaaaagggaattgaccccttttccttagatgctctttcaaaagaaggcatagtcgctctgcgcagagctaaaaggagaaatatggagaggctgactcttgcttgtggtggggtagccctgaattcttttgacgacctaagtcctgactgcttgggacatgcaggacttgtatatgagtatacattgggagaagagaagtttacctttattgagaaatgtaacaaccctcgttctgtcacattattgatcaaaggaccaaataagcacacactcactcagatcaaagatgcagtgagggacggcttgagggctgtcaaaaatgctattgatgatggctgtgtggttccaggtgctggtgccgtggaagtggcaatggcagaagccctgattaaacataagcccagtgtaaagggcagggcacagcttggagtccaagcatttgctgatgcattgctcattattcccaaggttcttgctcagaactctggttttgaccttcaggaaacattagttaaaattcaagcagagtgagccaatggtggcagcagaagtaggcgtatgggataactattgtgtaaagaaacagcttcttcactcctgcactgtgattgccaccaacattctcttggttgatgagatcatgcgagctggaatgtcttctctgaaaggttgaattgaagcttcctctgtatctgaatcttgaagactgcaaagtgatcctgaggattacagctgtggaatttttgtccaagcttcaaataattttgaaagaaattttcccatatgaaaaaaggagagaacactggcatctgttgaaatttggaagttctgaaattatagtatttttaaaaattgcactgaagtgtatacacataaagcaggtcttttatccagtgaacaggatgttttgctttagcagcagtgacataaaattccatgttagataagcatatgttacttaccttgttattaaatatttcttgaaaagcaaattttaatggtttaattttatgtggacgtatgttaaattatccaactaccctattgttaagcatttggttttaaaatttttatgctaatataaatgctcaagtaatttaaaatattgaaagcatccctgttggtataaatttctgagtaaatgcattggatcagttggactttgaacgcctttgaaatggctttgctaaaatgctcccgccacaaagttgtaggaaatgggaagaggagtcaactagaggcaagggagttgagagagctgcaactgtaaagggcaagaacaggcagaggtaaaaagatgatggaaggtgtggtgactaagggccacggttattgggtgaaatttgagattgtaggccaactgtattttcaagcttctgaacttaggcaaaatattcatcgcaaagtctctagcgtcatatttttctcacccaaattacgtttccacgagattatttatatatagttggtctatctctgcagtccttgaaggtgaagttgtgtgttactaggctgtgttttgggatgtcagcagtggcctgaagtgagttgtgcaataaatgttaagttgaaacctc

SEQ ID NO: 68653 - DNA, 1874 bp, Homo sapiens
accgcaggagccgtgcagccgcggaccaatgagcgggcgccggacgacctgtggcccaatggcggcggcgcgcgggcacgctgggggccggccagacgggccgacttttccagaagacccggatagttcctcccggccacgccgcgccggctctgggcactcagcatcgtttccttttcctccgctggagcagctatggcggcggtgaagaccctgaaccccaaggccgaggtggcccgagcgcaggcggcgctggcggtcaacatcagcgcagcgcggggtctgcaggacgtgctaaggaccaacctggggcccaagggcaccatgaagatgctcgtttctggcgctggagacatcaaacttactaaagacggcaatgtgctgcttcacgaaatgcaaattcaacacccaacagcttccttaatagcaaaggtagcaacagcccaggatgatataactggtgatggtacgacttctaatgtcctaatcattggagagctgctgaaacaggcggatctctacatttctgaaggccttcatcctagaataatcactgaaggatttgaagctgcaaaggaaaaggcccttcagtttttggaagaagtcaaagtaagcagagagatggacagggaaacacttatagatgtggccagaacatctcttcgtactaaagttcatgctgaacttgcagatgtcttaacagaggctgtagtggactccattttggccattaaaaagcaagatgaacctattgatctcttcatgattgagatcatggagatgaaacataaatctgaaactgatacaagcttaatcagagggcttgttttggaccacggagcacggcatcctgatatgaagaaaagggtggaggatgcatacatcctcacttgtaacgtgtcattagagtatgagaaaacagaagtgaattctggctttttttacaagagtgcagaagagagagaaaaactcgtgaaagctgaaagaaaattcattgaagatagggttaaaaaaataatagaactgaaaaggaaagtctgtggcgattcagataaaggatttgttgttattaatcaaaagggaattgaccccttttccttagatgctctttcaaaagaaggcatagtcgctctgcgcagagctaaaaggagaaatatggagaggctgactcttgcttgtggtggggtagccctgaattcttttgacgacctaagtcctgactgcttgggacatgcaggacttgtatatgagtatacattgggagaagagaagtttacctttattgagaaatgtaacaaccctcgttctgtcacattattgatcaaaggaccaaataagcacacactcactcagatcaaagatgcagtgagggacggcttgagggctgtcaaaaatgctattgatgatggctgtgtggttccaggtgctggtgccgtggaagtggcaatggcagaagccctgattaaacataagcccagtgtaaagggcagggcacagcttggagtccaagcatttgctgatgcattgctcattattcccaaggttcttgctcagaactctggttttgaccttcaggaaacattagttaaaattcaagcagaacattcagaatcaggtcagcttgtgggtgtggacctgaacacaggtgagccaatggtggcagcagaagtaggcgtatgggataactattgtgtaaagaaacagcttcttcactcctgcacctgtgaattggccaccaacattctcctggttgctgagatcacacccctgggtgacagagggagactccttctcgaaaaaccccaaaccctctcttttcctgcctataatttaatcactgtagaaatctgtagaaaatactgaagtgtcaacgt

SEQ ID NO: 68654 - DNA, 2470 bp, Homo sapiens
accgcaggagccgtgcagccgcggaccaatgagcgggcgccggacgacctgtggcccaatggcggcggcgcgcgggcacgctgggggccggccagacgggccgacttttccagaagacccggatagttcctcccggccacgccgcgccggctctgggcactcagcatcgtttccttttcctccgctggagcagctatggcggcggtgaagaccctgaaccccaaggccgaggtggcccgagcgcaggcggcgctggcggtcaacatcagcgcagcgcggggtctgcaggacgtgctaaggaccaacctggggcccaagggcaccatgaagatgctcgtttctggcgctggagacatcaaacttactaaagacggcaatgtgctgcttcacgaaatgcaaattcaacacccaacagcttccttaatagcaaaggtagcaacagcccaggatgatataactggtgatggtacgacttctaatgtcctaatcattggagagctgctgaaacaggcggatctctacatttctgaaggccttcatcctagaataatcactgaaggatttgaagctgcaaaggaaaaggcccttcagtttttggaagaagtcaaagtaagcagagagatggacagggaaacacttatagatgtggccagaacatctcttcgtactaaagttcatgctgaacttgcagatgtcttaacagaggctgtagtggactccattttggccattaaaaagcaagatgaacctattgatctcttcatgattgagatcatggagatgaaacataaatctgaaactgatacaagcttaatcagagggcttgttttggaccacggagcacggcatcctgatatgaagaaaagggtggaggatgcatacatcctcacttgtaacgtgtcattagagtatgagaaaacagaagtgaattctggctttttttacaagagtgcagaagagagagaaaaactcgtgaaagctgaaagaaaattcattgaagatagggttaaaaaaataatagaactgaaaaggaaagtctgtggcgattcagataaaggatttgttgttattaatcaaaagggaattgaccccttttccttagatgctctttcaaaagaaggcatagtcgctctgcgcagagctaaaaggagaaatatggagaggctgactcttgcttgtggtggggtagccctgaattcttttgacgacctaagtcctgactgcttgggacatgcaggacttgtatatgagtatacattgggagaagagaagtttacctttattgagaaatgtaacaaccctcgttctgtcacattattgatcaaaggaccaaataagcacacactcactcagatcaaagatgcagtgagggacggcttgagggctgtcaaaaatgctattgatgatggctgtgtggttccaggtgctggtgccgtggaagtggcaatggcagaagccctgattaaacataagcccagtgtaaagggcagggcacagcttggagtccaagcatttgctgatgcattgctcattattcccaaggttcttgctcagaactctggttttgaccttcaggaaacattagttaaaattcaagcagagtgagccaatggtggcagcagaagtaggcgtatgggataactattgtgtaaagaaacagcttcttcactcctgcactgtgattgccaccaacattctcttggttgatgagatcatgcgagctggaatgtcttctctgaaaggttgaattgaagcttcctctgtatctgaatcttgaagactgcaaagtgatcctgaggattacagctgtggaatttttgtccaagcttcaaataattttgaaagaaattttcccatatgaaaaaaggagagaacactggcatctgttgaaatttggaagttctgaaattatagtatttttaaaaattgcactgaagtgtatacacataaagcaggtcttttatccagtgaacaggatgttttgctttagcagcagtgacataaaattccatgttagataagcatatgttacttaccttgttattaaatatttcttgaaaagcaaaaaaaaaaaaaaaaaaaaaaaaaaaaaaaaaaaggggggggggggcaaaaagaaaatcccgggggggggccaattgggggaccccgtttttttgaaaagggggggggccaatgggggggggataaaaagaagggaggggggggggaaaacacggggggggggggacaaccgcgccggggccttgggggaagacccctcctgggggggccaattggggccaccccaagaagatagagccgggaaaaacctggtgtaaggggacccaggatgcggggggaatttgccctttctaatagcggcgcacactcaaagagaagcgagagaaacaagaagagaacaagcaagggacgcaaatgtaaaggaggaacagaaagaaaaaagctactaggcacgacatactacgcc

SEQ ID NO: 68655 - DNA, 1753 bp, Homo sapiens
accgcaggagccgtgcagccgcggaccaatgagcgggcgccggacgacctgtggcccaatggcggcggcgcgcgggcacgctgggggccggccagacgggccgacttttccagaagacccggatagttcctcccggccacgccgcgccggctctgggcactcagcatcgtttccttttcctccgctggagcagctatggcggcggtgaagaccctgaaccccaaggccgaggtggcccgagcgcaggcggcgctggcggtcaacatcagcgcagcgcggggtctgcaggacgtgctaaggaccaacctggggcccaagggcaccatgaagatgctcgtttctggcgctggagacatcaaacttactaaagacggcaatgtgctgcttcacgaaatgcaaattcaacacccaacagcttccttaatagcaaaggtagcaacagcccaggatgatataactggtgatggtacgacttctaatgtcctaatcattggagagctgctgaaacaggcggatctctacatttctgaaggccttcatcctagaataatcactgaaggatttgaagctgcaaaggaaaaggcccttcagtttttggaagaagtcaaagtaagcagagagatggacagggaaacacttatagatgtggccagaacatctcttcgtactaaagttcatgctgaacttgcagatgtcttaacagaggctgtagtggactccattttggccattaaaaagcaagatgaacctattgatctcttcatgattgagatcatggagatgaaacataaatctgaaactgatacaagcttaatcagagggcttgttttggaccacggagcacggcatcctgatatgaagaaaagggtggaggatgcatacatcctcacttgtaacgtgtcattagagtatgagaaaacagaagtgaattctggctttttttacaagagtgcagaagagagagaaaaactcgtgaaagctgaaagaaaattcattgaagatagggttaaaaaaataatagaactgaaaaggaaagtctgtggcgattcagataaaggatttgttgttattaatcaaaagggaattgaccccttttccttagatgctctttcaaaagaaggcatagtcgctctgcgcagagctaaaaggagaaatatggagaggctgactcttgcttgtggtggggtagccctgaattcttttgacgacctaagtcctgactgcttgggacatgcaggacttgtatatgagtatacattgggagaagagaagtttacctttattgagaaatgtaacaaccctcgttctgtcacattattgatcaaaggaccaaataagcacacactcactcagatcaaagatgcagtgagggacggcttgagggctgtcaaaaatgctattgatgatggctgtgtggttccaggtgctggtgccgtggaagtggcaatggcagaagccctgattaaacataagcccagtgtaaagggcagggcacagcttggagtccaagcatttgctgatgcattgctcattattcccaaggtgtgcatgcttttaacagtcaatcttccaaaagattcagctgatcaaacctttctgataatgtaggatttattcataaagtggattttggataagcaagtttgatcagttttctttctgactctagaacaggtattcctcatcatccagatatatttggtttctctgggaagcctgaatagctgacattgcagatggcaagagataacct

SEQ ID NO: 68656 - DNA, 2165 bp, Homo sapiens
ggaggcgatctagaggtccctgaacgtgtcatatgaagctgcaaaggaaaaggcccttcagtttttggaagaagtcaaagtaagcagagagatggacagggaaacacttatagatgtggccagaacatctcttcgtactaaagttcatgctgaacttgcagatgtcttaacagaggctgtagtggactccattttggccattaaaaagcaagatgaacctattgatctcttcatgattgagatcatggagatgaaacataaatctgaaactgatacaagcttaatcagagggcttgttttggaccacggagcacggcatcctgatatgaagaaaagggtggaggatgcatacatcctcacttgtaacgtgtcattagagtatgagaaaacagaagtgaattctggctttttttacaagagtgcagaagagagagaaaaactcgtgaaagctgaaagaaaattcattgaagatagggttaaaaaaataatagaactgaaaaggaaagtctgtggcgattcagataaaggatttgttgttattaatcaaaagggaattgaccccttttccttagatgctctttcaaaagaaggcatagtcgctctgcgcagagctaaaaggagaaatatggagaggctgactcttgcttgtggtggggtagccctgaattcttttgacgacctaagtcctgactgcttgggacatgcaggacttgtatatgagtatacattgggagaagagaagtttacctttattgagaaatgtaacaaccctcgttctgtcacattattgatcaaaggaccaaataagcacacactcactcagatcaaagatgcagtgagggacggcttgagggctgtcaaaaatgctattgatgatggctgtgtggttccaggtgctggtgccgtggaagtggcaatggcagaagccctgattaaacataagcccagtgtaaagggcagggcacagcttggagtccaagcatttgctgatgcattgctcattattcccaaggttcttgctcagaactctggttttgaccttcaggaaacattagttaaaattcaagcagaacattcagaatcaggtcagcttgtgggtgtggacctgaacacaggtgagccaatggtggcagcagaagtaggcgtatgggataactattgtgtaaagaaacagcttcttcactcctgcactgtgattgccaccaacattctcttggttgatgagatcatgcgagctggaatgtcttctctgaaaggttgaattgaagcttcctctgtatctgaatcttgaagactgcaaagtgatcctgaggattacagctgtggaatttttgtccaagcttcaaataattttgaaagaaattttcccatatgaaaaaaggagagaacactggcatctgttgaaatttggaagttctgaaattatagtatttttaaaaattgcactgaagtgtatacacataaagcaggtcttttatccagtgaacaggatgttttgctttagcagcagtgacataaaattccatgttagataagcatatgttacttaccttgttattaaatatttcttgaaaagcaaattttaatggtttaattttatgtggacgtatgttaaattatccaactaccctattgttaagcatttggttttaaaatttttatgctaatataaatgctcaagtaatttaaaatattgaaagcatccctgttggtataaatttctgagtaaatgcattggatcagttggactttgaacgcctttgaaatggctttgctaaaatgctcccgccacaaagttgtaggaaatgggaagaggagtcaactagaggcaagggagttgagagagctgcaactgtaaagggcaagaacaggcagaggtaaaaagatgatggaaggtgtggtgactaagggccacggttattgggtgaaatttgagattgtaggccaactgtattttcaagcttctgaacttaggcaaaatattcatcgcaaagtctctagcgtcatatttttctcacccaaattacgtttccacgagattatttatatatagttggtctatctctgcagtccttgaaggtgaagttgtgtgttactaggctgtgttttgggatgtcagcagtggcctgaagtgagttgtgcaataaatgttaagttgaaacctc

SEQ ID NO: 68657 - DNA, 2163 bp, Homo sapiens
aggctaggagaggccgggggtaatcggcgagtgaagctgcaaaggaaaaggcccttcagtttttggaagaagtcaaagtaagcagagagatggacagggaaacacttatagatgtggccagaacatctcttcgtactaaagttcatgctgaacttgcagatgtcttaacagaggctgtagtggactccattttggccattaaaaagcaagatgaacctattgatctcttcatgattgagatcatggagatgaaacataaatctgaaactgatacaagcttaatcagagggcttgttttggaccacggagcacggcatcctgatatgaagaaaagggtggaggatgcatacatcctcacttgtaacgtgtcattagagtatgagaaaacagaagtgaattctggctttttttacaagagtgcagaagagagagaaaaactcgtgaaagctgaaagaaaattcattgaagatagggttaaaaaaataatagaactgaaaaggaaagtctgtggcgattcagataaaggatttgttgttattaatcaaaagggaattgaccccttttccttagatgctctttcaaaagaaggcatagtcgctctgcgcagagctaaaaggagaaatatggagaggctgactcttgcttgtggtggggtagccctgaattcttttgacgacctaagtcctgactgcttgggacatgcaggacttgtatatgagtatacattgggagaagagaagtttacctttattgagaaatgtaacaaccctcgttctgtcacattattgatcaaaggaccaaataagcacacactcactcagatcaaagatgcagtgagggacggcttgagggctgtcaaaaatgctattgatgatggctgtgtggttccaggtgctggtgccgtggaagtggcaatggcagaagccctgattaaacataagcccagtgtaaagggcagggcacagcttggagtccaagcatttgctgatgcattgctcattattcccaaggttcttgctcagaactctggttttgaccttcaggaaacattagttaaaattcaagcagaacattcagaatcaggtcagcttgtgggtgtggacctgaacacaggtgagccaatggtggcagcagaagtaggcgtatgggataactattgtgtaaagaaacagcttcttcactcctgcactgtgattgccaccaacattctcttggttgatgagatcatgcgagctggaatgtcttctctgaaaggttgaattgaagcttcctctgtatctgaatcttgaagactgcaaagtgatcctgaggattacagctgtggaatttttgtccaagcttcaaataattttgaaagaaattttcccatatgaaaaaaggagagaacactggcatctgttgaaatttggaagttctgaaattatagtatttttaaaaattgcactgaagtgtatacacataaagcaggtcttttatccagtgaacaggatgttttgctttagcagcagtgacataaaattccatgttagataagcatatgttacttaccttgttattaaatatttcttgaaaagcaaattttaatggtttaattttatgtggacgtatgttaaattatccaactaccctattgttaagcatttggttttaaaatttttatgctaatataaatgctcaagtaatttaaaatattgaaagcatccctgttggtataaatttctgagtaaatgcattggatcagttggactttgaacgcctttgaaatggctttgctaaaatgctcccgccacaaagttgtaggaaatgggaagaggagtcaactagaggcaagggagttgagagagctgcaactgtaaagggcaagaacaggcagaggtaaaaagatgatggaaggtgtggtgactaagggccacggttattgggtgaaatttgagattgtaggccaactgtattttcaagcttctgaacttaggcaaaatattcatcgcaaagtctctagcgtcatatttttctcacccaaattacgtttccacgagattatttatatatagttggtctatctctgcagtccttgaaggtgaagttgtgtgttactaggctgtgttttgggatgtcagcagtggcctgaagtgagttgtgcaataaatgttaagttgaaacctc

SEQ ID NO: 68658 - DNA, 1483 bp, Homo sapiens
accgcaggagccgtgcagccgcggaccaatgagcgggcgccggacgacctgtggcccaatggcggcggcgcgcgggcacgctgggggccggccagacgggccgacttttccagaagacccggatagttcctcccggccacgccgcgccggctctgggcactcagcatcgtttccttttcctccgctggagcagctatggcggcggtgaagaccctgaaccccaaggccgaggtggcccgagcgcaggcggcgctggcggtcaacatcagcgcagcgcggggtctgcaggacgtgctaaggaccaacctggggcccaagggcaccatgaagatgctcgtttctggcgctggagacatcaaacttactaaagacggcaatgtgctgcttcacgaaatgcaaattcaacacccaacagcttccttaatagcaaaggtagcaacagcccaggatgatataactggtgatggtacgacttctaatgtcctaatcattggagagctgctgaaacaggcggatctctacatttctgaaggccttcatcctagaataatcactgaaggatttgaagctgcaaaggaaaaggcccttcagtttttggaagaagtcaaagtaagcagagagatggacagggaaacacttatagatgtggccagaacatctcttcgtactaaagttcatgctgaacttgcagatgtcttaacagaggctgtagtggactccattttggccattaaaaagcaagatgaacctattgatctcttcatgattgagatcatggagatgaaacataaatctgaaactgatacaagcttaatcagagggcttgttttggaccacggagcacggcatcctgatatgaagaaaagggtggaggatgcatacatcctcacttgtaacgtgtcattagagtatgagaaaacagaagtgaattctggctttttttacaagagtgcagaagagagagaaaaactcgtgaaagctgaaagaaaattcattgaagatagggttaaaaaaataatagaactgaaaaggaaagtctgtggcgattcagataaaggatttgttgttattaatcaaaagggaattgaccccttttccttagatgctctttcaaaagaaggcatagtcgctctgcgcagagctaaaaggagaaatatggagaggtatccgagtaatttgacttttactcattttgcaagtgaattgggattatttctttttccttatactttatttttgggtttttcaactgtatagttaattggcattaactatattcacattgtgcaccccgtcagcactgtccatctctaggacttttttcatcatcacaaactgaaactgtatacccattaaatagttactccccatttctccctcccccttgccccttgtaaacattattttactttttgtttctgaattcaatatacttttttccaaagagctccccacaataaaaagcttttttaaaaatttttta

SEQ ID NO: 68659 - DNA, 1106 bp, Homo sapiens
  misc_feature (964)..(965): n is a, c, g, or t
  misc_feature (987)..(987): n is a, c, g, or t
accgcaggagccgtgcagccgcggaccaatgagcgggcgccggacgacctgtggcccaatggcggcggcgcgcgggcacgctgggggccggccagacgggccgacttttccagaagacccggatagttcctcccggccacgccgcgccggctctgggcactcagcatcgtttccttttcctccgctggagcagctatggcggcggtgaagaccctgaaccccaaggccgaggtggcccgagcgcaggcggcgctggcggtcaacatcagcgcagcgcggggtctgcaggacgtgctaaggaccaacctggggcccaagggcaccatgaagatgctcgtttctggcgctggagacatcaaacttactaaagacggcaatgtgctgcttcacgaaatgcaaattcaacacccaacagcttccttaatagcaaaggtagcaacagcccaggatgatataactggtgatggtacgacttctaatgtcctaatcattggagagctgctgaaacaggcggatctctacatttctgaaggccttcatcctagaataatcactgaaggatttgaagctgcaaaggaaaaggcccttcagtttttggaagaagtcaaagtaagcagagagatggacagggaaacacttatagatgtggccagaacatctcttcgtactaaagttcatgctgaacttgcagatgtcttaacagaggctgtagtggactccattttggccattaaaaagcaagatgaacctattgatctcttcatgattgagatcatggagatgaaacataaatctgaaactgatacaagcttaatcagagggcttgttttggaccacggagcacggcatcctgatatgaagaaaagggtggaggatgcatacatcctcacttgtaacgtgtcattagagtatgagaaaaccgaagtgaattctggttttttaccagagtgcgagagagagaaanngtgaagtggaaaaaatctgagntggttaaaattggatgaaggaagctgggagacaataggttgtggtaccaaggatggccttcttaggtaaaaaggatgtggggaaggaaataggactttggggattgaaaagtggagaga

SEQ ID NO: 68660 - DNA, 1579 bp, Homo sapiens
atgatggaacgttggacttatcctttgaattgaaagtgttttgtaatgaggaagctttctgtattataataaagatcaggtttgagcagttacctgtaattcagtgagactgtaatctaatgtgagcatttctctcataactttactctgaggtctagaccttgtttttgcagatctgcaggcttggtctagaggtgggatgtttatattaaagccctagcttttgaaagcccaaaatgaaaagtgcctgggagaaatgtgtcggtggcatcgataaacaccggtgtttatcgctgtgtggttccaggtgctggtgccgtggaagtggcaatggcagaagccctgattaaacataagcccagtgtaaagggcagggcacagcttggagtccaagcatttgctgatgcattgctcattattcccaaggttcttgctcagaactctggttttgaccttcaggaaacattagttaaaattcaagcagaacattcagaatcaggtcagcttgtgggtgtggacctgaacacaggtgagccaatggtggcagcagaagtaggcgtatgggataactattgtgtaaagaaacagcttcttcactcctgcactgtgattgccaccaacattctcttggttgatgagatcatgcgagctggaatgtcttctctgaaaggttgaattgaagcttcctctgtatctgaatcttgaagactgcaaagtgatcctgaggattacagctgtggaatttttgtccaagcttcaaataattttgaaagaaattttcccatatgaaaaaaggagagaacactggcatctgttgaaatttggaagttctgaaattatagtatttttaaaaattgcactgaagtgtatacacataaagcaggtcttttatccagtgaacaggatgttttgctttagcagcagtgacataaaattccatgttagataagcatatgttacttaccttgttattaaatatttcttgaaaagcaaattttaatggtttaattttatgtggacgtatgttaaattatccaactaccctattgttaagcatttggttttaaaatttttatgctaatataaatgctcaagtaatttaaaatattgaaagcatccctgttggtataaatttctgagtaaatgcattggatcagttggactttgaacgcctttgaaatggctttgctaaaatgctcccgccacaaagttgtaggaaatgggaagaggagtcaactagaggcaagggagttgagagagctgcaactgtaaagggcaagaacaggcagaggtaaaaagatgatggaaggtgtggtgactaagggccacggttattgggtgaaatttgagattgtaggccaactgtattttcaagcttctgaacttaggcaaaatattcatcgcaaagtctctagcgtcatatttttctcacccaaattacgtttccacgagattatttatatatagttggtctatctctgcagtccttgaaggtgaagttgtgtgttactaggctgtgttttgggatgtcagcagtggcctgaagtgagttgtgcaataaatgttaagttgaaacctc

SEQ ID NO: 68661 - DNA, 1207 bp, Homo sapiens
taactaacagttattagttcctgttttctcaagaattaaatttgtttactttaggttcttgctcagaactctggttttgaccttcaggaaacattagttaaaattcaagcagaacattcagaatcaggtcagcttgtgggtgtggacctgaacacaggtgagccaatggtggcagcagaagtaggcgtatgggataactattgtgtaaagaaacagcttcttcactcctgcactgtgattgccaccaacattctcttggttgatgagatcatgcgagctggaatgtcttctctgaaaggttgaattgaagcttcctctgtatctgaatcttgaagactgcaaagtgatcctgaggattacagctgtggaatttttgtccaagcttcaaataattttgaaagaaattttcccatatgaaaaaaggagagaacactggcatctgttgaaatttggaagttctgaaattatagtatttttaaaaattgcactgaagtgtatacacataaagcaggtcttttatccagtgaacaggatgttttgctttagcagcagtgacataaaattccatgttagataagcatatgttacttaccttgttattaaatatttcttgaaaagcaaattttaatggtttaattttatgtggacgtatgttaaattatccaactaccctattgttaagcatttggttttaaaatttttatgctaatataaatgctcaagtaatttaaaatattgaaagcatccctgttggtataaatttctgagtaaatgcattggatcagttggactttgaacgcctttgaaatggctttgctaaaatgctcccgccacaaagttgtaggaaatgggaagaggagtcaactagaggcaagggagttgagagagctgcaactgtaaagggcaagaacaggcagaggtaaaaagatgatggaaggtgtggtgactaagggccacggttattgggtgaaatttgagattgtaggccaactgtattttcaagcttctgaacttaggcaaaatattcatcgcaaagtctctagcgtcatatttttctcacccaaattacgtttccacgagattatttatatatagttggtctatctctgcagtccttgaaggtgaagttgtgtgttactaggctgtgttttgggatgtcagcagtggcctgaagtgagttgtgcaataaatgttaagttgaaacctc

SEQ ID NO: 68662 - DNA, 1329 bp, Homo sapiens
  misc_feature (11)..(11): n is a, c, g, or t
  misc_feature (21)..(21): n is a, c, g, or t
  misc_feature (26)..(26): n is a, c, g, or t
  misc_feature (29)..(29): n is a, c, g, or t
  misc_feature (64)..(64): n is a, c, g, or t
  misc_feature (83)..(83): n is a, c, g, or t
  misc_feature (86)..(86): n is a, c, g, or t
  misc_feature (100)..(100): n is a, c, g, or t
  misc_feature (139)..(139): n is a, c, g, or t
  misc_feature (156)..(156): n is a, c, g, or t
  misc_feature (190)..(190): n is a, c, g, or t
gaggatataantactcgattntctantgntgtgtaatactttttgacaattgtgcttgtctgtnactgaaatgttatagaatnttnacactatagggatnatagagttatattagctctcctcaagagactgaagcacnatatttttcatgtaacnattcttatccaagtgctgctaatctgaagtgtcnacgtacgttgacacttcaggaaacattagttaaaattcaagcagaacattcagaatcaggtcagcttgtgggtgtggacctgaacacaggtgagccaatggtggcagcagaagtaggcgtatgggataactattgtgtaaagaaacagcttcttcactcctgcactgtgattgccaccaacattctcttggttgatgagatcatgcgagctggaatgtcttctctgaaaggttgaattgaagcttcctctgtatctgaatcttgaagactgcaaagtgatcctgaggattacagctgtggaatttttgtccaagcttcaaataattttgaaagaaattttcccatatgaaaaaaggagagaacactggcatctgttgaaatttggaagttctgaaattatagtatttttaaaaattgcactgaagtgtatacacataaagcaggtcttttatccagtgaacaggatgttttgctttagcagcagtgacataaaattccatgttagataagcatatgttacttaccttgttattaaatatttcttgaaaagcaaattttaatggtttaattttatgtggacgtatgttaaattatccaactaccctattgttaagcatttggttttaaaatttttatgctaatataaatgctcaagtaatttaaaatattgaaagcatccctgttggtataaatttctgagtaaatgcattggatcagttggactttgaacgcctttgaaatggctttgctaaaatgctcccgccacaaagttgtaggaaatgggaagaggagtcaactagaggcaagggagttgagagagctgcaactgtaaagggcaagaacaggcagaggtaaaaagatgatggaaggtgtggtgactaagggccacggttattgggtgaaatttgagattgtaggccaactgtattttcaagcttctgaacttaggcaaaatattcatcgcaaagtctctagcgtcatatttttctcacccaaattacgtttccacgagattatttatatatagttggtctatctctgcagtccttgaaggtgaagttgtgtgttactaggctgtgttttgggatgtcagcagtggcctgaagtgagttgtgcaataaatgttaagttgaaacctc

SEQ ID NO: 68663 - DNA, 1122 bp, Homo sapiens
ccgggctcgcaggaattcggcacgagagacattcagaatcaggtcagcttgtgggtgtggacctgaacacaggtgagccaatggtggcagcagaagtaggcgtatgggataactattgtgtaaagaaacagcttcttcactcctgcactgtgattgccaccaacattctcttggttgatgagatcatgcgagctggaatgtcttctctgaaaggttgaattgaagcttcctctgtatctgaatcttgaagactgcaaagtgatcctgaggattacagctgtggaatttttgtccaagcttcaaataattttgaaagaaattttcccatatgaaaaaaggagagaacactggcatctgttgaaatttggaagttctgaaattatagtatttttaaaaattgcactgaagtgtatacacataaagcaggtcttttatccagtgaacaggatgttttgctttagcagcagtgacataaaattccatgttagataagcatatgttacttaccttgttattaaatatttcttgaaaagcaaattttaatggtttaattttatgtggacgtatgttaaattatccaactaccctattgttaagcatttggttttaaaatttttatgctaatataaatgctcaagtaatttaaaatattgaaagcatccctgttggtataaatttctgagtaaatgcattggatcagttggactttgaacgcctttgaaatggctttgctaaaatgctcccgccacaaagttgtaggaaatgggaagaggagtcaactagaggcaagggagttgagagagctgcaactgtaaagggcaagaacaggcagaggtaaaaagatgatggaaggtgtggtgactaagggccacggttattgggtgaaatttgagattgtaggccaactgtattttcaagcttctgaacttaggcaaaatattcatcgcaaagtctctagcgtcatatttttctcacccaaattacgtttccacgagattatttatatatagttggtctatctctgcagtccttgaaggtgaagttgtgtgttactaggctgtgttttgggatgtcagcagtggcctgaagtgagttgtgcaataaatgttaagttgaaacctc

SEQ ID NO: 68664 - DNA, 1952 bp, Homo sapiens
actctagaggactcccccaagagttacattcagaatcaggtcagcttgtgggtgtggacctgaacacaggtaagagaatgcaactgttgtagagggaaaactagatgtaatacgtgtgagttgaagccaggaaagattaaaaatgttttgctttgcaatttgacaccagtgctgttagggaactctgggttctaaaatgggataaaataggatattaataaaaaatggaatgactaggtataattaagggacgagtagacatgagtaattgggggatacaattttggagatgttgagtggtggtagatggttcagattaatgttgaaggattttcatattgcatttgccttactcagtttttaatcaagtactatgataagaaaatagatgtggtgattatattcatgggtgaaaaccagctaaagatagcaattaatgccagaaaaggggatgtagaaatctagtgaaatggtgacagccctgatcttaggttcctgtaacaaaacaacacaaattaagtacaaagtaggagataacaggtacctccatgcagtatgtgcaagacctattgtcaacattaatagaaaaggtttctggaatgagggaaatgatcagtccattttagtcagattatagttgaagtgctatacttcagtatgagtaaacagaaatgtatccagaagaagagaggggtgttcaggacttctaagtataagtcagacattcatcaaatattgtggacgggggtcatggtttagagtagaaaattgggctaacagagaagctttgaattctcatagttaatactggaggaaatgagtcatcagtgataagcaaagctgcacacaatattgttggttcttactgactgaacttattttaagatttggttgccttttaggtgagccaatggtggcagcagaagtaggcgtatgggataactattgtgtaaagaaacagcttcttcactcctgcactgtgattgccaccaacattctcttggttgatgagatcatgcgagctggaatgtcttctctgaaaggttgaattgaagcttcctctgtatctgaatcttgaagactgcaaagtgatcctgaggattacagctgtggaatttttgtccaagcttcaaataattttgaaagaaattttcccatatgaaaaaaggagagaacactggcatctgttgaaatttggaagttctgaaattatagtatttttaaaaattgcactgaagtgtatacacataaagcaggtcttttatccagtgaacaggatgttttgctttagcagcagtgacataaaattccatgttagataagcatatgttacttaccttgttattaaatatttcttgaaaagcaaattttaatggtttaattttatgtggacgtatgttaaattatccaactaccctattgttaagcatttggttttaaaatttttatgctaatataaatgctcaagtaatttaaaatattgaaagcatccctgttggtataaatttctgagtaaatgcattggatcagttggactttgaacgcctttgaaatggctttgctaaaatgctcccgccacaaagttgtaggaaatgggaagaggagtcaactagaggcaagggagttgagagagctgcaactgtaaagggcaagaacaggcagaggtaaaaagatgatggaaggtgtggtgactaagggccacggttattgggtgaaatttgagattgtaggccaactgtattttcaagcttctgaacttaggcaaaatattcatcgcaaagtctctagcgtcatatttttctcacccaaattacgtttccacgagattatttatatatagttggtctatctctgcagtccttgaaggtgaagttgtgtgttactaggctgtgttttgggatgtcagcagtggcctgaagtgagttgtgcaataaatgttaagttgaaacctc

SEQ ID NO: 68665 - DNA, 1275 bp, Homo sapiens
  misc_feature (234)..(234): n is a, c, g, or t
  misc_feature (236)..(236): n is a, c, g, or t
ctattttgggagttaaaattccttgaagacccagcatctgtcgttcttgtaaaagtaaaatccaattcccttgttttgttcttgggttcagcataagtggcttgcctttttcttttatgtgccaatgctgccattgccaccatcaagacccagcgtaccgtccagtttgtggattggtgcccaactggcttcaaggttggcatcaactaccagcctcccactgtggtgcctggngnagacctggccaaggtacagagagctgtgtgcatgctgaaaagaaacagcttcttcactcctgcactgtgattgccaccaacattctcttggttgatgagatcatgcgagctggaatgtcttctctgaaaggttgaattgaagcttcctctgtatctgaatcttgaagactgcaaagtgatcctgaggattacagctgtggaatttttgtccaagcttcaaataattttgaaagaaattttcccatatgaaaaaaggagagaacactggcatctgttgaaatttggaagttctgaaattatagtatttttaaaaattgcactgaagtgtatacacataaagcaggtcttttatccagtgaacaggatgttttgctttagcagcagtgacataaaattccatgttagataagcatatgttacttaccttgttattaaatatttcttgaaaagcaaattttaatggtttaattttatgtggacgtatgttaaattatccaactaccctattgttaagcatttggttttaaaatttttatgctaatataaatgctcaagtaatttaaaatattgaaagcatccctgttggtataaatttctgagtaaatgcattggatcagttggactttgaacgcctttgaaatggctttgctaaaatgctcccgccacaaagttgtaggaaatgggaagaggagtcaactagaggcaagggagttgagagagctgcaactgtaaagggcaagaacaggcagaggtaaaaagatgatggaaggtgtggtgactaagggccacggttattgggtgaaatttgagattgtaggccaactgtattttcaagcttctgaacttaggcaaaatattcatcgcaaagtctctagcgtcatatttttctcacccaaattacgtttccacgagattatttatatatagttggtctatctctgcagtccttgaaggtgaagttgtgtgttactaggctgtgttttgggatgtcagcagtggcctgaagtgagttgtgcaataaatgttaagttgaaacctc

SEQ ID NO: 68666 - DNA, 468 bp, Homo sapiens
agagtagcgaaatgagtctggatgagattgagcaggtgatcctggtgggtggggcactcgggtccccagagttcaggaggtgctgctgaaggccgtgggaaggaggaaatgggaagaggagtcaactagaggcaagggagttgagagagctgcaactgtaaagggcaagaacaggcagaggtaaaaagatgatggaaggtgtggtgactaagggccacggttattgggtgaaatttgagattgtaggccaactgtattttcaagcttctgaacttaggcaaaatattcatcgcaaagtctctagcgtcatatttttctcacccaaattacgtttccacgagattatttatatatagttggtctatctctgcagtccttgaaggtgaagttgtgtgttactaggctgtgttttgggatgtcagcagtggcctgaagtgagttgtgcaataaatgttaagttgaaacctc

SEQ ID NO: 68667 - DNA, 739 bp, Homo sapiens
tgttagataagcatatgttacttaccttgttattaaatatggaattttatgtcactgctgctaaagcaaaacatcctgttcactggataaaagaccttagcagcagtgacataaaattccatgttagataagcatatgttacttaccttgttattaaatatttcttgaaaagcaaattttaatggtttaattttatgtggacgtatgttaaattatccaactaccctattgttaagcatttggttttaaaatttttatgctaatataaatgctcaagtaatttaaaatattgaaagcatccctgttggtataaatttctgagtaaatgcattggatcagttggactttgaacgcctttgaaatggctttgctaaaatgctcccgccacaaagttgtaggaaatgggaagaggagtcaactagaggcaagggagttgagagagctgcaactgtaaagggcaagaacaggcagaggtaaaaagatgatggaaggtgtggtgactaagggccacggttattgggtgaaatttgagattgtaggccaactgtattttcaagcttctgaacttaggcaaaatattcatcgcaaagtctctagcgtcatatttttctcacccaaattacgtttccacgagattatttatatatagttggtctatctctgcagtccttaggctgtgttttgggatgtcagcagtggcctgaagtgagttgtgcaataaatgttaagttgaaacctc

SEQ ID NO: 68668 - DNA, 999 bp, Homo sapiens
  misc_feature (857)..(858): n is a, c, g, or t
  misc_feature (880)..(880): n is a, c, g, or t
taggctagtagaggccgcggtttaatcggcagagccgcgccggctctgggcactcagcatcgtttccttttcctccgctggagcagctatggcggcggtgaagaccctgaaccccaaggccgaggtggcccgagcgcaggcggcgctggcggtcaacatcagcgcagcgcggggtctgcaggacgtgctaaggaccaacctggggcccaagggcaccatgaagatgctcgtttctggcgctggagacatcaaacttactaaagacggcaatgtgctgcttcacgaaatgcaaattcaacacccaacagcttccttaatagcaaaggtagcaacagcccaggatgatataactggtgatggtacgacttctaatgtcctaatcattggagagctgctgaaacaggcggatctctacatttctgaaggccttcatcctagaataatcactgaaggatttgaagctgcaaaggaaaaggcccttcagtttttggaagaagtcaaagtaagcagagagatggacagggaaacacttatagatgtggccagaacatctcttcgtactaaagttcatgctgaacttgcagatgtcttaacagaggctgtagtggactccattttggccattaaaaagcaagatgaacctattgatctcttcatgattgagatcatggagatgaaacataaatctgaaactgatacaagcttaatcagagggcttgttttggaccacggagcacggcatcctgatatgaagaaaagggtggaggatgcatacatcctcacttgtaacgtgtcattagagtatgagaaaaccgaagtgaattctggttttttaccagagtgcgagagagagaaanngtgaagtggaaaaaatctgagntggttaaaattggatgaaggaagctgggagacaataggttgtggtaccaaggatggccttcttaggtaaaaaggatgtggggaaggaaataggactttggggattgaaaagtggagaga

SEQ ID NO: 68669 - DNA, 840 bp, Homo sapiens
aacttcggctaggtagcgaggcctgggtggctggctggagcagctatggcggcggtgaagaccctgaaccccaaggccgaggtggcccgagcgcaggcggcgctggcggtcaacatcagcgcagcgcggggtctgcaggacgtgctaaggaccaacctggggcccaagggcaccatgaagatgctcgtttctggcgctggagacatcaaacttactaaagacggcaatgtgctgcttcacgaaatgcaaattcaacacccaacagcttccttaatagcaaaggtagcaacagcccaggatgatataactggtgatggtacgacttctaatgtcctaatcattggagagctgctgaaacaggcggatctctacatttctgaaggccttcatcctagaataatcactgaaggatttgaagctgcaaaggaaaaggcccttcagtttttggaagaagtcaaagtaagcagagagatggacagggaaacacttatagatgtggccagaacatctcttcgtactaaagttcatgctgaacttgcagatgtcttaacagaggctgtagtggactccattttggccattaaaaagcaagatgaacctattgatctcttcatgattgagatcatggagatgaaacataaatctgaaactgatacaagctttaatcagagggcttggtttggccacggagcacgggatccgggttttgagaacaagggctgaggggggaaaatcctcacgtggaacgggtctaagtttggaaaccgaagagaacctggtcttaaaacggggaacaagaaaaaacgcgggagggaaaaacttgcgaggttaaaatagaag

SEQ ID NO: 68670 - DNA, 2618 bp, Homo sapiens
gaacggctagtgagcctccggtaaatcggacgagggaagacccggatagttcctcccggccacgccgcgccggctctgggcactcagcatcgtttccttttcctccgctggagcagctatggcggcggtgaagaccctgaaccccaaggccgaggtggcccgagcgcaggcggcgctggcggtcaacatcagcgcagcgcggggtctgcaggacgtgctaaggaccaacctggggcccaagggcaccatgaagatgctcgtttctggcgctggagacatcaaacttactaaagacggcaatgtgctgcttcacgaaatgcaaattcaacacccaacagcttccttaatagcaaaggtagcaacagcccaggatgatataactggtgatggtacgacttctaatgtcctaatcattggagagctgctgaaacaggcggatctctacatttctgaaggccttcatcctagaataatcactgaaggatttgaagctgcaaaggaaaaggcccttcagtttttggaagaagtcaaagtaagcagagagatggacagggaaacacttatagatgtggccagaacatctcttcgtactaaagttcatgctgaacttgcagatgtcttaacagaggctgtagtggactccattttggccattaaaaagcaagatgaacctattgatctcttcatgattgagatcatggagatgaaacataaatctgaaactgatacaagcttaatcagagggcttgttttggaccacggagcacggcatcctgatatgaagaaaagggtggaggatgcatacatcctcacttgtaacgtgtcattagagtatgagaaaacagaagtgaattctggctttttttacaagagtgcagaagagagagaaaaactcgtgaaagctgaaagaaaattcattgaagatagggttaaaaaaataatagaactgaaaaggaaagtctgtggcgattcagataaaggatttgttgttattaatcaaaagggaattgaccccttttccttagatgctctttcaaaagaaggcatagtcgctctgcgcagagctaaaaggagaaatatggagaggctgactcttgcttgtggtggggtagccctgaattcttttgacgacctaagtcctgactgcttgggacatgcaggacttgtatatgagtatacattgggagaagagaagtttacctttattgagaaatgtaacaaccctcgttctgtcacattattgatcaaaggaccaaataagcacacactcactcagatcaaagatgcagtgagggacggcttgagggctgtcaaaaatgctattgatgatggctgtgtggttccaggtgctggtgccgtggaagtggcaatggcagaagccctgattaaacataagcccagtgtaaagggcagggcacagcttggagtccaagcatttgctgatgcattgctcattattcccaaggttcttgctcagaactctggttttgaccttcaggaaacattagttaaaattcaagcagaacattcagaatcaggtcagcttgtgggtgtggacctgaacacaggtgagccaatggtggcagcagaagtaggcgtatgggataactattgtgtaaagaaacagcttcttcactcctgcactgtgattgccaccaacattctcttggttgatgagatcatgcgagctggaatgtcttctctgaaaggttgaattgaagcttcctctgtatctgaatcttgaagactgcaaagtgatcctgaggattacagctgtggaatttttgtccaagcttcaaataattttgaaagaaattttcccatatgaaaaaaggagagaacactggcatctgttgaaatttggaagttctgaaattatagtatttttaaaaattgcactgaagtgtatacacataaagcaggtcttttatccagtgaacaggatgttttgctttagcagcagtgacataaaattccatgttagataagcatatgttacttaccttgttattaaatatttcttgaaaagcaaattttaatggtttaattttatgtggacgtatgttaaattatccaactaccctattgttaagcatttggttttaaaatttttatgctaatataaatgctcaagtaatttaaaatattgaaagcatccctgttggtataaatttctgagtaaatgcattggatcagttggactttgaacgcctttgaaatggctttgctaaaatgctcccgccacaaagttgtaggaaatgggaagaggagtcaactagaggcaagggagttgagagagctgcaactgtaaagggcaagaacaggcagaggtaaaaagatgatggaaggtgtggtgactaagggccacggttattgggtgaaatttgagattgtaggccaactgtattttcaagcttctgaacttaggcaaaatattcatcgcaaagtctctagcgtcatatttttctcacccaaattacgtttccacgagattatttatatatagttggtctatctctgcagtccttgaaggtgaagttgtgtgttactaggctgtgttttgggatgtcagcagtggcctgaagtgagttgtgcaataaatgttaagttgaaacctc

SEQ ID NO: 68671 - DNA, 2673 bp, Homo sapiens
gcgacgtaactcctaaacgcgttcataaacggtcagcagagggccctggcggtggccgcacactatccgcggcaccgacgggccgagactaacgttcccctcacgcaggacgctaaccgccgcgccggctctgggcactcagcatcgtttccttttcctccgctggagcagctatggcggcggtgaagaccctgaaccccaaggccgaggtggcccgagcgcaggcggcgctggcggtcaacatcagcgcagcgcggggtctgcaggacgtgctaaggaccaacctggggcccaagggcaccatgaagatgctcgtttctggcgctggagacatcaaacttactaaagacggcaatgtgctgcttcacgaaatgcaaattcaacacccaacagcttccttaatagcaaaggtagcaacagcccaggatgatataactggtgatggtacgacttctaatgtcctaatcattggagagctgctgaaacaggcggatctctacatttctgaaggccttcatcctagaataatcactgaaggatttgaagctgcaaaggaaaaggcccttcagtttttggaagaagtcaaagtaagcagagagatggacagggaaacacttatagatgtggccagaacatctcttcgtactaaagttcatgctgaacttgcagatgtcttaacagaggctgtagtggactccattttggccattaaaaagcaagatgaacctattgatctcttcatgattgagatcatggagatgaaacataaatctgaaactgatacaagcttaatcagagggcttgttttggaccacggagcacggcatcctgatatgaagaaaagggtggaggatgcatacatcctcacttgtaacgtgtcattagagtatgagaaaacagaagtgaattctggctttttttacaagagtgcagaagagagagaaaaactcgtgaaagctgaaagaaaattcattgaagatagggttaaaaaaataatagaactgaaaaggaaagtctgtggcgattcagataaaggatttgttgttattaatcaaaagggaattgaccccttttccttagatgctctttcaaaagaaggcatagtcgctctgcgcagagctaaaaggagaaatatggagaggctgactcttgcttgtggtggggtagccctgaattcttttgacgacctaagtcctgactgcttgggacatgcaggacttgtatatgagtatacattgggagaagagaagtttacctttattgagaaatgtaacaaccctcgttctgtcacattattgatcaaaggaccaaataagcacacactcactcagatcaaagatgcagtgagggacggcttgagggctgtcaaaaatgctattgatgatggctgtgtggttccaggtgctggtgccgtggaagtggcaatggcagaagccctgattaaacataagcccagtgtaaagggcagggcacagcttggagtccaagcatttgctgatgcattgctcattattcccaaggttcttgctcagaactctggttttgaccttcaggaaacattagttaaaattcaagcagaacattcagaatcaggtcagcttgtgggtgtggacctgaacacaggtgagccaatggtggcagcagaagtaggcgtatgggataactattgtgtaaagaaacagcttcttcactcctgcactgtgattgccaccaacattctcttggttgatgagatcatgcgagctggaatgtcttctctgaaaggttgaattgaagcttcctctgtatctgaatcttgaagactgcaaagtgatcctgaggattacagctgtggaatttttgtccaagcttcaaataattttgaaagaaattttcccatatgaaaaaaggagagaacactggcatctgttgaaatttggaagttctgaaattatagtatttttaaaaattgcactgaagtgtatacacataaagcaggtcttttatccagtgaacaggatgttttgctttagcagcagtgacataaaattccatgttagataagcatatgttacttaccttgttattaaatatttcttgaaaagcaaattttaatggtttaattttatgtggacgtatgttaaattatccaactaccctattgttaagcatttggttttaaaatttttatgctaatataaatgctcaagtaatttaaaatattgaaagcatccctgttggtataaatttctgagtaaatgcattggatcagttggactttgaacgcctttgaaatggctttgctaaaatgctcccgccacaaagttgtaggaaatgggaagaggagtcaactagaggcaagggagttgagagagctgcaactgtaaagggcaagaacaggcagaggtaaaaagatgatggaaggtgtggtgactaagggccacggttattgggtgaaatttgagattgtaggccaactgtattttcaagcttctgaacttaggcaaaatattcatcgcaaagtctctagcgtcatatttttctcacccaaattacgtttccacgagattatttatatatagttggtctatctctgcagtccttgaaggtgaagttgtgtgttactaggctgtgttttgggatgtcagcagtggcctgaagtgagttgtgcaataaatgttaagttgaaacctc

SEQ ID NO: 68672 - DNA, 2145 bp, Homo sapiens
accgcaggagccgtgcagccgcggaccaatgagcgggcgccggacgacctgtggcccaatggcggcggcgcgcgggcacgctgggggccggccagacgggccgacttttccagaagacccggatagttcctcccggccacgccgcgccggctctgggcactcagcatcgtttccttttcctccgctggagcagctatggcggcggtgaagaccctgaaccccaaggccgaggtggcccgagcgcaggcggcgctggcggtcaacatcagcgcagcgcggggtctgcaggacgtgctaaggaccaacctggggcccaagggcaccatgaagatgctcgtttctggcgctggagacatcaaacttactaaagacggcaatgtgctgcttcacgaaatgcaaattcaacacccaacagcttccttaatagcaaaggtagcaacagcccaggatgatataactggtgatggtacgacttctaatgtcctaatcattggagagctgctgaaacaggcggatctctacatttctgaaggccttcatcctagaataatcactgaaggatttgaagctgcaaaggaaaaggcccttcagtttttggaagaagtcaaagtaagcagagagatggacagggaaacacttatagatgtggccagaacatctcttcgtactaaagttcatgctgaacttgcagatgtcttaacagaggctgtagtggactccattttggccattaaaaagcaagatgaacctattgatctcttcatgattgagatcatggagatgaaacataaatctgaaactgatacaagcttaatcagagggcttgttttggaccacggagcacggcatcctgatatgaagaaaagggtggaggatgcatacatcctcacttgtaacgtgtcattagagtatgagaaaacagaagtgaattctggctttttttacaagagtgcagaagagagagaaaaactcgtgaaagctgaaagaaaattcattgaagatagggttaaaaaaataatagaactgaaaaggaaagtctgtggcgattcagataaaggatttgttgttattaatcaaaagggaattgaccccttttccttagatgctctttcaaaagaaggcatagtcgctctgcgcagagctaaaaggagaaatatggagaggctgactcttgcttgtggtggggtagccctgaattcttttgacgacctaagtcctgactgcttgggacatgcaggacttgtatatgagtatacattgggagaagagaagtttacctttattgagaaatgtaacaaccctcgttctgtcacattattgatcaaaggaccaaataagcacacactcactcagatcaaagatgcagtgagggacggcttgagggctgtcaaaaatgctattgatgatggctgtgtggttccaggtgctggtgccgtggaagtggcaatggcagaagccctgattaaacataagcccagtgtaaagggcagggcacagcttggagtccaagcatttgctgatgcattgctcattattcccaaggttcttgctcagaactctggttttgaccttcaggaaacattagttaaaattcaagcagaacattcagaatcaggtcagcttgtgggtgtggacctgaacacaggtgagccaatggtggcagcagaagtaggcgtatgggataactattgtgtaaagaaacagcttcttcactcctgcactgtgattgccaccaacattctcttggttgatgagatcatgcgagctggaatgtcttctctgaaaggttgaattgaagcttcctctgtatctgaatcttgaagactgcaaagtgatcctgaggattacagctgtggaatttttgtccaagcttcaaataattttgaaagaaattttcccatatgaaaaaaggagagaacactggcatctgttgaaatttggaagttctgaaattatagtatttttaaaaattgcactgaagtgtatacacataaagcaggtcttttatccagtgaacaggatgttttgctttagcagcagtgacataaaattccatgttagataagcatatgttacttaccttgttattaaatatttcttgaaaagcaggccacgaaggccggccttcgtggcctcgaggaattc

SEQ ID NO: 68673 - DNA, 2514 bp, Homo sapiens
accgcaggagccgtgcagccgcggaccaatgagcgggcgccggacgacctgtggcccaatggcggcggcgcgcgggcacgctgggggccggccagacgggccgacttttccagaagacccggatagttcctcccggccacgccgcgccggctctgggcactcagcatcgtttccttttcctccgctggagcagctatggcggcggtgaagaccctgaaccccaaggccgaggtggcccgagcgcaggcggcgctggcggtcaacatcagcgcagcgcggggtctgcaggacgtgctaaggaccaacctggggcccaagggcaccatgaagatgctcgtttctggcgctggagacatcaaacttactaaagacggcaatgtgctgcttcacgaaatgcaaattcaacacccaacagcttccttaatagcaaaggtagcaacagcccaggatgatataactggtgatggtacgacttctaatgtcctaatcattggagagctgctgaaacaggcggatctctacatttctgaaggccttcatcctagaataatcactgaaggatttgaagctgcaaaggaaaaggcccttcagtttttggaagaagtcaaagtaagcagagagatggacagggaaacacttatagatgtggccagaacatctcttcgtactaaagttcatgctgaacttgcagatgtcttaacagaggctgtagtggactccattttggccattaaaaagcaagatgaacctattgatctcttcatgattgagatcatggagatgaaacataaatctgaaactgatacaagcttaatcagagggcttgttttggaccacggagcacggcatcctgatatgaagaaaagggtggaggatgcatacatcctcacttgtaacgtgtcattagagtatgagaaaacagaagtgaattctggctttttttacaagagtgcagaagagagagaaaaactcgtgaaagctgaaagaaaattcattgaagatagggttaaaaaaataatagaactgaaaaggaaagtctgtggcgattcagataaaggatttgttgttattaatcaaaagggaattgaccccttttccttagatgctctttcaaaagaaggcatagtcgctctgcgcagagctaaaaggagaaatatggagaggctgactcttgcttgtggtggggtagccctgaattcttttgacgacctaagtcctgactgcttgggacatgcaggacttgtatatgagtatacattgggagaagagaagtttacctttattgagaaatgtaacaaccctcgttctgtcacattattgatcaaaggaccaaataagcacacactcactcagatcaaagatgcagtgagggacggcttgagggctgtcaaaaatgctattgatgatggctgtgtggttccaggtgctggtgccgtggaagtggcaatggcagaagccctgattaaacataagcccagtgtaaagggcagggcacagcttggagtccaagcatttgctgatgcattgctcattattcccaaggttcttgctcagaactctggttttgaccttcaggaaacattagttaaaattcaagcagaacattcagaatcaggtcagcttgtgggtgtggacctgaacacaggtgagccaatggtggcagcagaagtaggcgtatgggataactattgtgtaaagaaacagcttcttcactcctgcactgtgattgccaccaacattctcttggttgatgagatcatgcgagctggaatgtcttctctgaaaggttgaattgaagcttcctctgtatctgaatcttgaagactgcaaagtgatcctgaggattacagctgtggaatttttgtccaagcttcaaataattttgaaagaaattttcccatatgaaaaaaggagagaacactggcatctgttgaaatttggaagttctgaaattatagtatttttaaaaattgcactgaagtgtatacacataaagcaggtcttttatccagtgaacaggatgttttgctttagcagcagtgacataaaattccatgttagataagcatatgttacttaccttgttattaaatatttcttgaaaagcaaaaaaaaaaaaaaaaaaaaaaaaaaaaaaaaaaaggggggggggggcaaaaagaaaatcccgggggggggccaattgggggaccccgtttttttgaaaagggggggggccaatgggggggggataaaaagaagggaggggggggggaaaacacggggggggggggacaaccgcgccggggccttgggggaagacccctcctgggggggccaattggggccaccccaagaagatagagccgggaaaaacctggtgtaaggggacccaggatgcggggggaatttgccctttctaatagcggcgcacactcaaagagaagcgagagaaacaagaagagaacaagcaagggacgcaaatgtaaaggaggaacagaaagaaaaaagctactaggcacgacatactacgcc

SEQ ID NO: 68674 - DNA, 3528 bp, Homo sapiens
accgcaggagccgtgcagccgcggaccaatgagcgggcgccggacgacctgtggcccaatggcggcggcgcgcgggcacgctgggggccggccagacgggccgacttttccagaagacccggatagttcctcccggccacgccgcgccggctctgggcactcagcatcgtttccttttcctccgctggagcagctatggcggcggtgaagaccctgaaccccaaggccgaggtggcccgagcgcaggcggcgctggcggtcaacatcagcgcagcgcggggtctgcaggacgtgctaaggaccaacctggggcccaagggcaccatgaagatgctcgtttctggcgctggagacatcaaacttactaaagacggcaatgtgctgcttcacgaaatgcaaattcaacacccaacagcttccttaatagcaaaggtagcaacagcccaggatgatataactggtgatggtacgacttctaatgtcctaatcattggagagctgctgaaacaggcggatctctacatttctgaaggccttcatcctagaataatcactgaaggatttgaagctgcaaaggaaaaggcccttcagtttttggaagaagtcaaagtaagcagagagatggacagggaaacacttatagatgtggccagaacatctcttcgtactaaagttcatgctgaacttgcagatgtcttaacagaggctgtagtggactccattttggccattaaaaagcaagatgaacctattgatctcttcatgattgagatcatggagatgaaacataaatctgaaactgatacaagcttaatcagagggcttgttttggaccacggagcacggcatcctgatatgaagaaaagggtggaggatgcatacatcctcacttgtaacgtgtcattagagtatgagaaaacagaagtgaattctggctttttttacaagagtgcagaagagagagaaaaactcgtgaaagctgaaagaaaattcattgaagatagggttaaaaaaataatagaactgaaaaggaaagtctgtggcgattcagataaaggatttgttgttattaatcaaaagggaattgaccccttttccttagatgctctttcaaaagaaggcatagtcgctctgcgcagagctaaaaggagaaatatggagaggctgactcttgcttgtggtggggtagccctgaattcttttgacgacctaagtcctgactgcttgggacatgcaggacttgtatatgagtatacattgggagaagagaagtttacctttattgagaaatgtaacaaccctcgttctgtcacattattgatcaaaggaccaaataagcacacactcactcagatcaaagatgcagtgagggacggcttgagggctgtcaaaaatgctattgatgatggctgtgtggttccaggtgctggtgccgtggaagtggcaatggcagaagccctgattaaacataagcccagtgtaaagggcagggcacagcttggagtccaagcatttgctgatgcattgctcattattcccaaggttcttgctcagaactctggttttgaccttcaggaaacattagttaaaattcaagcagaacattcagaatcaggtcagcttgtgggtgtggacctgaacacaggtaagagaatgcaactgttgtagagggaaaactagatgtaatacgtgtgagttgaagccaggaaagattaaaaatgttttgctttgcaatttgacaccagtgctgttagggaactctgggttctaaaatgggataaaataggatattaataaaaaatggaatgactaggtataattaagggacgagtagacatgagtaattgggggatacaattttggagatgttgagtggtggtagatggttcagattaatgttgaaggattttcatattgcatttgccttactcagtttttaatcaagtactatgataagaaaatagatgtggtgattatattcatgggtgaaaaccagctaaagatagcaattaatgccagaaaaggggatgtagaaatctagtgaaatggtgacagccctgatcttaggttcctgtaacaaaacaacacaaattaagtacaaagtaggagataacaggtacctccatgcagtatgtgcaagacctattgtcaacattaatagaaaaggtttctggaatgagggaaatgatcagtccattttagtcagattatagttgaagtgctatacttcagtatgagtaaacagaaatgtatccagaagaagagaggggtgttcaggacttctaagtataagtcagacattcatcaaatattgtggacgggggtcatggtttagagtagaaaattgggctaacagagaagctttgaattctcatagttaatactggaggaaatgagtcatcagtgataagcaaagctgcacacaatattgttggttcttactgactgaacttattttaagatttggttgccttttaggtgagccaatggtggcagcagaagtaggcgtatgggataactattgtgtaaagaaacagcttcttcactcctgcactgtgattgccaccaacattctcttggttgatgagatcatgcgagctggaatgtcttctctgaaaggttgaattgaagcttcctctgtatctgaatcttgaagactgcaaagtgatcctgaggattacagctgtggaatttttgtccaagcttcaaataattttgaaagaaattttcccatatgaaaaaaggagagaacactggcatctgttgaaatttggaagttctgaaattatagtatttttaaaaattgcactgaagtgtatacacataaagcaggtcttttatccagtgaacaggatgttttgctttagcagcagtgacataaaattccatgttagataagcatatgttacttaccttgttattaaatatttcttgaaaagcaaattttaatggtttaattttatgtggacgtatgttaaattatccaactaccctattgttaagcatttggttttaaaatttttatgctaatataaatgctcaagtaatttaaaatattgaaagcatccctgttggtataaatttctgagtaaatgcattggatcagttggactttgaacgcctttgaaatggctttgctaaaatgctcccgccacaaagttgtaggaaatgggaagaggagtcaactagaggcaagggagttgagagagctgcaactgtaaagggcaagaacaggcagaggtaaaaagatgatggaaggtgtggtgactaagggccacggttattgggtgaaatttgagattgtaggccaactgtattttcaagcttctgaacttaggcaaaatattcatcgcaaagtctctagcgtcatatttttctcacccaaattacgtttccacgagattatttatatatagttggtctatctctgcagtccttgaaggtgaagttgtgtgttactaggctgtgttttgggatgtcagcagtggcctgaagtgagttgtgcaataaatgttaagttgaaacctc

SEQ ID NO: 68675 - DNA, 3785 bp, Homo sapiens
accgcaggagccgtgcagccgcggaccaatgagcgggcgccggacgacctgtggcccaatggcggcggcgcgcgggcacgctgggggccggccagacgggccgacttttccagaagacccggatagttcctcccggccacgccgcgccggctctgggcactcagcatcgtttccttttcctccgctggagcagctatggcggcggtgaagaccctgaaccccaaggccgaggtggcccgagcgcaggcggcgctggcggtcaacatcagcgcagcgcggggtctgcaggacgtgctaaggaccaacctggggcccaagggcaccatgaagatgctcgtttctggcgctggagacatcaaacttactaaagacggcaatgtgctgcttcacgaaatgcaaattcaacacccaacagcttccttaatagcaaaggtagcaacagcccaggatgatataactggtgatggtacgacttctaatgtcctaatcattggagagctgctgaaacaggcggatctctacatttctgaaggccttcatcctagaataatcactgaaggatttgaagctgcaaaggaaaaggcccttcagtttttggaagaagtcaaagtaagcagagagatggacagggaaacacttatagatgtggccagaacatctcttcgtactaaagttcatgctgaacttgcagatgtcttaacagaggctgtagtggactccattttggccattaaaaagcaagatgaacctattgatctcttcatgattgagatcatggagatgaaacataaatctgaaactgatacaagcttaatcagagggcttgttttggaccacggagcacggcatcctgatatgaagaaaagggtggaggatgcatacatcctcacttgtaacgtgtcattagagtatgagaaaacagaagtgaattctggctttttttacaagagtgcagaagagagagaaaaactcgtgaaagctgaaagaaaattcattgaagatagggttaaaaaaataatagaactgaaaaggaaagtctgtggcgattcagataaaggatttgttgttattaatcaaaagggaattgaccccttttccttagatgctctttcaaaagaaggcatagtcgctctgcgcagagctaaaaggagaaatatggagaggctgactcttgcttgtggtggggtagccctgaattcttttgacgacctaagtcctgactgcttgggacatgcaggacttgtatatgagtatacattgggagaagagaagtttacctttattgagaaatgtaacaaccctcgttctgtcacattattgatcaaaggaccaaataagcacacactcactcagatcaaagatgcagtgagggacggcttgagggctgtcaaaaatgctattgatgatggctgtgtggttccaggtgctggtgccgtggaagtggcaatggcagaagccctgattaaacataagcccagtgtaaagggcagggcacagcttggagtccaagcatttgctgatgcattgctcattattcccaaggttcttgctcagaactctggttttgaccttcaggaaacattagttaaaattcaagcagaacattcagaatcaggtcagcttgtgggtgtggacctgaacacaggtaagagaatgcaactgttgtagagggaaaactagatgtaatacgtgtgagttgaagccaggaaagattaaaaatgttttgctttgcaatttgacaccagtgctgttagggaactctgggttctaaaatgggataaaataggatattaataaaaaatggaatgactaggtataattaagggacgagtagacatgagtaattgggggatacaattttggagatgttgagtggtggtagatggttcagattaatgttgaaggattttcatattgcatttgccttactcagtttttaatcaagtactatgataagaaaatagatgtggtgattatattcatgggtgaaaaccagctaaagatagcaattaatgccagaaaaggggatgtagaaatctagtgaaatggtgacagccctgatcttaggttcctgtaacaaaacaacacaaattaagtacaaagtaggagataacaggtacctccatgcagtatgtgcaagacctattgtcaacattaatagaaaaggtttctggaatgagggaaatgatcagtccattttagtcagattatagttgaagtgctatacttcagtatgagtaaacagaaatgtatccagaagaagagaggggtgttcaggacttctaagtataagtcagacattcatcaaatattgtggacgggggtcatggtttagagtagaaaattgggctaacagagaagctttgaattctcatagttaatactggaggaaatgagtcatcagtgataagcaaagctgcacacaatattgttggttcttactgactgaacttattttaagatttggttgccttttaggtgagccaatggtggcagcagaagtaggcgtatgggataactattgtgtaaagaaacagcttcttcactcctggtaagtttgggaaaatgaaaactaaactgttagagaatcatacttttttcatttggtgttctctgtttagttgctcctttcccccatgaataatgtgatcagctggaagtatggaaactgaactagccctctgatgtgtagaggggaagggggaaatttaattggatgtaatgtgtgcagcttggttggaagtgggaagttgagtcgaattagggctcctaatcatctgagccatcttatttttgtccccctttcagcactgtgattgccaccaacattctcttggttgatgagatcatgcgagctggaatgtcttctctgaaaggttgaattgaagcttcctctgtatctgaatcttgaagactgcaaagtgatcctgaggattacagctgtggaatttttgtccaagcttcaaataattttgaaagaaattttcccatatgaaaaaaggagagaacactggcatctgttgaaatttggaagttctgaaattatagtatttttaaaaattgcactgaagtgtatacacataaagcaggtcttttatccagtgaacaggatgttttgctttagcagcagtgacataaaattccatgttagataagcatatgttacttaccttgttattaaatatttcttgaaaagcaaattttaatggtttaattttatgtggacgtatgttaaattatccaactaccctattgttaagcatttggttttaaaatttttatgctaatataaatgctcaagtaatttaaaatattgaaagcatccctgttggtataaatttctgagtaaatgcattggatcagttggactttgaacgcctttgaaatggctttgctaaaatgctcccgccacaaagttgtaggaaatgggaagaggagtcaactagaggcaagggagttgagagagctgcaactgtaaagggcaagaacaggcagaggtaaaaagatgatggaaggtgtggtgactaagggccacggttattgggtgaaatttgagattgtaggccaactgtattttcaagcttctgaacttaggcaaaatattcatcgcaaagtctctagcgtcatatttttctcacccaaattacgtttccacgagattatttatatatagttggtctatctctgcagtccttgaaggtgaagttgtgtgttactaggctgtgttttgggatgtcagcagtggcctgaagtgagttgtgcaataaatgttaagttgaaacctc

SEQ ID NO: 68676 - DNA, 2510 bp, Homo sapiens
accgcaggagccgtgcagccgcggaccaatgagcgggcgccggacgacctgtggcccaatggcggcggcgcgcgggcacgctgggggccggccagacgggccgacttttccagaagacccggatagttcctcccggccacgccgcgccggctctgggcactcagcatcgtttccttttcctccgctggagcagctatggcggcggtgaagaccctgaaccccaaggccgaggtggcccgagcgcaggcggcgctggcggtcaacatcagcgcagcgcggggtctgcaggacgtgctaaggaccaacctggggcccaagggcaccatgaagatgctcgtttctggcgctggagacatcaaacttactaaagacggcaatgtgctgcttcacgaaatgcaaattcaacacccaacagcttccttaatagcaaaggtagcaacagcccaggatgatataactggtgatggtacgacttctaatgtcctaatcattggagagctgctgaaacaggcggatctctacatttctgaaggccttcatcctagaataatcactgaaggatttgaagctgcaaaggaaaaggcccttcagtttttggaagaagtcaaagtaagcagagagatggacagggaaacacttatagatgtggccagaacatctcttcgtactaaagttcatgctgaacttgcagatgtcttaacagaggctgtagtggactccattttggccattaaaaagcaagatgaacctattgatctcttcatgattgagatcatggagatgaaacataaatctgaaactgatacaagcttaatcagagggcttgttttggaccacggagcacggcatcctgatatgaagaaaagggtggaggatgcatacatcctcacttgtaacgtgtcattagagtatgagaaaacagaagtgaattctggctttttttacaagagtgcagaagagagagaaaaactcgtgaaagctgaaagaaaattcattgaagatagggctgaattcttttgacgacctaagtcctgactgcttgggacatgcaggacttgtatatgagtatacattgggagaagagaagtttacctttattgagaaatgtaacaaccctcgttctgtcacattattgatcaaaggaccaaataagcacacactcactcagatcaaagatgcagtgagggacggcttgagggctgtcaaaaatgctattgatgatggctgtgtggttccaggtgctggtgccgtggaagtggcaatggcagaagccctgattaaacataagcccagtgtaaagggcagggcacagcttggagtccaagcatttgctgatgcattgctcattattcccaaggttcttgctcagaactctggttttgaccttcaggaaacattagttaaaattcaagcagaacattcagaatcaggtcagcttgtgggtgtggacctgaacacaggtgagccaatggtggcagcagaagtaggcgtatgggataactattgtgtaaagaaacagcttcttcactcctgcactgtgattgccaccaacattctcttggttgatgagatcatgcgagctggaatgtcttctctgaaaggttgaattgaagcttcctctgtatctgaatcttgaagactgcaaagtgatcctgaggattacagctgtggaatttttgtccaagcttcaaataattttgaaagaaattttcccatatgaaaaaaggagagaacactggcatctgttgaaatttggaagttctgaaattatagtatttttaaaaattgcactgaagtgtatacacataaagcaggtcttttatccagtgaacaggatgttttgctttagcagcagtgacataaaattccatgttagataagcatatgttacttaccttgttattaaatatttcttgaaaagcaaattttaatggtttaattttatgtggacgtatgttaaattatccaactaccctattgttaagcatttggttttaaaatttttatgctaatataaatgctcaagtaatttaaaatattgaaagcatccctgttggtataaatttctgagtaaatgcattggatcagttggactttgaacgcctttgaaatggctttgctaaaatgctcccgccacaaagttgtaggaaatgggaagaggagtcaactagaggcaagggagttgagagagctgcaactgtaaagggcaagaacaggcagaggtaaaaagatgatggaaggtgtggtgactaagggccacggttattgggtgaaatttgagattgtaggccaactgtattttcaagcttctgaacttaggcaaaatattcatcgcaaagtctctagcgtcatatttttctcacccaaattacgtttccacgagattatttatatatagttggtctatctctgcagtccttgaaggtgaagttgtgtgttactaggctgtgttttgggatgtcagcagtggcctgaagtgagttgtgcaataaatgttaagttgaaacctc

SEQ ID NO: 68677 - DNA, 2672 bp, Homo sapiens
accgcaggagccgtgcagccgcggaccaatgagcgggcgccggacgacctgtggcccaatggcggcggcgcgcgggcacgctgggggccggccagacgggccgacttttccagaagacccggatagttcctcccggccacgccgcgccggctctgggcactcagcatcgtttccttttcctccgctggagcagctatggcggcggtgaagaccctgaaccccaaggccgaggtggcccgagcgcaggcggcgctggcggtcaacatcagcgcagcgcggggtctgcaggacgtgctaaggaccaacctggggcccaagggcaccatgaagatgctcgtttctggcgctggagacatcaaacttactaaagacggcaatgtgctgcttcacgaaatgcaaattcaacacccaacagcttccttaatagcaaaggtagcaacagcccaggatgatataactggtgatggtacgacttctaatgtcctaatcattggagagctgctgaaacaggcggatctctacatttctgaaggccttcatcctagaataatcactgaaggatttgaagctgcaaaggaaaaggcccttcagtttttggaagaagtcaaagtaagcagagagatggacagggaaacacttatagatgtggccagaacatctcttcgtactaaagttcatgctgaacttgcagatgtcttaacagaggctgtagtggactccattttggccattaaaaagcaagatgaacctattgatctcttcatgattgagatcatggagatgaaacataaatctgaaactgatacaagcttaatcagagggcttgttttggaccacggagcacggcatcctgatatgaagaaaagggtggaggatgcatacatcctcacttgtaacgtgtcattagagtatgagaaaacagaagtgaattctggctttttttacaagagtgcagaagagagagaaaaactcgtgaaagctgaaagaaaattcattgaagatagggttaaaaaaataatagaactgaaaaggaaagtctgtggcgattcagataaaggatttgttgttattaatcaaaagggaattgaccccttttccttagatgctctttcaaaagaaggcatagtcgctctgcgcagagctaaaaggagaaatatggagaggctgactcttgcttgtggtggggtagccctgaattcttttgacgacctaagtcctgactgcttgggacatgcaggacttgtatatgagtatacattgggagaagagaagtttacctttattgagaaatgtaacaaccctcgttctgtcacattattgatcaaaggaccaaataagcacacactcactcagatcaaagatgcagtgagggacggcttgagggctgtcaaaaatgctattgatgatggctgtgtggttccaggtgctggtgccgtggaagtggcaatggcagaagccctgattaaacataagcccagtgtaaagggcagggcacagcttggagtccaagcatttgctgatgcattgctcattattcccaaggttcttgctcagaactctggttttgaccttcaggaaacattagttaaaattcaagcagaacattcagaatcaggtcagcttgtgggtgtggacctgaacacaggtaagagaatgcaactgttgtagagggaaaactagatgtaatacgtgtgagttgaagccaggaaagattaaaaatgttttgctttgcaatttgacaccagtgctgttagggaactctgggttctaaaatgggataaaataggatattaataaaaaatggaatgactaggtataattaagggacgagtagacatgagtaattgggggatacaattttggagatgttgagtggtggtagatggttcagattaatgttgaaggattttcatattgcatttgccttactcagtttttaatcaagtactatgataagaaaatagatgtggtgattatattcatgggtgaaaaccagctaaagatagcaattaatgccagaaaaggggatgtagaaatctagtgaaatggtgacagccctgatcttaggttcctgtaacaaaacaacacaaattaagtacaaagtaggagataacaggtacctccatgcagtatgtgcaagacctattgtcaacattaatagaaaaggtttctggaatgagggaaatgatcagtccattttagtcagattatagttgaagtgctatacttcagtatgagtaaacagaaatgtatccagaagaagagaggggtgttcaggacttctaagtataagtcagacattcatcaaatattgtggacgggggtcatggtttagagtagaaaattgggctaacagagaagctttgaattctcatagttaatactggaggaaatgagtcatcagtgataagcaaagctgcacaacttgtcgagattcgaatctcgacaagtggtgcaccaagaggacggcttcagctacttctcttatccttactttctttaatagatatttattagagtgtccagtgaaaaggtgccacaatgcccagtatggtaaacaacaggtttgcattcatgaagcttccattcattctggagtctactaatttacctgaatggtgtaggcattctgtgacatgcctctccaggttgcatatgtcacacttttggtc

SEQ ID NO: 68678 - DNA, 2303 bp, Homo sapiens
accgcaggagccgtgcagccgcggaccaatgagcgggcgccggacgacctgtggcccaatggcggcggcgcgcgggcacgctgggggccggccagacgggccgacttttccagaagacccggatagttcctcccggccacgccgcgccggctctgggcactcagcatcgtttccttttcctccgctggagcagctatggcggcggtgaagaccctgaaccccaaggccgaggtggcccgagcgcaggcggcgctggcggtcaacatcagcgcagcgcggggtctgcaggacgtgctaaggaccaacctggggcccaagggcaccatgaagatgctcgtttctggcgctggagacatcaaacttactaaagacggcaatgtgctgcttcacgaaatgcaaattcaacacccaacagcttccttaatagcaaaggtagcaacagcccaggatgatataactggtgatggtacgacttctaatgtcctaatcattggagagctgctgaaacaggcggatctctacatttctgaaggccttcatcctagaataatcactgaaggatttgaagctgcaaaggaaaaggcccttcagtttttggaagaagtcaaagtaagcagagagatggacagggaaacacttatagatgtggccagaacatctcttcgtactaaagttcatgctgaacttgcagatgtcttaacagaggctgtagtggactccattttggccattaaaaagcaagatgaacctattgatctcttcatgattgagatcatggagatgaaacataaatctgaaactgatacaagcttaatcagagggcttgttttggaccacggagcacggcatcctgatatgaagaaaagggtggaggatgcatacatcctcacttgtaacgtgtcattagagtatgagaaaacagaagtgaattctggctttttttacaagagtgcagaagagagagaaaaactcgtgaaagctgaaagaaaattcattgaagatagggttaaaaaaataatagaactgaaaaggaaagtctgtggcgattcagataaaggatttgttgttattaatcaaaagggaattgaccccttttccttagatgctctttcaaaagaaggcatagtcgctctgcgcagagctaaaaggagaaatatggagaggctgactcttgcttgtggtggggtagccctgaattcttttgacgacctaagtcctgactgcttgggacatgcaggacttgtatatgagtatacattgggagaagagaagtttacctttattgagaaatgtaacaaccctcgttctgtcacattattgatcaaaggaccaaataagcacacactcactcagatcaaagatgcagtgagggacggcttgagggctgtcaaaaatgctattgatgatggctgtgtggttccaggtgctggtgccgtggaagtggcaatggcagaagccctgattaaacataagcccagtgtaaagggcagggcacagcttggagtccaagcatttgctgatgcattgctcattattcccaaggttcttgctcagaactctggttttgaccttcaggaaacattagttaaaattcaagcagaacattcagaatcaggtcagcttgtgggtgtggacctgaacacaggtaagagaatgcaactgttgtagagggaaaactagatgtaatacgtgtgagttgaagccaggaaagattaaaaatgttttgctttgcaatttgacaccagtgctgttagggaactctgggttctaaaatgggataaaataggatattaataaaaaatggaatgactaggtataattaagggacgagtagacatgagtaattgggggatacaattttggagatgttgagtggtggtagatggttcagattaatgttgaaggattttcatattgcatttgccttactcagtttttaatcaagtactatgataagaaaatagatgtggtgattatattcatgggtgaaaaccagctaaagatagcaattaatgccagaaaaggggatgtagaaatctagtgaaatggtgacagccctgatcttaggttcctgtaacaaaacaacacaaattaagtacaaagtaggagataacaggtacctccatgcagtatgtgcaagacctattgtcaacattaatagaaaaggtttctggaatgagggaaatgatcagtccattttagtcagattatagttgaagtgctatacttcagtatgtctcacacaaaaatttagacaaagtaaagctgataatccggaatgtgaagagaagactataggcgtt

SEQ ID NO: 68679 - DNA, 2483 bp, Homo sapiens
gaacggctagtgagcctccggtaaatcggacgagggaagacccggatagttcctcccggccacgccgcgccggctctgggcactcagcatcgtttccttttcctccgctggagcagctatggcggcggtgaagaccctgaaccccaaggccgaggtggcccgagcgcaggcggcgctggcggtcaacatcagcgcagcgcggggtctgcaggacgtgctaaggaccaacctggggcccaagggcaccatgaagatgctcgtttctggcgctggagacatcaaacttactaaagacggcaatgtgctgcttcacgaaatgggccttcatcctagaataatcactgaaggatttgaagctgcaaaggaaaaggcccttcagtttttggaagaagtcaaagtaagcagagagatggacagggaaacacttatagatgtggccagaacatctcttcgtactaaagttcatgctgaacttgcagatgtcttaacagaggctgtagtggactccattttggccattaaaaagcaagatgaacctattgatctcttcatgattgagatcatggagatgaaacataaatctgaaactgatacaagcttaatcagagggcttgttttggaccacggagcacggcatcctgatatgaagaaaagggtggaggatgcatacatcctcacttgtaacgtgtcattagagtatgagaaaacagaagtgaattctggctttttttacaagagtgcagaagagagagaaaaactcgtgaaagctgaaagaaaattcattgaagatagggttaaaaaaataatagaactgaaaaggaaagtctgtggcgattcagataaaggatttgttgttattaatcaaaagggaattgaccccttttccttagatgctctttcaaaagaaggcatagtcgctctgcgcagagctaaaaggagaaatatggagaggctgactcttgcttgtggtggggtagccctgaattcttttgacgacctaagtcctgactgcttgggacatgcaggacttgtatatgagtatacattgggagaagagaagtttacctttattgagaaatgtaacaaccctcgttctgtcacattattgatcaaaggaccaaataagcacacactcactcagatcaaagatgcagtgagggacggcttgagggctgtcaaaaatgctattgatgatggctgtgtggttccaggtgctggtgccgtggaagtggcaatggcagaagccctgattaaacataagcccagtgtaaagggcagggcacagcttggagtccaagcatttgctgatgcattgctcattattcccaaggttcttgctcagaactctggttttgaccttcaggaaacattagttaaaattcaagcagaacattcagaatcaggtcagcttgtgggtgtggacctgaacacaggtgagccaatggtggcagcagaagtaggcgtatgggataactattgtgtaaagaaacagcttcttcactcctgcactgtgattgccaccaacattctcttggttgatgagatcatgcgagctggaatgtcttctctgaaaggttgaattgaagcttcctctgtatctgaatcttgaagactgcaaagtgatcctgaggattacagctgtggaatttttgtccaagcttcaaataattttgaaagaaattttcccatatgaaaaaaggagagaacactggcatctgttgaaatttggaagttctgaaattatagtatttttaaaaattgcactgaagtgtatacacataaagcaggtcttttatccagtgaacaggatgttttgctttagcagcagtgacataaaattccatgttagataagcatatgttacttaccttgttattaaatatttcttgaaaagcaaattttaatggtttaattttatgtggacgtatgttaaattatccaactaccctattgttaagcatttggttttaaaatttttatgctaatataaatgctcaagtaatttaaaatattgaaagcatccctgttggtataaatttctgagtaaatgcattggatcagttggactttgaacgcctttgaaatggctttgctaaaatgctcccgccacaaagttgtaggaaatgggaagaggagtcaactagaggcaagggagttgagagagctgcaactgtaaagggcaagaacaggcagaggtaaaaagatgatggaaggtgtggtgactaagggccacggttattgggtgaaatttgagattgtaggccaactgtattttcaagcttctgaacttaggcaaaatattcatcgcaaagtctctagcgtcatatttttctcacccaaattacgtttccacgagattatttatatatagttggtctatctctgcagtccttgaaggtgaagttgtgtgttactaggctgtgttttgggatgtcagcagtggcctgaagtgagttgtgcaataaatgttaagttgaaacctc

SEQ ID NO: 68680 - DNA, 2052 bp, Homo sapiens
  misc_feature (26)..(26): n is a, c, g, or t
  misc_feature (30)..(31): n is a, c, g, or t
aacacgttaggctagtacgaggctgngtgnntcatgctgaacttgcagatgtcttaacagaggctgtagtggactccattttggccattaaaaagcaagatgaacctattgatctcttcatgattgagatcatggagatgaaacataaatctgaaactgatacaagcttaatcagagggcttgttttggaccacggagcacggcatcctgatatgaagaaaagggtggaggatgcatacatcctcacttgtaacgtgtcattagagtatgagaaaacagaagtgaattctggctttttttacaagagtgcagaagagagagaaaaactcgtgaaagctgaaagaaaattcattgaagatagggttaaaaaaataatagaactgaaaaggaaagtctgtggcgattcagataaaggatttgttgttattaatcaaaagggaattgaccccttttccttagatgctctttcaaaagaaggcatagtcgctctgcgcagagctaaaaggagaaatatggagaggctgactcttgcttgtggtggggtagccctgaattcttttgacgacctaagtcctgactgcttgggacatgcaggacttgtatatgagtatacattgggagaagagaagtttacctttattgagaaatgtaacaaccctcgttctgtcacattattgatcaaaggaccaaataagcacacactcactcagatcaaagatgcagtgagggacggcttgagggctgtcaaaaatgctattgatgatggctgtgtggttccaggtgctggtgccgtggaagtggcaatggcagaagccctgattaaacataagcccagtgtaaagggcagggcacagcttggagtccaagcatttgctgatgcattgctcattattcccaaggttcttgctcagaactctggttttgaccttcaggaaacattagttaaaattcaagcagaacattcagaatcaggtcagcttgtgggtgtggacctgaacacaggtgagccaatggtggcagcagaagtaggcgtatgggataactattgtgtaaagaaacagcttcttcactcctgcactgtgattgccaccaacattctcttggttgatgagatcatgcgagctggaatgtcttctctgaaaggttgaattgaagcttcctctgtatctgaatcttgaagactgcaaagtgatcctgaggattacagctgtggaatttttgtccaagcttcaaataattttgaaagaaattttcccatatgaaaaaaggagagaacactggcatctgttgaaatttggaagttctgaaattatagtatttttaaaaattgcactgaagtgtatacacataaagcaggtcttttatccagtgaacaggatgttttgctttagcagcagtgacataaaattccatgttagataagcatatgttacttaccttgttattaaatatttcttgaaaagcaaattttaatggtttaattttatgtggacgtatgttaaattatccaactaccctattgttaagcatttggttttaaaatttttatgctaatataaatgctcaagtaatttaaaatattgaaagcatccctgttggtataaatttctgagtaaatgcattggatcagttggactttgaacgcctttgaaatggctttgctaaaatgctcccgccacaaagttgtaggaaatgggaagaggagtcaactagaggcaagggagttgagagagctgcaactgtaaagggcaagaacaggcagaggtaaaaagatgatggaaggtgtggtgactaagggccacggttattgggtgaaatttgagattgtaggccaactgtattttcaagcttctgaacttaggcaaaatattcatcgcaaagtctctagcgtcatatttttctcacccaaattacgtttccacgagattatttatatatagttggtctatctctgcagtccttgaaggtgaagttgtgtgttactaggctgtgttttgggatgtcagcagtggcctgaagtgagttgtgcaataaatgttaagttgaaacctc

SEQ ID NO: 68681 - DNA, 1839 bp, Homo sapiens
ttttcttggtaatttttgtagaaacaggttcataattgtgttgcccaggctggtcttaaactcccgggctcaggctgtccttcaccctcagcctcccaaagtgctgagattacaggcatgagccaccgtgcctggttcatgaagtctttagcagaaaaattaattgaaattcaggatcagatttttgtttatatacattttgaaggtttatgtgtagtaatgggaagccattgatggggaaaatcacatttcttttatgtgatttttcaaaaggagataatttgctttaatgtgatcaagtttgttccttattaatatgctacttgtcattctctgtaagtccctcttctctcttcactctgcacaaatcctgtttttgaaaatcatattttttctacacatagggagaagagaagtttacctttattgagaaatgtaacaaccctcgttctgtcacattattgatcaaaggaccaaataagcacacactcactcagatcaaagatgcagtgagggacggcttgagggctgtcaaaaatgctattgatgatggctgtgtggttccaggtgctggtgccgtggaagtggcaatggcagaagccctgattaaacataagcccagtgtaaagggcagggcacagcttggagtccaagcatttgctgatgcattgctcattattcccaaggttcttgctcagaactctggttttgaccttcaggaaacattagttaaaattcaagcagaacattcagaatcaggtcagcttgtgggtgtggacctgaacacaggtgagccaatggtggcagcagaagtaggcgtatgggataactattgtgtaaagaaacagcttcttcactcctgcactgtgattgccaccaacattctcttggttgatgagatcatgcgagctggaatgtcttctctgaaaggttgaattgaagcttcctctgtatctgaatcttgaagactgcaaagtgatcctgaggattacagctgtggaatttttgtccaagcttcaaataattttgaaagaaattttcccatatgaaaaaaggagagaacactggcatctgttgaaatttggaagttctgaaattatagtatttttaaaaattgcactgaagtgtatacacataaagcaggtcttttatccagtgaacaggatgttttgctttagcagcagtgacataaaattccatgttagataagcatatgttacttaccttgttattaaatatttcttgaaaagcaaattttaatggtttaattttatgtggacgtatgttaaattatccaactaccctattgttaagcatttggttttaaaatttttatgctaatataaatgctcaagtaatttaaaatattgaaagcatccctgttggtataaatttctgagtaaatgcattggatcagttggactttgaacgcctttgaaatggctttgctaaaatgctcccgccacaaagttgtaggaaatgggaagaggagtcaactagaggcaagggagttgagagagctgcaactgtaaagggcaagaacaggcagaggtaaaaagatgatggaaggtgtggtgactaagggccacggttattgggtgaaatttgagattgtaggccaactgtattttcaagcttctgaacttaggcaaaatattcatcgcaaagtctctagcgtcatatttttctcacccaaattacgtttccacgagattatttatatatagttggtctatctctgcagtccttgaaggtgaagttgtgtgttactaggctgtgttttgggatgtcagcagtggcctgaagtgagttgtgcaataaatgttaagttgaaacctc

SEQ ID NO: 68682 - DNA, 1020 bp, Homo sapiens
  misc_feature (930)..(930): n is a, c, g, or t
  misc_feature (937)..(937): n is a, c, g, or t
  misc_feature (945)..(945): n is a, c, g, or t
accgcaggagccgtgcagccgcggaccaatgagcgggcgccggacgacctgtggcccaatggcggcggcgcgcgggcacgctgggggccggccagacgggccgacttttccagaagacccggatagttcctcccggccacgccgcgccggctctgggcactcagcatcgtttccttttcctccgctggagcagctatggcggcggtgaagaccctgaaccccaaggccgaggtggcccgagcgcaggcggcgctggcggtcaacatcagcgcagcgcggggtctgcaggacgtgctaaggaccaacctggggcccaagggcaccatgaagatgctcgtttctggcgctggagacatcaaacttactaaagacggcaatgtgctgcttcacgaaatgcaaattcaacacccaacagcttccttaatagcaaaggtagcaacagcccaggatgatataactggtgatggtacgacttctaatgtcctaatcattggagagctgctgaaacaggcggatctctacatttctgaaggccttcatcctagaataatcactgaaggatttgaagctgcaaaggaaaaggcccttcagtttttggaagaagtcaaagtaagcagagagatggacagggaaacacttatagatgtggccagaacatctcttcgtactaaagttcatgctgaacttgcagatgtcttaacagaggctgtagtggactccattttggccattaaaaagcaagatgaacctattgatctcttcatgattgagatcatggagatgaaacataaatctgaaactgatacaagcttaatcagagggcttgttttggaccacggagcacggcatcctgatatgaagaaaagggtggaggatgcatacatcctcacttgtaacgtgtcattagagtatgagaaaacagagggatcnggttttnaagatggnagagagaaactcggaatgaaaaatttgtgttggtcacattaatgagagtggggcacaagttgttcagggcctctg

SEQ ID NO: 68683 - DNA, 1145 bp, Homo sapiens
gaacggctagtgagcctccggtaaatcggacgagggaagacccggatagttcctcccggccacgccgcgccggctctgggcactcagcatcgtttccttttcctccgctggagcagctatggcggcggtgaagaccctgaaccccaaggccgaggtggcccgagcgcaggcggcgctggcggtcaacatcagcgcagcgcggggtctgcaggacgtgctaaggaccaacctggggcccaagggcaccatgaagatgctcgtttctggcgctggagacatcaaacttactaaagacggcaatgtgctgcttcacgaaatgcaaattcaacacccaacagcttccttaatagcaaaggtagcaacagcccaggatgatataacaaaagaaagagaacaacaacaaatagaccaaaacaaaagaaaacaacaaaaacaaacaaaacacaacaaaacaaaaaagccaacaaccaagaaaaagacacaaaagaaatagaattcaacagaagaaaaaaagcccaacatggatgataataagtatcaaatagatggcaggatagagatatcaatagaaacagcagaaggtagatatgccaaaaacagactgacagcggaacgaaaaggtagcgaaactagaaactagatcgataagactggaactataaaggccgatgaggaggaactgccgagaagtgaagcccagataaaagaatctaaaaagaaaaccctgaaaaaaagactcggagacataaaaagaggaggcagattataaaaaaaaattagaaagaacaagaggactgaggaggaacgaagtctagaaggacaagtaagagagtcagaagatgtgtagggacgctacgaagagtcggcgagggcggggaccggaagaaaataggacgttcaacacaccggagtaagagacggggtaaaatctcgaggaactcgataccgctaccgacgtatgaagttaagacgctttagaggacgcttgagaacgaatgggaaaagaagcgagaaagacgctatacagtaaaaaaataagcttagattggtttaatttggggacctcatggaaggattcgggtaagggaaacgaatagatcacaaaagcgtcttttaggaaaatactggtagtcacggtgatagag

SEQ ID NO: 68684 - DNA, 390 bp, Homo sapiens
gtaaaatgatttttttaaatttctatttttgttagcagtgctgtttgttagtatttggttattgactagacctgtcccaccttttcacctatcaaggtgggtgtggtcatcagtttaattcaacatgcatcacttccttgaccttttacctttcccttattccaccccagaaaggtgattgataaatgctgaatggctttgtcagtctgttccttcagcttgctcaggcagggtctttctttctcctctgaggagtcttaaggagacgtgttctctattaagttcacttaatattgccgttgtgtggccccacgtcgactccctatggtgctctactctagaggcagtgtggttggaggaatggactctaaactggagatcaagaaacca

SEQ ID NO: 68685 - DNA, 430 bp, Homo sapiens
ggttgtagcagcggtggctgctcccagcagcaccttctctgttcgtgccaagcagacctacccatactgtgcactgcccaggtacgtctagaatccaacccctacctcacctgggggtacttggcccctaagccatcaggggcccctggaaacaggctcagggagtgtcctggaagaggcactccctcagccctgagtgtgggggtattcctggggctcctgacagtggtgtggaagcaggagactcccctgtttccaaccaggcataccacagcaccccagcctctcggcagtgtgccagatccaacactcaggatatgaacattttcccagctgcctccaacagaccgaaacttgtcactggggagctgaaagggtcacactcctgggcaaggcagccctatgtgtattcactcactggccccttcgc

SEQ ID NO: 68686 - DNA, 1163 bp, Homo sapiens
acccaggagaagattgtggctggctatgctagtcgcttcatcgtgatcgctgatttcaggaaagattcgaagaatctcggggatcagtggcacaagggaatccccatcgaggtcatcccaatggcctatgtcccagtgagccgagctgtgagccagaagtttgggggcgtggttgaacttcgaatggctgtcaacaaggctggtcctgtggtgacagataatgggaattttatcttggactggaagtttgaccgggtacacaaatggagtgaagtgaatacagctatcaaaatgatcccaggctgtggtggacacaggcctattcatcaacatggctgagagagtctactttgggatgcaggatggctcagtgaacatgagggagaagcctttctgttgaccctgcaaggagcagagtgtgttcaccttgagtctccagcccacagccaaggtggacgtacctctccaggagcctttgccttaatgtatctctgcctggacaacttgtggtgggggggtggggggaagagtgggagggggagttaaatccagtcttatgaagtattgttattaaatgtctttttaaaaagagaaatataaacatatatttttactattaaaatattcagttttttaaatgaagtagaacttgagttcatgttttatatgaaatatttaccaaaaaaaaaaatgaggtaaactgtatttaaaacctttgacttgagtctgctggtaaagcttgttacttgtctgctaccctctgatttgtttttagttagttttattgtgagcacacatagtacctagttacatcttaagatcaggtttataaaactgtggagtggagcggtatggtatggaatgacttggaatgtaagctgtcagggagaaaatgttgttacacttttgctaagatctgggggtttcttcatattcctgctgttggaagcagttgaccagaaatgcttgccagtactgccaaagcactgctgtgaaatgtgaagtactttgttttttttatttttaatgattttctttttgttattaatatttttctctgttcctttgttattacttgcatggtttggcgtcagaagtcctacctctttatattgtttgcaggtttaaataaaacagtgtggtgccaaaaaaaaaaggaattc

SEQ ID NO: 68687 - DNA, 491 bp, Homo sapiens
ggcatttaggttgttttcaggcttctgctattgaagacacaagtgtgtatacttgtttatattgctttgcagaaatatgcagaaacaactacatagcatttactttttaagtggaatacagggtcaaagttatgtttataaatttaattgagataagcacattgctctcaaaagaagtaaacccatttacgtttctaccaagctgatatattcacatcctacaagtatttattgcatgatatgtattaggtactatttcagatgctagggaaatgtcagctatcaaaacagtcaaaaatttcttcctcctagggacggtgttataatggggagacagacaatgagtaaatacttaaaaaatgtatactatcagatagtgataagtgctatggaaaagaataaagtaagggaaaactggtatagagagggctagttggggttgtaattttaaatcagcttggtggggaaaggtctcactgaatgccatttga

SEQ ID NO: 68688 - DNA, 282 bp, Homo sapiens
acataatcagcaaagttactatcattgtcagtccaattagtctatacctataatacataaggtatctgaaagattacttctcattcatttattcacaatgccaggaactgtgccagatactgggtatacaatagcaaacaagacagacaaggaatcaaaccgagcttacatcccctcttctaaagacagatatttacatcctaatagaaatttccctaccaaatgtatttatacataaaacccagttctgttttaatgttagcacatgagatctagctgatg

SEQ ID NO: 68689 - DNA, 328 bp, Homo sapiens
aatctcctctaatattttatggagtttgactctcttcatcaacaccaggcccatggaataggagaacaatgtcaaggacagcagtgacactggtggcggcattttgccccaagctctgttctgagcactgtgcacctgtgaccccacttcattctcctatggcctgcccaatgctggacagccagctggctgattcaggactgtgccctgcagtctgggcagaagccttcacccactacttttgaggtgacacataacgcaggacaataccacacactggtccattggatcagtaaatgaacatattgagtccaagctccttttgtag

SEQ ID NO: 68690 - DNA, 310 bp, Homo sapiens
gtcctgtgggtgcctgctcatgtcccatgcgtggattgccagctggcaatccacgcatggaccagggcttcgccagcgggccagcaacaaagtgcaaggtgagagcatccaggaaggggcacttcctctgggctacacatggagggacttggctgtctgactgtagtatctctattcctctgttttctgaatgtttggtggtggtgggtgttgtttcctgctgccccaccccactgcccctgtaaggacaggttctcgctatattgcccaggccagtcttgaacacctgacttcaagcaatcctcttgcc

SEQ ID NO: 68691 - DNA, 1843 bp, Homo sapiens
cggggacttagtctcctccctgggtttggacactggcatcctgctttatgtgtgacaccactgcacccctctgagcctcggtttccccatctgtaaaatagaagcgatctaccctcacagggtcatatgactgctcctctccaccccacactggcccggggcgggctgggcgcgggcccctgcgggtgttgcaacgcccggccagaaagtgggcatcagctgttccgcctggcccacgtgacccgccgagcataaatgtgaccggccgcggctccggcagtcaacgcctgcctcctctcgagcgtcctcagcgcagccgccgcccgcggagccagcacgaacgagcccagcaccggccggatggagcgtccgcaacccgacagcatgccccaggatttgtcagaggccctgaaggaggccaccaaggaggtgcacacccaggcagagaatgctgagttcatgaggaactttcagaagggccaggtgacccgagacggcttcaagctggtgatggcctccctgtaccacatctatgtggccctggaggaggagattgagcgcaacaaggagagcccagtcttcgcccctgtctacttcccagaagagctgcaccgcaaggctgccctggagcaggacctggccttctggtacgggccccgctggcaggaggtcatcccctacacaccagccatgcagcgctatgtgaagcggctccacgaggtggggcgcacagagcccgagctgctggtggcccacgcctacacccgctacctgggtgacctgtctgggggccaggtgctcaaaaagattgcccagaaagccctggacctgcccagctctggcgagggcctggccttcttcaccttccccaacattgccagtgccaccaagttcaagcagctctaccgctcccgcatgaactccctggagatgactcccgcagtcaggcagagggtgatagaagaggccaagactgcgttcctgctcaacatccagctctttgaggagttgcaggagctgctgacccatgacaccaaggaccagagcccctcacgggcaccagggcttcgccagcgggccagcaacaaagtgcaagattctgcccccgtggagactcccagagggaagcccccactcaacacccgctcccaggctccgcttctccgatgggtccttacactcagctttctggtggcgacagttgctgtagggctttatgccatgtgaatgcaggcatgctggctcccagggccatgaactttgtccggtggaaggccttctttctagagagggaattctcttggctggcttccttaccgtgggcactgaaggctttcagggcctccagccctctcactgtgtccctctctctggaaaggaggaaggagcctatggcatcttccccaacgaaaagcacatccaggcaatggcctaaacttcagagggggcgaagggatcagccctgcccttcagcatcctcagttcctgcagcagagcctggaagacaccctaatgtggcagctgtctcaaacctccaaaagccctgagtttcaagtatccttgttgacacggccatgaccactttccccgtgggccatggcaatttttacacaaacctgaaaagatgttgtgtcttgtgtttttgtcttatttttgttggagccactctgttcctggctcagcctcaaatgcagtatttttgttgtgttctgttgtttttatagcagggttggggtggtttttgagccatgcgtgggtggggagggaggtgtttaacggcactgtggccttggtctaacttttgtgtgaaataataaacaacattgtctgatagtagcttgaa

SEQ ID NO: 68692 - DNA, 2162 bp, Homo sapiens
cggggacttagtctcctccctgggtttggacactggcatcctgctttatgtgtgacaccactgcacccctctgagcctcggtttccccatctgtaaaatagaagcgatctaccctcacagggtcatatgactgctcctctccaccccacactggcccggggcgggctgggcgcgggcccctgcgggtgttgcaacgcccggccagaaagtgggcatcagctgttccgcctggcccacgtgacccgccgagcataaatgtgaccggccgcggctccggcagtcaacgcctgcctcctctcgagcgtcctcagcgcagccgccgcccgcggagccagcacgaacgagcccagcaccggccggatggagcgtccgcaacccgacagcatgccccaggatttgtcagaggccctgaaggaggccaccaaggaggtgcacacccaggcagagaatgctgagttcatgaggaactttcagaagggccaggtgacccgagacggcttcaagctggtgatggcctccctgtaccacatctatgtggccctggaggaggagattgagcgcaacaaggagagcccagtcttcgcccctgtctacttcccagaagagctgcaccgcaaggctgccctggagcaggacctggccttctggtacgggccccgctggcaggaggtcatcccctacacaccagccatgcagcgctatgtgaagcggctccacgaggtggggcgcacagagcccgagctgctggtggcccacgcctacacccgctacctgggtgacctgtctgggggccaggtgctcaaaaagattgcccagaaagccctggacctgcccagctctggcgagggcctggccttcttcaccttccccaacattgccagtgccaccaagttcaagcagctctaccgctcccgcatgaactccctggagatgactcccgcagtcaggcagagggtgatagaagaggccaagactgcgttcctgctcaacatccagctctttgaggagttgcaggagctgctgacccatgacaccaaggaccagagcccctcacgggcaccagggcttcgccagcgggccagcaacaaagtgcaagattctgcccccgtggagactcccagagggaagcccccactcaacacccgctcccaggctccgcttctccgatgggtccttacactcagctttctggtggcgacagttgctgtagggctttatgccatgtgaatgcaggcatgctggctcccagggccatgaactttgtccggtggaaggccttctttctagagagggaattctcttggctggcttccttaccgtgggcactgaaggctttcagggcctccagccctctcactgtgtccctctctctggaaaggaggaaggagcctatggcatcttccccaacgaaaagcacatccaggcaatggcctaaacttcagagggggcgaagggatcagccctgcccttcagcatcctcagttcctgcagcagagcctggaagacaccctaatgtggcagctgtctcaaacctccaaaagccctgagtttcaagtatccttgttgacacggccatgaccactttccccgtgggccatggcaatttttacacaaacctgaaaagatgttgtgtcttgtgtttttgtcttatttttgttggagccactctgttcctggctcagcctcaaatgcagtatttttgttgtgttctgttgtttttatagcagggttggggtggtttttgagccatgcgtgggtggggagggaggtgtttaacggcactgtggccttggtctaacttttgtgtgaaataataaacaacattgtctgatagtagcttgaaaaaaaaaaaaaaaaaaaaaaaaaaaaaaaaaaaaaaaaaaaaaaaaaaacaaaaaaaaaaaaaaaaaaaaaaaaaaaaaaaaacaagggggggcggcgcgcagaagcccccccggacgtacgaacaagaatactaacaacccccccctacttcacagcaaggaacaggccacaaaagaggatggtgtattatctacacacgccgcagacacaggaggcggcggggcagaccaccacgctctgtgcgcgcgcaaagatagactagcaacgaagagaatagtagggacgaagagacagaggtgtctccatgacacgcgcgg

SEQ ID NO: 68693 - DNA, 1403 bp, Homo sapiens
aagcaattctctgcctcagcctcccgagtagctgggattactggcactcgcaaccatacccggctaattttttgtatttttagtagagacggggtttcaccatattggccaggctggtcttgaactcctgacctcgtgatccacctgccttggcctcccaaagtgctgggattacaggcgtgagccactgcgcccggccctatcacattttaataaccagggatgggactgaacttgaattttgacctcagagctcctgctttctagctcctgccccatcatcaccatgcttagcaaacgtgtgagtttgagaggaagatttacagctcagacctaattgctggcaaagtttaaggagaggacagggagcaggcagaagtctgaaaaccacgcctgggcccaagaatgttttcacaatgtggcctggctgcacagggaagaacagacagcttgaagaagtagtgagctgcccgtctttgaaggtattcaagcagtggctagagggacacctgtctgtggtcttgcagaatcctggcgttgggcagtgactgtaccacagaccctgaggccgctctgctttgctttcctatgacatcagacaccctgatgcacgcccacctgttaatgaccttgccccattttctctttcagattctattctgcccccgtggagactcccagagggaagcccccactcaacacccgctcccaggctccgcttctccgatgggtccttacactcagctttctggtggcgacagttgctgtagggctttatgccatgtgaatgcaggcatgctggctcccagggccatgaactttgtccggtggaaggccttctttctagagagggaattctcttggctggcttccttaccgtgggcactgaaggctttcagggcctccagccctctcactgtgtccctctctctggaaaggaggaaggagcctatggcatcttccccaacgaaaagcacatccaggcaatggcctaaacttcagagggggcgaagggatcagccctgcccttcagcatcctcagttcctgcagcagagcctggaagacaccctaatgtggcagctgtctcaaacctccaaaagccctgagtttcaagtatccttgttgacacggccatgaccactttccccgtgggccatggcaatttttacacaaacctgaaaagatgttgtgtcttgtgtttttgtcttatttttgttggagccactctgttcctggctcagcctcaaatgcagtatttttgttgtgttctgttgtttttatagcagggttggggtggtttttgagccatgcgtgggtggggagggaggtgtttaacggcactgtggccttggtctaacttttgtgtgaaataataaacaacattgtctgatagtagcttgaa

SEQ ID NO: 68694 - DNA, 1024 bp, Homo sapiens
  misc_feature (965)..(965): n is a, c, g, or t
  misc_feature (975)..(975): n is a, c, g, or t
  misc_feature (991)..(991): n is a, c, g, or t
  misc_feature (1018)..(1018): n is a, c, g, or t
cggggacttagtctcctccctgggtttggacactggcatcctgctttatgtgtgacaccactgcacccctctgagcctcggtttccccatctgtaaaatagaagcgatctaccctcacagggtcatatgactgctcctctccaccccacactggcccggggcgggctgggcgcgggcccctgcgggtgttgcaacgcccggccagaaagtgggcatcagctgttccgcctggcccacgtgacccgccgagcataaatgtgaccggccgcggctccggcagtcaacgcctgcctcctctcgagcgtcctcagcgcagccgccgcccgcggagccagcacgaacgagcccagcaccggccggatggagcgtccgcaacccgacagcatgccccaggatttgtcagaggccctgaaggaggccaccaaggaggtgcacacccaggcagagaatgctgagttcatgaggaactttcagaagggccaggtgacccgagacggcttcaagctggtgatggcctccctgtaccacatctatgtggccctggaggaggagattgagcgcaacaaggagagcccagtcttcgcccctgtctacttcccagaagagctgcaccgcaaggctgccctggagcaggacctggccttctggtacgggccccgctggcaggaggtcatcccctacacaccagccatgcagcgctatgtgaagcggctccacgaggtggggcgcacagagcccgagctgctggtggcccacgcctacacccgctacctgggtgacctgtctgggggccaggtgctcaaaaagattgcccagaaagccctggacctgcccagctctggcgagggcctggccttcttcaccttccccaacattgccagtgccaccaagttcaagcagctctaccgctcccgcatgaactcccctgggaaaaatgaactccccgccaattccagggccaaaanggttgattanaaaaaaaggccccaanaaattgcgtttccctggcttccaacantcccaa

SEQ ID NO: 68695 - DNA, 779 bp, Homo sapiens
  misc_feature (20)..(20): n is a, c, g, or t
  misc_feature (28)..(29): n is a, c, g, or t
cgcgtgacgcgtgggtcganccacgcgnncggattctgcccccgtggagactcccagagggaagcccccactcaacacccgctcccaggctccgcttctccgatgggtccttacactcagctttctggtggcgacagttgctgtagggctttatgccatgtgaatgcaggcatgctggctcccagggccatgaactttgtccggtggaaggccttctttctagagagggaattctcttggctggcttccttaccgtgggcactgaaggctttcagggcctccagccctctcactgtgtccctctctctggaaaggaggaaggagcctatggcatcttccccaacgaaaagcacatccaggcaatggcctaaacttcagagggggcgaagggatcagccctgcccttcagcatcctcagttcctgcagcagagcctggaagacaccctaatgtggcagctgtctcaaacctccaaaagccctgagtttcaagtatccttgttgacacggccatgaccactttccccgtgggccatggcaatttttacacaaacctgaaaagatgttgtgtcttgtgtttttgtcttatttttgttggagccactctgttcctggctcagcctcaaatgcagtatttttgttgtgttctgttgtttttatagcagggttggggtggtttttgagccatgcgtgggtggggagggaggtgtttaacggcactgtggccttggtctaacttttgtgtgaaataataaacaacattgtctgatagtagcttgaa

SEQ ID NO: 68696 - DNA, 1362 bp, Homo sapiens
tatactaaaattggaacgatacagagaagattagcatggcccctgcgcaaggatgacacgcaaattcgtgaagcgttccatatttttagagcccagtcttcgcccctgtctacttcccagaagagctgcaccgcaaggctgccctggagcaggacctggccttctggtacgggccccgctggcaggaggtcatcccctacacaccagccatgcagcgctatgtgaagcggctccacgaggtggggcgcacagagcccgagctgctggtggcccacgcctacacccgctacctgggtgacctgtctgggggccaggtgctcaaaaagattgcccagaaagccctggacctgcccagctctggcgagggcctggccttcttcaccttccccaacattgccagtgccaccaagttcaagcagctctaccgctcccgcatgaactccctggagatgactcccgcagtcaggcagagggtgatagaagaggccaagactgcgttcctgctcaacatccagctctttgaggagttgcaggagctgctgacccatgacaccaaggaccagagcccctcacgggcaccagggcttcgccagcgggccagcaacaaagtgcaagattctgcccccgtggagactcccagagggaagcccccactcaacacccgctcccaggctccgcttctccgatgggtccttacactcagctttctggtggcgacagttgctgtagggctttatgccatgtgaatgcaggcatgctggctcccagggccatgaactttgtccggtggaaggccttctttctagagagggaattctcttggctggcttccttaccgtgggcactgaaggctttcagggcctccagccctctcactgtgtccctctctctggaaaggaggaaggagcctatggcatcttccccaacgaaaagcacatccaggcaatggcctaaacttcagagggggcgaagggatcagccctgcccttcagcatcctcagttcctgcagcagagcctggaagacaccctaatgtggcagctgtctcaaacctccaaaagccctgagtttcaagtatccttgttgacacggccatgaccactttccccgtgggccatggcaatttttacacaaacctgaaaagatgttgtgtcttgtgtttttgtcttatttttgttggagccactctgttcctggctcagcctcaaatgcagtatttttgttgtgttctgttgtttttatagcagggttggggtggtttttgagccatgcgtgggtggggagggaggtgtttaacggcactgtggccttggtctaacttttgtgtgaaataataaacaacattgtctgatagtagcttgaa

SEQ ID NO: 68697 - DNA, 690 bp, Homo sapiens
ggctgatcggccggtcctatgtctggggctagatttcaaaacccacgtaatgaaaaagtcagtttacaagcctaattttgttgttttttttttatatcaattaacggcaggaataaaaagattcgaaatgcacagttagcacagtataacttcattttagttgttggtgaaaaagagaaaatcagtggcactgttaatatccgcacaagagacaataaggtccacggggaacgcaccatttctgaaactatcgagcggctacagcagctcaaagagttccgcagcaaacaggcagaagaagaattttaatgaaaaaattacccagattggctccatggaaaaggaggaacagcgtttccgtaaaattgactttgtactctgaaaacgtcaatttatattgaacttggaggagtttggcaaagtctgaataggtcaacctgcaggcgtaactatttttgacctagtcagtttttaaacaatgtgcatttgaaggagttaattaaaagagagccaataaaatgattttactcattcagtatctgagtactggaagtgaaacatgaggaatgctttagtgtaatgtgggagaacttttttgtaaatttaatgcaattgaaaaagttttcaaattcaattaagataactagaattggattatggtgtaaaaataaaaaaaaaatttattcacat

SEQ ID NO: 68698 - DNA, 499 bp, Homo sapiens
  misc_feature (24)..(24): n is a, c, g, or t
aggctgtctagaggatcccgtcanttaggtccacggggaacgcaccatttctgaaactatcgagcggctacagcagctcaaagagttccgcagcaaacaggcagaagaagaattttaatgaaaaaattacccagattggctccatggaaaaggaggaacagcgtttccgtaaaattgactttgtactctgaaaacgtcaatttatattgaacttggaggagtttggcaaagtctgaataggtcaacctgcaggcgtaactatttttgacctagtcagtttttaaacaatgtgcatttgaaggagttaattaaaagagagccaataaaatgattttactcattcagtatctgagtactggaagtgaaacatgaggaatgctttagtgtaatgtgggagaacttttttgtaaatttaatgcaattgaaaaagttttcaaattcaattaagataactagaattggattatggtgtaaaaataaaaaaaaaatttattcacat

SEQ ID NO: 68699 - DNA, 1262 bp, Homo sapiens
  misc_feature (24)..(24): n is a, c, g, or t
aggctgtctagaggatcccgtcanttaggtccacggggaacgcaccatttctgaaactatcgagcggctacagcagctcaaagagttccgcagcaaacaggcagaagaagaattttaatgaaaaaattacccagattggctccatggaaaaggaggaacagcgtttccgtaaaattgactttgtactctgaaaacgtcaatttatattgaacttggaggagtttggcaaagtctgaataggtcaacctgcaggcgtaactatttttgacctagtcagtttttaaacaatgtgcatttgaaggagttaattaaaagagagccaataaaatgattttactcattcagtatctgagtactggaagtgaaacatgaggaatgctttagtgtaatgtgggagaacttttttgtaaatttaatgcaattgaaaaagttttcaaattcaattaagataactagaattggattatggtgtaaaaataaaaaaaaaatttattcacataagtttcaagactgctctgtccctcacatgtacacatacatgcctgagacagataatgtggttcagtatttatctttacagttttacagcaaatataatgcagggtggatggagacggggtaggtctgcagcatcataatgctattcataaactgggtgtgagctgggtgctggcttctcagaggataaacacttttgggagtgtcatttttacttaatgttggatggacaccttttcaaacaaaaactaccatggatctattacagagtagatttgcacaaatgtttaagataaaacgtgaatcttcagagaaatatctgtttatggcagactgttctggaccatagaatcacttggtttacaaattccctattttctcataagggatcattttcaaaatcttctaccaataaatggtgattgaaaggacagcacaaagtaaataatttcttatgtggataaatactaattcctccttgttagaatgatattttaaaagtaacatcttttttttaattttttttgagacaagatcctttgtcccccaggctggagtgtggtgccatgatctcggctcactgcaacctcagcctcccaagtaggtgggactaaagacatgtgccaccatgcctggctgatgtttgtattttctatagagatggtttcatcatgttgcccaggctggtatcaaactcctggataaaagagacccacctgcctcagtctcccaaagtgctgggattacaggtgtgagccaccacg

SEQ ID NO: 68700 - DNA, 3634 bp, Homo sapiens
agaccaaggtcagcggagagtaggcatgtagcttctgcagttgctcctcctcaccctccgcgacctgatttcctagaagggctctgtcacccgaaaagattttccactggcttagaggagggagggcccgccttcccccgttatccattggctgctcgttccgccgcaagttgggggcggggttagggcgcctttcgattgcatcagctggtccagccgaggccaagtcccgggcgctagcccacctcccacccgcctcttggctcctctcctctaggccgtcgctttcgggttctctcatcgcttcgtcgttcgccaatgtttgaggagaaggccagcagtccttcagggaagatgggaggcgaggagaagccgattggtgctggtgaagagaagcaaaaggaaggaggcaaaaagaagaacaaagaaggatctggagatggaggtcgagctgagttgaatccttggcctgaatatatttacacacgtcttgagatgtataatatactaaaagcagaacatgattccattctggcagaaaaggcagaaaaagatagcaagccaattaaagtcactttgcctgatggtaaacaggttgatgcggaatcttggaaaactacaccatatcaaattgcctgtggaattagtcaaggcctggccgacaacaccgttattgctaaagtaaataatgttgtgtgggacctggaccgccctctggaagaagattgtaccttggagcttctcaagtttgaggatgaggaagctcaggcagtgtattggcactctagtgctcacataatgggtgaagccatggaaagagtctatggtggatgtttatgctacggtccgccaatagaaaatggattctattatgacatgtacctcgaagaagggggtgtgtctagcaatgatttctcttctctggaggctttgtgtaagaaaatcattaaagaaaaacaagcttttgaaagactggaagttaagaaagaaactttactggcaatgtttaagtacaacaagttcaaatgccggatattgaatgaaaaggtgaatactccaactaccacagtctatagatgtggccctttgatagatctctgccggggtcctcatgttagacacacgggcaaaattaaggctttaaaaatacacaaaaattcctccacgtactgggaaggcaaagcagatatggagactctccagagaatttatggcatttcattcccagatcctaaaatgttgaaagagtgggagaagttccaagaggaagctaaaaaccgagatcataggaaaattggcagggaccaagaactatatttctttcatgaactcagccctggaagttgcttttttctgccaaaaggagcctacatttataatgcacttattgaattcattaggagcgaatataggaaaagaggattccaggaggtagtcaccccaaacatcttcaacagccgactctggatgacctcgggccactggcagcactacagcgagaacatgttctcctttgaggtggagaaggagctgtttgccctgaaacccatgaactgcccaggacactgccttatgtttgatcatcggccaaggtcctggcgagaactgcctctgcggctagctgattttggggtacttcataggaacgagctgtctggagcactcacaggactcacccgggtacgaagattccaacaggatgatgctcacatattctgtgccatggagcagattgaagatgaaataaaaggttgtttggattttctacgtacggtatatagcgtatttggattttcttttaaactaaacctttctactcgcccggaaaaattccttggagatatcgaagtatgggatcaagctgagaaacaacttgaaaacagtctgaatgaatttggtgaaaagtgggagttaaactctggagatggagctttctatggcccaaagattgacatacagattaaagatgcgattgggcggtaccaccagtgtgcaaccatccagctggatttccagttgcccatcagatttaatcttacttatgtaagccatgatggtgatgataagaaaaggccagtgattgttcatcgagccatcttgggatcagtggaaagaatgattgctatcctcacagaaaactatgggggcaaatggcccttttggctgtcccctcgccaggtaatggtagttccagtgggaccaacctgtgatgaatatgcccaaaaggtacgacaacaattccacgatgccaaattcatggcagacattgatctggatccaggctgtacattgaataaaaagattcgaaatgcacagttagcacagtataacttcattttagttgttggtgaaaaagagaaaatcagtggcactgttaatatccgcacaagagacaataaggtccacggggaacgcaccatttctgaaactatcgagcggctacagcagctcaaagagttccgcagcaaacaggcagaagaagaattttaatgaaaaaattacccagattggctccatggaaaaggaggaacagcgtttccgtaaaattgactttgtactctgaaaacgtcaatttatattgaacttggaggagtttggcaaagtctgaataggtcaacctgcaggcgtaactatttttgacctagtcagtttttaaacaatgtgcatttgaaggagttaattaaaagagagccaataaaatgattttactcattcagtatctgagtactggaagtgaaacatgaggaatgctttagtgtaatgtgggagaacttttttgtaaatttaatgcaattgaaaaagttttcaaattcaattaagataactagaattggattatggtgtaaaaataaaaaaaaaatttattcacataagtttcaagactgctctgtccctcacatgtacacatacatgcctgagacagataatgtggttcagtatttatctttacagttttacagcaaatataatgcagggtggatggagacggggtaggtctgcagcatcataatgctattcataaactgggtgtgagctgggtgctggcttctcagaggataaacacttttgggagtgtcatttttacttaatgttggatggacaccttttcaaacaaaaactaccatggatctattacagagtagatttgcacaaatgtttaagataaaacgtgaatcttcagagaaatatctgtttatggcagactgttctggaccatagaatcacttggtttacaaattccctattttctcataagggatcattttcaaaatcttctaccaataaatggtgattgaaaggacagcacaaagtaaataatttcttatgtggataaatactaattcctccttgttagaatgatattttaaaagtaacatcttttttttaattttttttgagacaagatcctttgtcccccaggctggagtgtggtgccatgatctcggctcactgcaacctcagcctcccaagtaggtgggactaaagacatgtgccaccatgcctggctgatgtttgtattttctatagagatggtttcatcatgttgcccaggctggtatcaaactcctggataaaagagacccacctgcctcagtctcccaaagtgctgggattacaggtgtgagccaccacg

SEQ ID NO: 68701 - DNA, 2793 bp, Homo sapiens
agaccaaggtcagcggagagtaggcatgtagcttctgcagttgctcctcctcaccctccgcgacctgatttcctagaagggctctgtcacccgaaaagattttccactggcttagaggagggagggcccgccttcccccgttatccattggctgctcgttccgccgcaagttgggggcggggttagggcgcctttcgattgcatcagctggtccagccgaggccaagtcccgggcgctagcccacctcccacccgcctcttggctcctctcctctaggccgtcgctttcgggttctctcatcgcttcgtcgttcgccaatgtttgaggagaaggccagcagtccttcagggaagatgggaggcgaggagaagccgattggtgctggtgaagagaagcaaaaggaaggaggcaaaaagaagaacaaagaaggatctggagatggaggtcgagctgagttgaatccttggcctgaatatatttacacacgtcttgagatgtataatatactaaaagcagaacatgattccattctggcagaaaaggcagaaaaagatagcaagccaattaaagtcactttgcctgatggtaaacaggttgatgcggaatcttggaaaactacaccatatcaaattgcctgtggaattagtcaaggcctggccgacaacaccgttattgctaaagtaaataatgttgtgtgggacctggaccgccctctggaagaagattgtaccttggagcttctcaagtttgaggatgaggaagctcaggcagtgtattggcactctagtgctcacataatgggtgaagccatggaaagagtctatggtggatgtttatgctacggtccgccaatagaaaatggattctattatgacatgtacctcgaagaagggggtgtgtctagcaatgatttctcttctctggaggctttgtgtaagaaaatcattaaagaaaaacaagcttttgaaagactggaagttaagaaagaaactttactggcaatgtttaagtacaacaagttcaaatgccggatattgaatgaaaaggtgaatactccaactaccacagtctatagatgtggccctttgatagatctctgccggggtcctcatgttagacacacgggcaaaattaaggctttaaaaatacacaaaaattcctccacgtactgggaaggcaaagcagatatggagactctccagagaatttatggcatttcattcccagatcctaaaatgttgaaagagtgggagaagttccaagaggaagctaaaaaccgagatcataggaaaattggcagggaccaagaactatatttctttcatgaactcagccctggaagttgcttttttctgccaaaaggagcctacatttataatgcacttattgaattcattaggagcgaatataggaaaagaggattccaggaggtagtcaccccaaacatcttcaacagccgactctggatgacctcgggccactggcagcactacagcgagaacatgttctcctttgaggtggagaaggagctgtttgccctgaaacccatgaactgcccaggacactgccttatgtttgatcatcggccaaggtcctggcgagaactgcctctgcggctagctgattttggggtacttcataggaacgagctgtctggagcactcacaggactcacccgggtacgaagattccaacaggatgatgctcacatattctgtgccatggagcagattgaagatgaaataaaaggttgtttggattttctacgtacggtatatagcgtatttggattttcttttaaactaaacctttctactcgcccggaaaaattccttggagatatcgaagtatgggatcaagctgagaaacaacttgaaaacagtctgaatgaatttggtgaaaagtgggagttaaactctggagatggagctttctatggcccaaagattgacatacagattaaagatgcgattgggcggtaccaccagtgtgcaaccatccagctggatttccagttgcccatcagatttaatcttacttatgtaagccatgatggtgatgataagaaaaggccagtgattgttcatcgagccatcttgggatcagtggaaagaatgattgctatcctcacagaaaactatgggggcaaatggcccttttggctgtcccctcgccaggtaatggtagttccagtgggaccaacctgtgatgaatatgcccaaaaggtacgacaacaattccacgatgccaaattcatggcagacattgatctggatccaggctgtacattgaataaaaagattcgaaatgcacagttagcacagtataacttcattttagttgttggtgaaaaagagaaaatcagtggcactgttaatatccgcacaagagacaataaggtccacggggaacgcaccatttctgaaactatcgagcggctacagcagctcaaagagttccgcagcaaacaggcagaagaagaattttaatgaaaaaattacccagattggctccatggaaaaggaggaacagcgtttccgtaaaattgactttgtactctgaaaacgtcaatttatattgaacttggaggagtttggcaaagtctgaataggtcaacctgcaggcgtaactatttttgacctagtcagtttttaaacaatgtgcatttgaaggagttaattaaaagagagccaataaaatgattttactcattcagtatctgagtactggaagtgaaacatgaggaatgctttagtgtaatgttagagatacgggatcctctagatcacctc

SEQ ID NO: 68702 - DNA, 675 bp, Homo sapiens
atctgacaggtaccgtatctctaacattaggtacgacaacaattccacgatgccaaattcatggcagacattgatctggatccaggctgtacattgaataaaaagattcgaaatgcacagttagcacagtataacttcattttagttgttggtgaaaaagagaaaatcagtggcactgttaatatccgcacaagagacaataaggtccacggggaacgcaccatttctgaaactatcgagcggctacagcagctcaaagagttccgcagcaaacaggcagaagaagaattttaatgaaaaaattacccagattggctccatggaaaaggaggaacagcgtttccgtaaaattgactttgtactctgaaaacgtcaatttatattgaacttggaggagtttggcaaagtctgaataggtcaacctgcaggcgtaactatttttgacctagtcagtttttaaacaatgtgcatttgaaggagttaattaaaagagagccaataaaatgattttactcattcagtatctgagtactggaagtgaaacatgaggaatgctttagtgtaatgtgggagaacttttttgtaaatttaatgcaattgaaaaagttttcaaattcaattaagataactagaattggattatggtgtaaaaataaaaaaaaaatttattcacat

SEQ ID NO: 68703 - DNA, 1676 bp, Homo sapiens
agaccaaggtcagcggagagtaggcatgtagcttctgcagttgctcctcctcaccctccgcgacctgatttcctagaagggctctgtcacccgaaaagattttccactggcttagaggagggagggcccgccttcccccgttatccattggctgctcgttccgccgcaagttgggggcggggttagggcgcctttcgattgcatcagctggtccagccgaggccaagtcccgggcgctagcccacctcccacccgcctcttggctcctctcctctaggccgtcgctttcgggttctctcatcgcttcgtcgttcgccaatgtttgaggagaaggccagcagtccttcagggaagatgggaggcgaggagaagccgattggtgctggtgaagagaagcaaaaggaaggaggcaaaaagaagaacaaagaaggatctggagatggaggtcgagctgagttgaatccttggcctgaatatatttacacacgtcttgagatgtataatatactaaaagcagaacatgattccattctggcagaaaaggcagaaaaagatagcaagccaattaaagtcactttgcctgatggtaaacaggttgatgcggaatcttggaaaactacaccatatcaaattgcctgtggaattagtcaaggcctggccgacaacaccgttattgctaaagtaaataatgttgtgtgggacctggaccgccctctggaagaagattgtaccttggagcttctcaagtttgaggatgaggaagctcaggcagtgtattggcactctagtgctcacataatgggtgaagccatggaaagagtctatggtggatgtttatgctacggtccgccaatagaaaatggattctattatgacatgtacctcgaagaagggggtgtgtctagcaatgatttctcttctctggaggctttgtgtaagaaaatcattaaagaaaaacaagcttttgaaagactggaagttaagaaagaaactttactggcaatgtttaagtacaacaagttcaaatgccggatattgaatgaaaaggtgaatactccaactaccacagtctatagatgtggccctttgatagatctctgccggggtcctcatgttagacacacgggcaaaattaaggctttaaaaatacacaaaaattcctccacgtactgggaaggcaaagcagatatggagactctccagagaatttatggcatttcattcccagatcctaaaatgttgaaagagtgggagaagttccaagaggaagctaaaaaccgagatcataggaaaattggcagggaccaagaactatatttctttcatgaactcagccctggaagttgcttttttctgccaaaaggagcctacatttataatgcacttattgaattcattaggagcgaatataggaaaagaggattccaggaggtagtcaccccaaacatcttcaacagccgactctggatgacctcgggccactggcagcactacagcgagaacatgttctcctttgaggtggagaaggagctgtttgccctgaaacccatgaactgcccaggacactggtattcggcagctttgaatttctactgaagattttcacatgctacaattcatcctgggttcttccctcctttaacaacattttcattaaaaacaaattatgtgatcag

SEQ ID NO: 68704 - DNA, 1553 bp, Homo sapiens
agaccaaggtcagcggagagtaggcatgtagcttctgcagttgctcctcctcaccctccgcgacctgatttcctagaagggctctgtcacccgaaaagattttccactggcttagaggagggagggcccgccttcccccgttatccattggctgctcgttccgccgcaagttgggggcggggttagggcgcctttcgattgcatcagctggtccagccgaggccaagtcccgggcgctagcccacctcccacccgcctcttggctcctctcctctaggccgtcgctttcgggttctctcatcgcttcgtcgttcgccaatgtttgaggagaaggccagcagtccttcagggaagatgggaggcgaggagaagccgattggtgctggtgaagagaagcaaaaggaaggaggcaaaaagaagaacaaagaaggatctggagatggaggtcgagctgagggcaacttgcaggttttattcatctctgcaatcacagagactgacacagagggtatctgctgaatgaatgttgaagagattttgacacgaaattctaattgggacattgcaagtggctatgatgataaactgcagttaagatacagagggtggtgcagttgaatccttggcctgaatatatttacacacgtcttgagatgtataatatactaaaagcagaacatgattccattctggcagaaaaggcagaaaaagatagcaagccaattaaagtcactttgcctgatggtaaacaggttgatgcggaatcttggaaaactacaccatatcaaattgcctgtggaattagtcaaggcctggccgacaacaccgttattgctaaagtaaataatgttgtgtgggacctggaccgccctctggaagaagattgtaccttggagcttctcaagtttgaggatgaggaagctcaggcagtgtattggcactctagtgctcacataatgggtgaagccatggaaagagtctatggtggatgtttatgctacggtccgccaatagaaaatggattctattatgacatgtacctcgaagaagggggtgtgtctagcaatgatttctcttctctggaggctttgtgtaagaaaatcattaaagaaaaacaagcttttgaaagactggaagttaagaaagaaactttactggcaatgtttaagtacaaccaagttcaaatgccggatacttgaatgacaaaggtgaatactccaactaccaagtctatagatgtgggcccttcgataagatctctgccggggcctcatgttagacacacgggcaacaattacacggccctaaaactacgccacaaaaatcctcaagtacgggaaggcaagcgcagaaatgaagaaactcgaagaataaggatataatcccagaaccaaacgtgacagcaggggcaaactccacaaggagcaaacggaatctagacaagcgggacacgaaacaccgcagaaccagcggaagtaatgataagagacaataaggcagaaagcgcaaagaaaggcagaaccaacaagaagaacacagaacacacaagaaag

SEQ ID NO: 68705 - DNA, 689 bp, Homo sapiens
cagaaacactgacatggtttctttgattcaggagtggcactgattgaaatatgggacatcatgaccatattctgagctcaagaacactgaaatttatgtatatatacacacacgtatacgtgacgtacataaacattcttttgcttttcttttacccaggaccaagaactatatttctttcatgaactcagccctggaagttgcttttttctgccaaaaggagcctacatttataatgcacttattgaattcattagggtaagtcatatttattgctttcttctttagatttaggatatgtgatcattttattaaataaggtctactaaaaggaaagataatctgtatttgagaagaaatatataagacgataagtaaaagtagaagtctgtggcctcataaatcatccctaatagttgattttgcccatatacacatagaaactggtgagcttgaagggggacctgtggtccttgacataggagctctgtgccctctttgactttgatcatttatttgtattttctttgaaaaaacggtttttacattgcttttttcctttgtaaattatgaaatgtttcaagtataagtttatagagaatagtatatccaatatcttgtacttaactacccacatttaacaaatattcacattgggctatatttgcttgagattttttcattcatga

SEQ ID NO: 68706 - DNA, 2871 bp, Homo sapiens
agaccaaggtcagcggagagtaggcatgtagcttctgcagttgctcctcctcaccctccgcgacctgatttcctagaagggctctgtcacccgaaaagattttccactggcttagaggagggagggcccgccttcccccgttatccattggctgctcgttccgccgcaagttgggggcggggttagggcgcctttcgattgcatcagctggtccagccgaggccaagtcccgggcgctagcccacctcccacccgcctcttggctcctctcctctaggccgtcgctttcgggttctctcatcgcttcgtcgttcgccaatgtttgaggagaaggccagcagtccttcagggaagatgggaggcgaggagaagccgattggtgctggtgaagagaagcaaaaggaaggaggcaaaaagaagaacaaagaaggatctggagatggaggtcgagctgagttgaatccttggcctgaatatatttacacacgtcttgagatgtataatatactaaaagcagaacatgattccattctggcagaaaaggcagaaaaagatagcaagccaattaaagtcactttgcctgatggtaaacaggttgatgcggaatcttggaaaactacaccatatcaaattgcctgtggaattagtcaaggcctggccgacaacaccgttattgctaaagtaaataatgttgtgtgggacctggaccgccctctggaagaagattgtaccttggagcttctcaagtttgaggatgaggaagctcaggcagtgtattggcactctagtgctcacataatgggtgaagccatggaaagagtctatggtggatgtttatgctacggtccgccaatagaaaatggattctattatgacatgtacctcgaagaagggggtgtgtctagcaatgatttctcttctctggaggctttgtgtaagaaaatcattaaagaaaaacaagcttttgaaagactggaagttaagaaagaaactttactggcaatgtttaagtacaacaagttcaaatgccggatattgaatgaaaaggtgaatactccaactaccacagtctatagatgtggccctttgatagatctctgccggggtcctcatgttagacacacgggcaaaattaaggctttaaaaatacacaaaaattcctccacgtactgggaaggcaaagcagatatggagactctccagagaatttatggcatttcattcccagatcctaaaatgttgaaagagtgggagaagttccaagaggaagctaaaaaccgagatcataggaaaattggcagggaccaagaactatatttctttcatgaactcagccctggaagttgcttttttctgccaaaaggagcctacatttataatgcacttattgaattcattaggagcgaatataggaaaagaggattccaggaggtagtcaccccaaacatcttcaacagccgactctggatgacctcgggccactggcagcactacagcgagaacatgttctcctttgaggtggagaaggagctgtttgccctgaaacccatgaactgcccaggacactgccttatgtttgatcatcggccaaggtcctggcgagaactgcctctgcggctagctgattttggggtacttcataggaacgagctgtctggagcactcacaggactcacccgggtacgaagattccaacaggatgatgctcacatattctgtgccatggagcagattgaagatgaaataaaaggttgtttggattttctacgtacggtatatagcgtatttggattttcttttaaactaaacctttctactcgcccggaaaaattccttggagatatcgaagtatgggatcaagctgagaaacaacttgaaaacagtctgaatgaatttggtgaaaagtgggagttaaactctggagatggagctttctatggcccaaagattgacatacagattaaagatgcgattgggcggtaccaccagtgtgcaaccatccagctggatttccagttgcccatcagatttaatcttacttatgtaagccatgatggtgatgataagaaaaggccagtgattgttcatcgagccatcttgggatcagtggaaagaatgattgctatcctcacagaaaactatgggggcaaatggcccttttggctgtcccctcgccaggtaatggtagttccagtgggaccaacctgtgatgaatatgcccaaaaggtacgacaacaattccacgatgccaaattcatggcagacattgatctggatccaggctgtacattgaataaaaagattcgaaatgcacagttagcacagtataacttcattttagttgttggtgaaaaagagaaaatcagtggcactgttaatatccgcacaagagacaataaggtccacggggaacgcaccatttctgaaactatcgagcggctacagcagctcaaagagttccgcagcaaacaggcagaagaagaattttaatgaaaaaattacccagattggctccatggaaaaggaggaacagcgtttccgtaaaattgactttgtactctgaaaacgtcaatttatattgaacttggaggagtttggcaaagtctgaataggtcaacctgcaggcgtaactatttttgacctagtcagtttttaaacaatgtgcatttgaaggagttaattaaaagagagccaataaaatgattttactcattcagtatctgagtactggaagtgaaacatgaggaatgctttagtgtaatgtgggagaacttttttgtaaatttaatgcaattgaaaaagttttcaaattcaattaagataactagaattggattatggtgtaaaaataaaaaaaaaatttattcacat

SEQ ID NO: 68707 - DNA, 3029 bp, Homo sapiens
agaccaaggtcagcggagagtaggcatgtagcttctgcagttgctcctcctcaccctccgcgacctgatttcctagaagggctctgtcacccgaaaagattttccactggcttagaggagggagggcccgccttcccccgttatccattggctgctcgttccgccgcaagttgggggcggggttagggcgcctttcgattgcatcagctggtccagccgaggccaagtcccgggcgctagcccacctcccacccgcctcttggctcctctcctctaggccgtcgctttcgggttctctcatcgcttcgtcgttcgccaatgtttgaggagaaggccagcagtccttcagggaagatgggaggcgaggagaagccgattggtgctggtgaagagaagcaaaaggaaggaggcaaaaagaagaacaaagaaggatctggagatggaggtcgagctgagggcaacttgcaggttttattcatctctgcaatcacagagactgacacagagggtatctgctgaatgaatgttgaagagattttgacacgaaattctaattgggacattgcaagtggctatgatgataaactgcagttaagatacagagggtggtgcagttgaatccttggcctgaatatatttacacacgtcttgagatgtataatatactaaaagcagaacatgattccattctggcagaaaaggcagaaaaagatagcaagccaattaaagtcactttgcctgatggtaaacaggttgatgcggaatcttggaaaactacaccatatcaaattgcctgtggaattagtcaaggcctggccgacaacaccgttattgctaaagtaaataatgttgtgtgggacctggaccgccctctggaagaagattgtaccttggagcttctcaagtttgaggatgaggaagctcaggcagtgtattggcactctagtgctcacataatgggtgaagccatggaaagagtctatggtggatgtttatgctacggtccgccaatagaaaatggattctattatgacatgtacctcgaagaagggggtgtgtctagcaatgatttctcttctctggaggctttgtgtaagaaaatcattaaagaaaaacaagcttttgaaagactggaagttaagaaagaaactttactggcaatgtttaagtacaacaagttcaaatgccggatattgaatgaaaaggtgaatactccaactaccacagtctatagatgtggccctttgatagatctctgccggggtcctcatgttagacacacgggcaaaattaaggctttaaaaatacacaaaaattcctccacgtactgggaaggcaaagcagatatggagactctccagagaatttatggcatttcattcccagatcctaaaatgttgaaagagtgggagaagttccaagaggaagctaaaaaccgagatcataggaaaattggcagggaccaagaactatatttctttcatgaactcagccctggaagttgcttttttctgccaaaaggagcctacatttataatgcacttattgaattcattaggagcgaatataggaaaagaggattccaggaggtagtcaccccaaacatcttcaacagccgactctggatgacctcgggccactggcagcactacagcgagaacatgttctcctttgaggtggagaaggagctgtttgccctgaaacccatgaactgcccaggacactgccttatgtttgatcatcggccaaggtcctggcgagaactgcctctgcggctagctgattttggggtacttcataggaacgagctgtctggagcactcacaggactcacccgggtacgaagattccaacaggatgatgctcacatattctgtgccatggagcagattgaagatgaaataaaaggttgtttggattttctacgtacggtatatagcgtatttggattttcttttaaactaaacctttctactcgcccggaaaaattccttggagatatcgaagtatgggatcaagctgagaaacaacttgaaaacagtctgaatgaatttggtgaaaagtgggagttaaactctggagatggagctttctatggcccaaagattgacatacagattaaagatgcgattgggcggtaccaccagtgtgcaaccatccagctggatttccagttgcccatcagatttaatcttacttatgtaagccatgatggtgatgataagaaaaggccagtgattgttcatcgagccatcttgggatcagtggaaagaatgattgctatcctcacagaaaactatgggggcaaatggcccttttggctgtcccctcgccaggtaatggtagttccagtgggaccaacctgtgatgaatatgcccaaaaggtacgacaacaattccacgatgccaaattcatggcagacattgatctggatccaggctgtacattgaataaaaagattcgaaatgcacagttagcacagtataacttcattttagttgttggtgaaaaagagaaaatcagtggcactgttaatatccgcacaagagacaataaggtccacggggaacgcaccatttctgaaactatcgagcggctacagcagctcaaagagttccgcagcaaacaggcagaagaagaattttaatgaaaaaattacccagattggctccatggaaaaggaggaacagcgtttccgtaaaattgactttgtactctgaaaacgtcaatttatattgaacttggaggagtttggcaaagtctgaataggtcaacctgcaggcgtaactatttttgacctagtcagtttttaaacaatgtgcatttgaaggagttaattaaaagagagccaataaaatgattttactcattcagtatctgagtactggaagtgaaacatgaggaatgctttagtgtaatgtgggagaacttttttgtaaatttaatgcaattgaaaaagttttcaaattcaattaagataactagaattggattatggtgtaaaaataaaaaaaaaatttattcacat

SEQ ID NO: 68708 - DNA, 2675 bp, Homo sapiens
agaccaaggtcagcggagagtaggcatgtagcttctgcagttgctcctcctcaccctccgcgacctgatttcctagaagggctctgtcacccgaaaagattttccactggcttagaggagggagggcccgccttcccccgttatccattggctgctcgttccgccgcaagttgggggcggggttagggcgcctttcgattgcatcagctggtccagccgaggccaagtcccgggcgctagcccacctcccacccgcctcttggctcctctcctctaggccgtcgctttcgggttctctcatcgcttcgtcgttcgccaatgtttgaggagaaggccagcagtccttcagggaagatgggaggcgaggagaagccgattggtgctggtgaagagaagcaaaaggaaggaggcaaaaagaagaacaaagaaggatctggagatggaggtcgagctgagttgaatccttggcctgaatatatttacacacgtcttgagatgtataatatactaaaagcagaacatgattccattctggcagaaaaggcagaaaaagatagcaagccaattaaagtcactttgcctgatggtaaacaggttgatgcggaatcttggaaaactacaccatatcaaattgcctgtggaattagtcaaggcctggccgacaacaccgttattgctaaagtaaataatgttgtgtgggacctggaccgccctctggaagaagattgtaccttggagcttctcaagtttgaggatgaggaagctcaggcagtgtattggcactctagtgctcacataatgggtgaagccatggaaagagtctatggtggatgtttatgctacggtccgccaatagaaaatggattctattatgacatgtacctcgaagaagggggtgtgtctagcaatgatttctcttctctggaggctttgtgtaagaaaatcattaaagaaaaacaagcttttgaaagactggaagttaagaaagaaactttactggcaatgtttaagtacaacaagttcaaatgccggatattgaatgaaaaggtgaatactccaactaccacagtctatagatgtggccctttgatagatctctgccggggtcctcatgttagacacacgggcaaaattaaggctttaaaaatacacaaaaattcctccacgtactgggaaggcaaagcagatatggagactctccagagaatttatggcatttcattcccagatcctaaaatgttgaaagagtgggagaagttccaagaggaagctaaaaaccgagatcataggaaaattggcagggaccaagaactatatttctttcatgaactcagccctggaagttgcttttttctgccaaaaggagcctacatttataatgcacttattgaattcattaggagcgaatataggaaaagaggattccaggaggtagtcaccccaaacatcttcaacagccgactctggatgacctcgggccactggcagcactacagcgagaacatgttctcctttgaggtggagaaggagctgtttgccctgaaacccatgaactgcccaggacactgccttatgtttgatcatcggccaaggtcctggcgagaactgcctctgcggctagctgattttggggtacttcataggaacgagctgtctggagcactcacaggactcacccgggtacgaagattccaacaggatgatgctcacatattctgtgccatggagcagattgaagatgaaataaaaggttgtttggattttctacgtacggtatatagcgtatttggattttcttttaaactaaacctttctactcgcccggaaaaattccttggagatatcgaagtatgggatcaagctgagaaacaacttgaaaacagtctgaatgaatttggtgaaaagtgggagttaaactctggagatggagctttctatggcccaaagattgacatacagattaaagatgcgattgggcggtaccaccagtgtgcaaccatccagctggatttccagttgcccatcagatttaatcttacttatgtaagccatgatggtgatgataagaaaaggccagtgattgttcatcgagccatcttgggatcagtggaaagaatgattgctatcctcacagaaaactatgggggcaaatggcccttttggctgtcccctcgccaggtaatggtagttccagtgggaccaacctgtgatgaatatgcccaaaaggtacgacaacaattccacgatgccaaattcatggcagacattgatctggatccaggctgtacattgaatgaaaaaattacccagattggctccatggaaaaggaggaacagcgtttccgtaaaattgactttgtactctgaaaacgtcaatttatattgaacttggaggagtttggcaaagtctgaataggtcaacctgcaggcgtaactatttttgacctagtcagtttttaaacaatgtgcatttgaaggagttaattaaaagagagccaataaaatgattttactcattcagtatctgagtactggaagtgaaacatgaggaatgctttagtgtaatgtgggagaacttttttgtaaatttaatgcaattgaaaaagttttcaaattcaattaagataactagaattggattatggtgtaaaaataaaaaaaaaatttattcacat

SEQ ID NO: 68709 - DNA, 699 bp, Homo sapiens
ctcccccttaactcttcccatatcctctctttccccccccccctcatttctattcccttctctaccgcttccccgttgcccattctggcccacattgatctggatccaggctgtacattgaataaaaagattcgaaatgcacagttagcacagtataacttcattttagttgttggtgaaaaagagaaaatcagtggcactgttaatatccgcacaagagacaataaggtccacggggaacgcaccatttctgaaactatcgagcggctacagcagctcaaagagttccgcagcaaacaggcagaagaagaattttaatgaaaaaattacccagattggctccatggaaaaggaggaacagcgtttccgtaaaattgactttgtactctgaaaacgtcaatttatattgaacttggaggagtttggcaaagtctgaataggtcaacctgcaggcgtaactatttttgacctagtcagtttttaaacaatgtgcatttgaaggagttaattaaaagagagccaataaaatgattttactcattcagtatctgagtactggaagtgaaacatgaggaatgctttagtgtaatgtgggagaacttttttgtaaatttaatgcaattgaaaaagttttcaaattcaattaagataactagaattggattatggtgtaaaaataaaaaaaaaatttattcacat

SEQ ID NO: 68710 - DNA, 446 bp, Homo sapiens
ctttcaattatctttgttatttactgagatgtagaattgctggatcatatggtataatttttttaggaatcaccataccgttttctacagcagctaaactactttacattctcatcagcaatgtgcaagggttccaatttctccatttcctcaccagcacattttctatgtttttaaaaatagtagccatacaactgggtatgaaattaaaaagataaattttacgttatgtgtattttaccacaataaaaatgtccaaaggaactgaaagtaccaatatttggtgcagttctgtcagtagaagtaaatatggattcgctatattccttaaaaatatattttcactctaagtttgtagcacctacaattttattaagacctcatagttctgaagtttaaaaagtcataaattgtttcagaaataaaacgaaatcatgaatccaaaa

SEQ ID NO: 68711 - DNA, 1756 bp, Homo sapiens
  misc_feature (35)..(35): n is a, c, g, or t
ctgactaacgtgggcggagctctagctcgcgtatnctgaggaggcggggttggcctaggcgaagatccggactctgggtgttttgctaccgtgaccgtttagaacagaaactgttcatacttggtgcgctgtggactcttgtgataattaaccaagagtagctctatttgtccaacctcacacctaaagaagaaagaaaatggcttgtgctgagttttcttttcatgtaccaagtcttgaagagcttgctggagttatgcagaaggggttaaaagataactttgctgatgtccaggtctctgtagttgattgccctgatttgactaaggaaccctttacctttcctgtaaaaggcatctgtgggaaaactagaattgcagaagttggaggtgtgccttacttattgcctcttgtaaaccaaaaaaaagtttatgatctgaataaaattgcaaaagaaatcaagctgcctggagcctttattcttggagcaggagcaggtccatttcagactctcgggttcaattctgagtttatgccagttattcagacagaaagtgaacacaagcctcctgtaaatggaagttactttgcccatgtgaaccctgcagatggagggtgcctactggagaaatacagtgagaaatgtcatgattttcagtgtgcattactggctaatctttttgccagtgaaggccaacctggcaaggtaattgaggtgaaagccaaaagaagaactggaccacttaactttgtgacttgtatgagagagaccctggaaaaacattatggaaataagcctataggaatgggaggtactttcataattcagaagggaaaagtgaagtctcacattatgcctgcagaattttcttcctgccccttgaactctgatgaagaagtgaataaatggttgcatttttatgaaatgaaagctcctttggtttgtctaccagtttttgtctccagagacccagggtttgatttgcgactggagcacactcatttttttagtcgtcatggagaaggtggacactaccattatgacactactccagatatagtggaatatcttggatacttcttacctgcagagtttctctatcgcattgatcaaccaaaagagacgcattcaattgggcgagattaaatcagctgatacttatttagaaaaagaaataattaaggttaattaattgattgacttattaattaatactgatataaaaccaatagaaatgatcccacaggccaggcacaatggctcatgcctataatcccagcactttgggaggctgaggcaggaagcacactggagcccaggagtttgagaccagcttgggcaacatagcaagaccctgtctatttttttaaaaaagtaaaaaatagaaattatctcactacttaaatcccatttttttcacttcatatgaaagaacatattgatagtatattctatattatttcatagatctgtctgaaagagattgggaacaaaaatatctaattgagatattctttaattttttacatagcagctttattttttttattctgtagtatcagcgaaatcagtcatgtttataccttgaatataaatatcaggaatcatgcaattatttctactatgtatttagtagtatcttatatttgtataacattattacattttgcaaattagtatcacaactgctaagtagatgtttctgagtattagaaaaatcagtgttattacctgcaggatattaaaaaacatttg

SEQ ID NO: 68712 - DNA, 1604 bp, Homo sapiens
  misc_feature (35)..(35): n is a, c, g, or t
ctgactaacgtgggcggagctctagctcgcgtatnctgaggaggcggggttggcctaggcgaagatccggactctgggtgttttgctaccgtgaccgtttagttatgcagaaggggttaaaagataactttgctgatgtccaggtctctgtagttgattgccctgatttgactaaggaaccctttacctttcctgtaaaaggcatctgtgggaaaactagaattgcagaagttggaggtgtgccttacttattgcctcttgtaaaccaaaaaaaagtttatgatctgaataaaattgcaaaagaaatcaagctgcctggagcctttattcttggagcaggagcaggtccatttcagactctcgggttcaattctgagtttatgccagttattcagacagaaagtgaacacaagcctcctgtaaatggaagttactttgcccatgtgaaccctgcagatggagggtgcctactggagaaatacagtgagaaatgtcatgattttcagtgtgcattactggctaatctttttgccagtgaaggccaacctggcaaggtaattgaggtgaaagccaaaagaagaactggaccacttaactttgtgacttgtatgagagagaccctggaaaaacattatggaaataagcctataggaatgggaggtactttcataattcagaagggaaaagtgaagtctcacattatgcctgcagaattttcttcctgccccttgaactctgatgaagaagtgaataaatggttgcatttttatgaaatgaaagctcctttggtttgtctaccagtttttgtctccagagacccagggtttgatttgcgactggagcacactcatttttttagtcgtcatggagaaggtggacactaccattatgacactactccagatatagtggaatatcttggatacttcttacctgcagagtttctctatcgcattgatcaaccaaaagagacgcattcaattgggcgagattaaatcagctgatacttatttagaaaaagaaataattaaggttaattaattgattgacttattaattaatactgatataaaaccaatagaaatgatcccacaggccaggcacaatggctcatgcctataatcccagcactttgggaggctgaggcaggaagcacactggagcccaggagtttgagaccagcttgggcaacatagcaagaccctgtctatttttttaaaaaagtaaaaaatagaaattatctcactacttaaatcccatttttttcacttcatatgaaagaacatattgatagtatattctatattatttcatagatctgtctgaaagagattgggaacaaaaatatctaattgagatattctttaattttttacatagcagctttattttttttattctgtagtatcagcgaaatcagtcatgtttataccttgaatataaatatcaggaatcatgcaattatttctactatgtatttagtagtatcttatatttgtataacattattacattttgcaaattagtatcacaactgctaagtagatgtttctgagtattagaaaaatcagtgttattacctgcaggatattaaaaaacatttg

SEQ ID NO: 68713 - DNA, 694 bp, Homo sapiens
  misc_feature (35)..(35): n is a, c, g, or t
ctgactaacgtgggcggagctctagctcgcgtatnctgaggaggcggggttggcctaggcgaagatccggactctgggtgttttgctaccgtgaccgtttaggtgagtggaatagccaagaacatttcggcaaataacaaaaacaaaacgtgcggtcacttgtgagtggatgagaactgtgaggaaacagcctctcagcccggttcgtttccggtggtctcgcgtttgctgagctgtcgcctggctttctaaatctggtcccgggtgtgtggcgagggtgacgggtgggatgtgtgcctgagtgttttgtaatcctttgtctatttctgccttcagaaacccttgtgtgttaaaatattggagaaggctcattctttgaccatgactcgaagtgtgtaacctttgtgctggacgccagtgttattccatagcacgcccaggtctcctccccacttttgcacctgtttcgtaagctcaccctttctgcctcccaggagttggctaacatgtcacaagtgagacctgtggaggatttgtttttcctaagtttcctcctacatcccccctgccccacaccattagttccttgaccggttcctgagttaagattaaacagtgtaaactagtttagttttggtggggtttttttctcccaaagtaatttttttttttttgagaccgagtttcgctcttg

SEQ ID NO: 68714 - DNA, 702 bp, Homo sapiens
agcgatgtttaaaataatttaagtatgattatataagatttgggggccgggtgcagtggctcacgcctcccaaagtaattttaaaaaggaatgaactggtttgatttttccgctttcaaaattctgttttcatatgataaaccacaaaaatcagtaaagctgtctagtcttattttatagttcacattttaggattgaacgggccttaaaagtaatctggtctctttacctgctttgctccatagtttggacaattccggggataaaaagtccgatcctttaggcagcccactgcatttgatccacagggtctgggcaatgacgaagctccaggactggtatggcatgtccctcactgccgtattcagcagcaagcctagctgtgtaatttgtgaggctcaatgcaaaatgaaaatgcagcgtcccttgttcaaaaagaaggggaaaagtgctattaaagggaaggaacatttaactcctaatgcagaatcattgaaatttcacatttcattttgtattttttcttttttctttttttttttagaaacagagtctcgctctgtcgcccaggctggagtgcagtgtggcccgatctcagctcactgcaacccccacctcccgggctcaagagatccacccacctcagcttcccaagtaggggcgcctgtaaccccagctactcgggaggctgaggcaggagaa

SEQ ID NO: 68715 - DNA, 2139 bp, Homo sapiens
ctgttcttaaggcaggttagtttaattttatagaagaaatatttttcaaacagtacaaatgacacaattagagagaaaagagtgacaaaaaacaaagagatgaatactgattataacttattcccacaacagaaggctacttatttctacaattatcaatcaaagcctgacaattcagtgattagatgaagtgaaagccaaattcccttttacatgtggtactatttcaaaagaaccctggtggcaggatcctgatggttttgagaccagaactgcttctaaaacctggcagcgtttttttgttttgtttttatcgcgaggcctggtagatggacagattgaaacatagatggaaacacctaggacttcacttttctggcatgtggggtattttctggggttggcgtggcagtctgaactagtcagaagctccaagaccacgtcatgaatgacaagcaacatagggcgcttggtgtccttctgcctgctcaggccacctccactgcctgcatctgcacctgcagagaactgcgcggctctctggccttcctttgtcttttctttccttgtcatggctgcattgagctgcaaaagcggacacaggcagggaggcagggggaggttcaaaggtaaaggtggcaaacacgagggctccttggactgatacggaagcaggcactgcatctgtttcttgcaggctatcagtgagattctatttttaaaaaacccagccaggcatggtggctcgcaagtccaagatcagcctgggcaacagagcaagaccttgactctaagaaaaaccaatagaaatgatcccacaggccaggcacaatggctcatgcctataatcccagcactttgggaggctgaggcaggaagcacactggagcccaggagtttgagaccagcttgggcaacatagcaagaccctgtctatttttttaaaaaagtaaaaaatagaaattatctcactacttaaatcccatttttttcacttcatatgaaagaacatattgatagtatattctatattatttcatagatctgtctgaaagagattgggaacaaaaatatctaattgagatattctttaattttttacatagcagctttattttttttattctgtagtatcagcgaaatcagtcatgtttataccttgaatataaatatcaggaatcatgcaattatttctactatgtatttagtagtatcttatatttgtataacattattacattttgcaaattagtatcacaactgctaagtagatgtttctgagtattagaaaaatcagtgttattacctgcaggatattaaaaaacatttggaaaaagagaaaaagaaaaatcagtgtttagaaatgttgatagttattgaatctttgaattgaattttaaaaatccattctagtaatcagagtatactttttttatagaacaaggtggcaggtggggagccctttacccttctggtgaagttaaaccatagaagtttacaatttgcctttcacaaacattagcagtccgggcatggtggctgaagcctgtgatcccagcatgttgggaggccgagtgggaggattgcctgagcctaggagtttaaaccagcctgggcaccatggtgagaccccatctctattatttaaaatgtttcttaaataaaaaaaacacaaacattagcaactagttggctagccataattcctcccttgtttcgattgccagttagaagcaatttttatttcactggttatttgcaagagaaggggtaaaaaaacagcatcagagtgcaacactgaagtgagcttactttaatttgtaagtgaagctgttgctgaacatgaccactatcgttgctgaaatataaaattatactcactgattgtaatggttgaaattttcctgaataatcattagccaaagatcaactctctaatggtgctaatggcaatctagctaatgtgcaaatttaggaagtcttcagtactaagtacataattttcaaataatattttttaattgtctactttggatgttagctatgtcttgtgagtataaattccaattttaagcactattttgatgcaaaaaaatgaataaaaaatttaatttatgatatgtttgtaatatcttacct

SEQ ID NO: 68716 - DNA, 2855 bp, Homo sapiens
  misc_feature (35)..(35): n is a, c, g, or t
ctgactaacgtgggcggagctctagctcgcgtatnctgaggaggcggggttggcctaggcgaagatccggactctgggtgttttgctaccgtgaccgtttagaaacagagtctcgctctgtcgcccaggctggagtgcagtgtggcccgatctcagctcactgcaacccccacctcccgggctcaagagatccacccacctcagcttcccaagtagctgggactacacgcgcccgccaccacaaccggctaatttttgtacttttagtagagaccaggtttcaccatgttggccaggcaggtctcgaactcttgacctcaagtgatccgtctgcctcggcctcccaaagtgctgggagtacaggcgtgaatcaccgcgcccggccacatttgaacagaaactgttcatacttggtgcgctgtggactcttgtgataattaaccaagagtagctctatttgtccaacctcacacctaaagaagaaagaaaatggcttgtgctgagttttcttttcatgtaccaagtcttgaagagcttgctggagttatgcagaaggggttaaaagataactttgctgatgtccaggtctctgtagttgattgccctgatttgactaaggaaccctttacctttcctgtaaaaggcatctgtgggaaaactagaattgcagaagttggaggtgtgccttacttattgcctcttgtaaaccaaaaaaaagtttatgatctgaataaaattgcaaaagaaatcaagctgcctggagcctttattcttggagcaggagcaggtccatttcagactctcgggttcaattctgagtttatgccagttattcagacagaaagtgaacacaagcctcctgtaaatggaagttactttgcccatgtgaaccctgcagatggagggtgcctactggagaaatacagtgagaaatgtcatgattttcagtgtgcattactggctaatctttttgccagtgaaggccaacctggcaaggtaattgaggtgaaagccaaaagaagaactggaccacttaactttgtgacttgtatgagagagaccctggaaaaacattatggaaataagcctataggaatgggaggtactttcataattcagaagggaaaagtgaagtctcacattatgcctgcagaattttcttcctgccccttgaactctgatgaagaagtgaataaatggttgcatttttatgaaatgaaagctcctttggtttgtctaccagtttttgtctccagagacccagggtttgatttgcgactggagcacactcatttttttagtcgtcatggagaaggtggacactaccattatgacactactccagatatagtggaatatcttggatacttcttacctgcagagtttctctatcgcattgatcaaccaaaagagacgcattcaattgggcgagattaaatcagctgatacttatttagaaaaagaaataattaaggttaattaattgattgacttattaattaatactgatataaaaccaatagaaatgatcccacaggccaggcacaatggctcatgcctataatcccagcactttgggaggctgaggcaggaagcacactggagcccaggagtttgagaccagcttgggcaacatagcaagaccctgtctatttttttaaaaaagtaaaaaatagaaattatctcactacttaaatcccatttttttcacttcatatgaaagaacatattgatagtatattctatattatttcatagatctgtctgaaagagattgggaacaaaaatatctaattgagatattctttaattttttacatagcagctttattttttttattctgtagtatcagcgaaatcagtcatgtttataccttgaatataaatatcaggaatcatgcaattatttctactatgtatttagtagtatcttatatttgtataacattattacattttgcaaattagtatcacaactgctaagtagatgtttctgagtattagaaaaatcagtgttattacctgcaggatattaaaaaacatttggaaaaagagaaaaagaaaaatcagtgtttagaaatgttgatagttattgaatctttgaattgaattttaaaaatccattctagtaatcagagtatactttttttatagaacaaggtggcaggtggggagccctttacccttctggtgaagttaaaccatagaagtttacaatttgcctttcacaaacattagcagtccgggcatggtggctgaagcctgtgatcccagcatgttgggaggccgagtgggaggattgcctgagcctaggagtttaaaccagcctgggcaccatggtgagaccccatctctattatttaaaatgtttcttaaataaaaaaaacacaaacattagcaactagttggctagccataattcctcccttgtttcgattgccagttagaagcaatttttatttcactggttatttgcaagagaaggggtaaaaaaacagcatcagagtgcaacactgaagtgagcttactttaatttgtaagtgaagctgttgctgaacatgaccactatcgttgctgaaatataaaattatactcactgattgtaatggttgaaattttcctgaataatcattagccaaagatcaactctctaatggtgctaatggcaatctagctaatgtgcaaatttaggaagtcttcagtactaagtacataattttcaaataatattttttaattgtctactttggatgttagctatgtcttgtgagtataaattccaattttaagcactattttgatgcaaaaaaatgaataaaaaatttaatttatgatatgtttgtaatatcttacct

SEQ ID NO: 68717 - DNA, 2511 bp, Homo sapiens
  misc_feature (35)..(35): n is a, c, g, or t
ctgactaacgtgggcggagctctagctcgcgtatnctgaggaggcggggttggcctaggcgaagatccggactctgggtgttttgctaccgtgaccgtttagaacagaaactgttcatacttggtgcgctgtggactcttgtgataattaaccaagagtagctctatttgtccaacctcacacctaaagaagaaagaaaatggcttgtgctgagttttcttttcatgtaccaagtcttgaagagcttgctggagttatgcagaaggggttaaaagataactttgctgatgtccaggtctctgtagttgattgccctgatttgactaaggaaccctttacctttcctgtaaaaggcatctgtgggaaaactagaattgcagaagttggaggtgtgccttacttattgcctcttgtaaaccaaaaaaaagtttatgatctgaataaaattgcaaaagaaatcaagctgcctggagcctttattcttggagcaggagcaggtccatttcagactctcgggttcaattctgagtttatgccagttattcagacagaaagtgaacacaagcctcctgtaaatggaagttactttgcccatgtgaaccctgcagatggagggtgcctactggagaaatacagtgagaaatgtcatgattttcagtgtgcattactggctaatctttttgccagtgaaggccaacctggcaaggtaattgaggtgaaagccaaaagaagaactggaccacttaactttgtgacttgtatgagagagaccctggaaaaacattatggaaataagcctataggaatgggaggtactttcataattcagaagggaaaagtgaagtctcacattatgcctgcagaattttcttcctgccccttgaactctgatgaagaagtgaataaatggttgcatttttatgaaatgaaagctcctttggtttgtctaccagtttttgtctccagagacccagggtttgatttgcgactggagcacactcatttttttagtcgtcatggagaaggtggacactaccattatgacactactccagatatagtggaatatcttggatacttcttacctgcagagtttctctatcgcattgatcaaccaaaagagacgcattcaattgggcgagattaaatcagctgatacttatttagaaaaagaaataattaaggttaattaattgattgacttattaattaatactgatataaaaccaatagaaatgatcccacaggccaggcacaatggctcatgcctataatcccagcactttgggaggctgaggcaggaagcacactggagcccaggagtttgagaccagcttgggcaacatagcaagaccctgtctatttttttaaaaaagtaaaaaatagaaattatctcactacttaaatcccatttttttcacttcatatgaaagaacatattgatagtatattctatattatttcatagatctgtctgaaagagattgggaacatattctgtagtatcagcgaaatcagtcatgtttataccttgaatataaatatcaggaatcatgcaattatttctactatgtatttagtagtatcttatatttgtataacattattacattttgcaaattagtatcacaactgctaagtagatgtttctgagtattagaaaaatcagtgttattacctgcaggatattaaaaaacatttggaaaaagagaaaaagaaaaatcagtgtttagaaatgttgatagttattgaatctttgaattgaattttaaaaatccattctagtaatcagagtatactttttttatagaacaaggtggcaggtggggagccctttacccttctggtgaagttaaaccatagaagtttacaatttgcctttcacaaacattagcagtccgggcatggtggctgaagcctgtgatcccagcatgttgggaggccgagtgggaggattgcctgagcctaggagtttaaaccagcctgggcaccatggtgagaccccatctctattatttaaaatgtttcttaaataaaaaaaacacaaacattagcaactagttggctagccataattcctcccttgtttcgattgccagttagaagcaatttttatttcactggttatttgcaagagaaggggtaaaaaaacagcatcagagtgcaacactgaagtgagcttactttaatttgtaagtgaagctgttgctgaacatgaccactatcgttgctgaaatataaaattatactcactgattgtaatggttgaaattttcctgaataatcattagccaaagatcaactctctaatggtgctaatggcaatctagctaatgtgcaaatttaggaagtcttcagtactaagtacataattttcaaataatattttttaattgtctactttggatgttagctatgtcttgtgagtataaattccaattttaagcactattttgatgcaaaaaaatgaataaaaaatttaatttatgatatgtttgtaatatcttacct

SEQ ID NO: 68718 - DNA, 2415 bp, Homo sapiens
  misc_feature (35)..(35): n is a, c, g, or t
ctgactaacgtgggcggagctctagctcgcgtatnctgaggaggcggggttggcctaggcgaagatccggactctgggtgttttgctaccgtgaccgtttagaacagaaactgttcatacttggtgcgctgtggactcttgtgataattaaccaagagtagctctatttgtccaacctcacacctaaagaagaaagaaaatggcttgtgctgagttttcttttcatgtaccaagtcttgaagagcttgctggagttatgcagaaggggttaaaagataactttgctgatgtccaggtctctgtagttgattgccctgatttgactaaggaaccctttacctttcctgtaaaaggcatctgtgggaaaactagaattgcagaagttggaggtgtgccttacttattgcctcttgtaaaccaaaaaaaagtttatgatctgaataaaattgcaaaagaaatcaagctgcctggagcctttattcttggagcaggagcaggtccatttcagactctcgggttcaattctgagtttatgccagttattcagacagaaagtgaacacaagcctcctgtaaatggaagttactttgcccatgtgaaccctgcagatggagggtgcctactggagaaatacagtgagaaatgtcatgattttcagtgtgcattactggctaatctttttgccagtgaaggccaacctggcaagcctgcagaattttcttcctgccccttgaactctgatgaagaagtgaataaatggttgcatttttatgaaatgaaagctcctttggtttgtctaccagtttttgtctccagagacccagggtttgatttgcgactggagcacactcatttttttagtcgtcatggagaaggtggacactaccattatgacactactccagatatagtggaatatcttggatacttcttacctgcagagtttctctatcgcattgatcaaccaaaagagacgcattcaattgggcgagattaaatcagctgatacttatttagaaaaagaaataattaaggttaattaattgattgacttattaattaatactgatataaaaccaatagaaatgatcccacaggccaggcacaatggctcatgcctataatcccagcactttgggaggctgaggcaggaagcacactggagcccaggagtttgagaccagcttgggcaacatagcaagaccctgtctatttttttaaaaaagtaaaaaatagaaattatctcactacttaaatcccatttttttcacttcatatgaaagaacatattgatagtatattctatattatttcatagatctgtctgaaagagattgggaacaaaaatatctaattgagatattctttaattttttacatagcagctttattttttttattctgtagtatcagcgaaatcagtcatgtttataccttgaatataaatatcaggaatcatgcaattatttctactatgtatttagtagtatcttatatttgtataacattattacattttgcaaattagtatcacaactgctaagtagatgtttctgagtattagaaaaatcagtgttattacctgcaggatattaaaaaacatttggaaaaagagaaaaagaaaaatcagtgtttagaaatgttgatagttattgaatctttgaattgaattttaaaaatccattctagtaatcagagtatactttttttatagaacaaggtggcaggtggggagccctttacccttctggtgaagttaaaccatagaagtttacaatttgcctttcacaaacattagcagtccgggcatggtggctgaagcctgtgatcccagcatgttgggaggccgagtgggaggattgcctgagcctaggagtttaaaccagcctgggcaccatggtgagaccccatctctattatttaaaatgtttcttaaataaaaaaaacacaaacattagcaactagttggctagccataattcctcccttgtttcgattgccagttagaagcaatttttatttcactggttatttgcaagagaaggggtaaaaaaacagcatcagagtgcaacactgaagtgagcttactttaatttgtaagtgaagctgttgctgaacatgaccactatcgttgctgaaatataaaattatactcactgattgtaatggttgaaattttcctgaataatcattagccaaagatcaactctctaatggtgctaatggcaatctagctaatgtgcaaatttaggaagtcttcagtactaagtacataattttcaaataatattttttaattgtctactttggatgttagctatgtcttgtgagtataaattccaattttaagcactattttgatgcaaaaaaatgaataaaaaatttaatttatgatatgtttgtaatatcttacct

SEQ ID NO: 68719 - DNA, 2565 bp, Homo sapiens
  misc_feature (35)..(35): n is a, c, g, or t
ctgactaacgtgggcggagctctagctcgcgtatnctgaggaggcggggttggcctaggcgaagatccggactctgggtgttttgctaccgtgaccgtttagaacagaaactgttcatacttggtgcgctgtggactcttgtgataattaaccaagagtagctctatttgtccaacctcacacctaaagaagaaagaaaatggcttgtgctgagttttcttttcatgtaccaagtcttgaagagcttgctggagttatgcagaaggggttaaaagataactttgctgatgtccaggtctctgtagttgattgccctgatttgactaaggaaccctttacctttcctgtaaaaggcatctgtgggaaaactagaattgcagaagttggaggtgtgccttacttattgcctcttgtaaaccaaaaaaaagtttatgatctgaataaaattgcaaaagaaatcaagctgcctggagcctttattcttggagcaggagcaggtccatttcagactctcgggttcaattctgagtttatgccagttattcagacagaaagtgaacacaagcctcctgtaaatggaagttactttgcccatgtgaaccctgcagatggagggtgcctactggagaaatacagtgagaaatgtcatgattttcagtgtgcattactggctaatctttttgccagtgaaggccaacctggcaaggtaattgaggtgaaagccaaaagaagaactggaccacttaactttgtgacttgtatgagagagaccctggaaaaacattatggaaataagcctataggaatgggaggtactttcataattcagaagggaaaagtgaagtctcacattatgcctgcagaattttcttcctgccccttgaactctgatgaagaagtgaataaatggttgcatttttatgaaatgaaagctcctttggtttgtctaccagtttttgtctccagagacccagggtttgatttgcgactggagcacactcatttttttagtcgtcatggagaaggtggacactaccattatgacactactccagatatagtggaatatcttggatacttcttacctgcagagtttctctatcgcattgatcaaccaaaagagacgcattcaattgggcgagattaaatcagctgatacttatttagaaaaagaaataattaaggttaattaattgattgacttattaattaatactgatataaaaccaatagaaatgatcccacaggccaggcacaatggctcatgcctataatcccagcactttgggaggctgaggcaggaagcacactggagcccaggagtttgagaccagcttgggcaacatagcaagaccctgtctatttttttaaaaaagtaaaaaatagaaattatctcactacttaaatcccatttttttcacttcatatgaaagaacatattgatagtatattctatattatttcatagatctgtctgaaagagattgggaacaaaaatatctaattgagatattctttaattttttacatagcagctttattttttttattctgtagtatcagcgaaatcagtcatgtttataccttgaatataaatatcaggaatcatgcaattatttctactatgtatttagtagtatcttatatttgtataacattattacattttgcaaattagtatcacaactgctaagtagatgtttctgagtattagaaaaatcagtgttattacctgcaggatattaaaaaacatttggaaaaagagaaaaagaaaaatcagtgtttagaaatgttgatagttattgaatctttgaattgaattttaaaaatccattctagtaatcagagtatactttttttatagaacaaggtggcaggtggggagccctttacccttctggtgaagttaaaccatagaagtttacaatttgcctttcacaaacattagcagtccgggcatggtggctgaagcctgtgatcccagcatgttgggaggccgagtgggaggattgcctgagcctaggagtttaaaccagcctgggcaccatggtgagaccccatctctattatttaaaatgtttcttaaataaaaaaaacacaaacattagcaactagttggctagccataattcctcccttgtttcgattgccagttagaagcaatttttatttcactggttatttgcaagagaaggggtaaaaaaacagcatcagagtgcaacactgaagtgagcttactttaatttgtaagtgaagctgttgctgaacatgaccactatcgttgctgaaatataaaattatactcactgattgtaatggttgaaattttcctgaataatcattagccaaagatcaactctctaatggtgctaatggcaatctagctaatgtgcaaatttaggaagtcttcagtactaagtacataattttcaaataatattttttaattgtctactttggatgttagctatgtcttgtgagtataaattccaattttaagcactattttgatgcaaaaaaatgaataaaaaatttaatttatgatatgtttgtaatatcttacct

SEQ ID NO: 68720 - DNA, 2413 bp, Homo sapiens
  misc_feature (35)..(35): n is a, c, g, or t
ctgactaacgtgggcggagctctagctcgcgtatnctgaggaggcggggttggcctaggcgaagatccggactctgggtgttttgctaccgtgaccgtttagttatgcagaaggggttaaaagataactttgctgatgtccaggtctctgtagttgattgccctgatttgactaaggaaccctttacctttcctgtaaaaggcatctgtgggaaaactagaattgcagaagttggaggtgtgccttacttattgcctcttgtaaaccaaaaaaaagtttatgatctgaataaaattgcaaaagaaatcaagctgcctggagcctttattcttggagcaggagcaggtccatttcagactctcgggttcaattctgagtttatgccagttattcagacagaaagtgaacacaagcctcctgtaaatggaagttactttgcccatgtgaaccctgcagatggagggtgcctactggagaaatacagtgagaaatgtcatgattttcagtgtgcattactggctaatctttttgccagtgaaggccaacctggcaaggtaattgaggtgaaagccaaaagaagaactggaccacttaactttgtgacttgtatgagagagaccctggaaaaacattatggaaataagcctataggaatgggaggtactttcataattcagaagggaaaagtgaagtctcacattatgcctgcagaattttcttcctgccccttgaactctgatgaagaagtgaataaatggttgcatttttatgaaatgaaagctcctttggtttgtctaccagtttttgtctccagagacccagggtttgatttgcgactggagcacactcatttttttagtcgtcatggagaaggtggacactaccattatgacactactccagatatagtggaatatcttggatacttcttacctgcagagtttctctatcgcattgatcaaccaaaagagacgcattcaattgggcgagattaaatcagctgatacttatttagaaaaagaaataattaaggttaattaattgattgacttattaattaatactgatataaaaccaatagaaatgatcccacaggccaggcacaatggctcatgcctataatcccagcactttgggaggctgaggcaggaagcacactggagcccaggagtttgagaccagcttgggcaacatagcaagaccctgtctatttttttaaaaaagtaaaaaatagaaattatctcactacttaaatcccatttttttcacttcatatgaaagaacatattgatagtatattctatattatttcatagatctgtctgaaagagattgggaacaaaaatatctaattgagatattctttaattttttacatagcagctttattttttttattctgtagtatcagcgaaatcagtcatgtttataccttgaatataaatatcaggaatcatgcaattatttctactatgtatttagtagtatcttatatttgtataacattattacattttgcaaattagtatcacaactgctaagtagatgtttctgagtattagaaaaatcagtgttattacctgcaggatattaaaaaacatttggaaaaagagaaaaagaaaaatcagtgtttagaaatgttgatagttattgaatctttgaattgaattttaaaaatccattctagtaatcagagtatactttttttatagaacaaggtggcaggtggggagccctttacccttctggtgaagttaaaccatagaagtttacaatttgcctttcacaaacattagcagtccgggcatggtggctgaagcctgtgatcccagcatgttgggaggccgagtgggaggattgcctgagcctaggagtttaaaccagcctgggcaccatggtgagaccccatctctattatttaaaatgtttcttaaataaaaaaaacacaaacattagcaactagttggctagccataattcctcccttgtttcgattgccagttagaagcaatttttatttcactggttatttgcaagagaaggggtaaaaaaacagcatcagagtgcaacactgaagtgagcttactttaatttgtaagtgaagctgttgctgaacatgaccactatcgttgctgaaatataaaattatactcactgattgtaatggttgaaattttcctgaataatcattagccaaagatcaactctctaatggtgctaatggcaatctagctaatgtgcaaatttaggaagtcttcagtactaagtacataattttcaaataatattttttaattgtctactttggatgttagctatgtcttgtgagtataaattccaattttaagcactattttgatgcaaaaaaatgaataaaaaatttaatttatgatatgtttgtaatatcttacct

SEQ ID NO: 68721 - DNA, 1478 bp, Homo sapiens
  misc_feature (35)..(35): n is a, c, g, or t
ctgactaacgtgggcggagctctagctcgcgtatnctgaggaggcggggttggcctaggcgaagatccggactctgggtgttttgctaccgtgaccgtttagaaacagagtctcgctctgtcgcccaggctggagtgcagtgtggcccgatctcagctcactgcaacccccacctcccgggctcaagagatccacccacctcagcttcccaagtagctgggactacacgcgcccgccaccacaaccggctaatttttgtacttttagtagagaccaggtttcaccatgttggccaggcaggtctcgaactcttgacctcaagtgatccgtctgcctcggcctcccaaagtgctgggagtacaggcgtgaatcaccgcgcccggccacatttgaacagaaactgttcatacttggtgcgctgtggactcttgtgataattaaccaagagtagctctatttgtccaacctcacacctaaagaagaaagaaaatggcttgtgctgagttttcttttcatgtaccaagtcttgaagagcttgctggagttatgcagaaggggttaaaagataactttgctgatgtccaggtctctgtagttgattgccctgatttgactaaggaaccctttacctttcctgtaaaaggcatctgtgggaaaactagaattgcagaagttggaggtgtgccttacttattgcctcttgtaaaccaaaaaaaagtttatgatctgaataaaattgcaaaagaaatcaagctgcctggagcctttattcttggagcaggagcaggtccatttcagactctcgggttcaattctgagtttatgccagttattcagacagaaagtgaacacaagcctcctgtaaatggaagttactttgcccatgtgaaccctgcagatggagggtgcctactggagaaatacagtgagaaatgtcatgattttcagtgtgcattactggctaatctttttgccagtgaaggccaacctggcaaggtaattgaggtgaaagccaaaagaagaactggaccacttaactttgtgacttgtatgagagagaccctggaaaaacattatggaaataagcctataggaatgggaggtactttcataattcagaagggaaaagtgaagtctcacattatgcctgcagaattttcttcctgccccttgaactctgatgaagaagtgaataaatggttgcatttttatgaaatgaaagctcctttggtttgtctaccagtttttgtctccagagacccagggtttgatttgcgactggagcacactcatttttttagtcgtcatggagaaggtggacactaccattatgacactactccagatatagtggaatatcttggatacttcttacctgcagagtttctctatcgcattgatcaaccaaaagagacgcccccccttcgactctggaggttcgacagggctatatagggagatgtttctgaaaaaaaaaa

SEQ ID NO: 68722 - DNA, 477 bp, Homo sapiens
tagttccagtgtcagttcttggggattctcattttttgcttgctcattttttacccaaattcgtcttcctcttgagccaagaagactgtgtgcggcagtagaaatagcacaggccttggggacacgcagggctgggtgtgaaccctgatactgcctcatgctcataacctgccccgaggcaggtttttcactgctctatgagacaatttctacctctggaaaaggaggctggtgattgtccctatctcaaagggttgtagggaagagagttgactttgaaaactccacaaacaaggcttacctgaattattggcatataggcagcctgcaggacgtgttagccactttcttcttctcccctgactcttctcagtcgctggttatcagtgtcttttctaagcacagctctggaggaactggtccttatcaggcaagttggggtcccactatctttggaaggaacgaccatccagaatc

SEQ ID NO: 68723 - DNA, 1688 bp, Homo sapiens
tgagaactcaggccgagggcttcagacgctggtgcgcctgcttggggctcctgtgctcagctcagcctgagcttccacactcagcgctcagcaatggcccgggggcggggcgcggtcctcgcagattctcaaaggtagccgggatcctcgtccagcagtgtcagctcaggctcagcctccccagagacaacaccgggagcctcatctctctcctcaccctgctgtgactccaccacaggtttctagagccatctgggctttccgggaacctggaccagactctggcccagtaggatgtccccgtgtcctccccagcagagcaggaacagggtgatacagctgtccacttcagagctaggagagatggaactgacttggcaggagatcatgtccatcaccgagctgcagggtctgaatgctccaagtgagccatcatttgagccccaagccccagctccataccttggacctccaccacccacaacttactgcccctgctcaatccacccagattctggcttcccacttcctccaccaccttatgagctcccagcatccacatcccatgtcccagatcccccatactcctatggcaacatggccataccagtctccaagccactgagcctctcaggcctgctcagtgagccgctccaagaccccttagccctcctggacattgggctgccagcagggccacctaagccccaagaagacccagaatccgactcaggattatccctcaactatagcgatgctgaatctcttgagctggaggggacagaggctggtcggcggcgcagcgaatatgtagagatgtacccagtggagtacccctactcactcatgcccaactccttggcccactccaactataccttgccagctgctgagacccccttggccttagagccctcctcaggccctgtgcgggctaagcccactgcacggggggaggcagggagtcgggatgaacgtcgggccttggccatgaagattccttttcctacggacaagattgtcaacttgccggtagatgactttaatgagctattggcaaggtacccgctgacagagagccagctagcgctagtccgggacatccgacgacggggcaaaaacaaggtggcagcccagaactgccgcaagaggaagctggaaaccattgtgcagctggagcgggagctggagcggctgaccaatgaacgggagcggcttctcagggcccgcggggaggcagaccggaccctggaggtcatgcgccaacagctgacagagctgtaccgtgacattttccagcaccttcgggatgaatcaggcaacagctactctcctgaagagtacgcgctgcaacaggctgccgatgggaccatcttccttgtgccccgggggaccaagatggaggccacagactgagctggcccagaggggtggaactgctgatgggatttccttcattcccttctgataaaggtactccccaaccctgagtcccagaaggagctgagttctctagaccagaagaggatgacaatggcaacaagtgtttggaagttccaaggtgtgttcaaagaggcttgccttgagggagggctggaatctgtcttccctgactcggctcctcaggtctttagcctccaccttgtctaagctttggtctataaagtgcgctacagaaatggcattca

SEQ ID NO: 68724 - DNA, 1916 bp, Homo sapiens
ttaaggtatggcccaaatgaccctgtgaggacacaggacagaggtccagtgtctccagagcccattccttctgtgcctctgctgcctgcaactgataaacctcttatctggcccaggcaggggagcccagggccaggataggaggagagggcagagctgctatcaaccaccaggcctgggccatatcttggagaggaggaggggctgtctgcttgcctctttccacaacttgttcttggggatcctcaagcatatactgtcatcatcttggaaagaaaaggctgagaacgtaaaactgaggacagaggaggaaagcagggtgacccctgatgttgccctagaaaatggaaaacaaaacacagcaaaacagaaaaacagaagatctgactctgcctttagccaggaaaacagtttgggggagtaaaaagtattagggaaaagagtgggcattttgcctggaaaaaaggtttctagagccatctgggctttccgggaacctggaccagactctggcccagtaggatgtccccgtgtcctccccagcagagcaggaacagggtgatacagctgtccacttcagagctaggagagatggaactgacttggcaggagatcatgtccatcaccgagctgcagggtctgaatgctccaagtgagccatcatttgagccccaagccccagctccataccttggacctccaccacccacaacttactgcccctgctcaatccacccagattctggcttcccacttcctccaccaccttatgagctcccagcatccacatcccatgtcccagatcccccatactcctatggcaacatggccataccagtctccaagccactgagcctctcaggcctgctcagtgagccgctccaagaccccttagccctcctggacattgggctgccagcagggccacctaagccccaagaagacccagaatccgactcaggattatccctcaactatagcgatgctgaatctcttgagctggaggggacagaggctggtcggcggcgcagcgaatatgtagagatgtacccagtggagtacccctactcactcatgcccaactccttggcccactccaactataccttgccagctgctgagacccccttggccttagagccctcctcaggccctgtgcgggctaagcccactgcacggggggaggcagggagtcgggatgaacgtcgggccttggccatgaagattccttttcctacggacaagattgtcaacttgccggtagatgactttaatgagctattggcaaggtacccgctgacagagagccagctagcgctagtccgggacatccgacgacggggcaaaaacaaggtggcagcccagaactgccgcaagaggaagctggaaaccattgtgcagctggagcgggagctggagcggctgaccaatgaacgggagcggcttctcagggcccgcggggaggcagaccggaccctggaggtcatgcgccaacagctgacagagctgtaccgtgacattttccagcaccttcgggatgaatcaggcaacagctactctcctgaagagtacgcgctgcaacaggctgccgatgggaccatcttccttgtgccccgggggaccaagatggaggccacagactgagctggcccagaggggtggaactgctgatgggatttccttcattcccttctgataaaggtactccccaaccctgagtcccagaaggagctgagttctctagaccagaagaggatgacaatggcaacaagtgtttggaagttccaaggtgtgttcaaagaggcttgccttgagggagggctggaatctgtcttccctgactcggctcctcaggtctttagcctccaccttgtctaagctttggtctataaagtgcgctacagaaatggcattca

SEQ ID NO: 68725 - DNA, 1592 bp, Homo sapiens
atgaatccagcatgagtgaggatggggaggaggcggtctctccttccctcaggggaagctggagggagcccctccaaggaggtagtgcaaacttgctgaccctagcaggtgtagctctaacacctcttttcctttgacacaggtttctagagccatctgggctttccgggaacctggaccagactctggcccagtaggatgtccccgtgtcctccccagcagagcaggaacagggtgatacagctgtccacttcagagctaggagagatggaactgacttggcaggagatcatgtccatcaccgagctgcagggtctgaatgctccaagtgagccatcatttgagccccaagccccagctccataccttggacctccaccacccacaacttactgcccctgctcaatccacccagattctggcttcccacttcctccaccaccttatgagctcccagcatccacatcccatgtcccagatcccccatactcctatggcaacatggccataccagtctccaagccactgagcctctcaggcctgctcagtgagccgctccaagaccccttagccctcctggacattgggctgccagcagggccacctaagccccaagaagacccagaatccgactcaggattatccctcaactatagcgatgctgaatctcttgagctggaggggacagaggctggtcggcggcgcagcgaatatgtagagatgtacccagtggagtacccctactcactcatgcccaactccttggcccactccaactataccttgccagctgctgagacccccttggccttagagccctcctcaggccctgtgcgggctaagcccactgcacggggggaggcagggagtcgggatgaacgtcgggccttggccatgaagattccttttcctacggacaagattgtcaacttgccggtagatgactttaatgagctattggcaaggtacccgctgacagagagccagctagcgctagtccgggacatccgacgacggggcaaaaacaaggtggcagcccagaactgccgcaagaggaagctggaaaccattgtgcagctggagcgggagctggagcggctgaccaatgaacgggagcggcttctcagggcccgcggggaggcagaccggaccctggaggtcatgcgccaacagctgacagagctgtaccgtgacattttccagcaccttcgggatgaatcaggcaacagctactctcctgaagagtacgcgctgcaacaggctgccgatgggaccatcttccttgtgccccgggggaccaagatggaggccacagactgagctggcccagaggggtggaactgctgatgggatttccttcattcccttctgataaaggtactccccaaccctgagtcccagaaggagctgagttctctagaccagaagaggatgacaatggcaacaagtgtttggaagttccaaggtgtgttcaaagaggcttgccttgagggagggctggaatctgtcttccctgactcggctcctcaggtctttagcctccaccttgtctaagctttggtctataaagtgcgctacagaaatggcattca

SEQ ID NO: 68726 - DNA, 906 bp, Homo sapiens
ttaaggtatggcccaaatgaccctgtgaggacacaggacagaggtccagtgtctccagagcccattccttctgtgcctctgctgcctgcaactgataaacctcttatctggcccaggcaggggagcccagggccaggataggaggagagggcagagctgctatcaaccaccaggcctgggccatatcttggagaggaggaggggctgtctgcttgcctctttccacaacttgttcttggggatcctcaagcatatactgtcatcatcttggaaagaaaaggctgagaacgtaaaactgaggacagaggaggaaagcagggtgacccctgatgttgccctagaaaatggaaaacaaaacacagcaaaacagaaaaacagaagatctgactctgcctttagccaggaaaacagtttgggggagtaaaaagtattagggaaaagagtgggcattttgcctggaaaaaaggtttctagagccatctgggctttccgggaacctggaccagactctggcccagtaggatgtccccgtgtcctccccagcagagcaggaacagggtgatacagctgtccacttcagagctaggagagatggaactgacttggcaggagatcatgtccatcaccgagctgcagggtctgaatgctccaagtgagccatcatttgagccccaagccccagctccataccttggacctccaccacccacaacttactgcccctgctcaatccacccagattctggcttcccacttcctccaccacctgccagctggctcagccggctgagcaagcgggctggcgttacatggggtaacgacgggtggggtcactttccgtaaatggtagtaagggtagggaagcgagtttgacctggtagggtgagaagacatatgcgagtgcta

SEQ ID NO: 68727 - DNA, 1770 bp, Homo sapiens
tgaaccagttgtttccgtcttgtcggtctgtcagggttggaaagtccaagccataggacccagtttcctttcttagcttacgttatctaccagagcaccgtgggctgttacttgccttgagttggaagcggttcgcatttataccggaatataaatagtttctggaaaggacactgacaacttcaaagcaaaatgaagctcttttggttgcttttcaccattgggttctgctgggctcagtattcctcaaatacacaacaaggacgaacatctattgttcatctgtttgaatggcgatgggttgatattgctcttgaatgtgagcgatatttagctcccaagggatttggaggggttcaggtctctccaccaaatgaaaatgttgccattcacaaccctttcagaccttggtgggaaagataccaaccagttagctataaattatgcacaagatctggaaatgaagatgaatttagaaacatggtgactagatgcaacaatgttggggttcgtatttatgtggatgctgtaattaatcatatgtgtggtaatgctgtgagtgcaggaacaagcagtacctgtggaagttacttcaaccctggaagtagggactttccagcagtcccatattctggatgggattttaatgatggtaaatgtaaaactggaagtggagatatcgagaactataatgatgctactcaggtcagagattgtcgtctgtctggtcttctcgatcttgcactggggaaggattatgtgcgttctaagattgccgaatatatgaaccatctcattgacattggtgttgcagggttcagaattgatgcttccaagcacatgtggcctggagacataaaggcaattttggacaaactgcataatctaaacagtaactggttcccggaaggtagtaaacctttcatttaccaggaggtaattgatctgggtggtgagccaattaaaagcagtgactactttggtaatggccgggtgacagaattcaagtatggtgcaaaactcggcacagttattcgcaagtggaatggagagaagatgtcttacttaaagaactggggagaaaggttggggtttcatgccttctgacagagcgcttgtctttgtggataaccatgacaatcaacgaggacatggcgctggaggagcctctatacttaccttctgggatgctaggctgtacaaaatggcagttggatttatgcttgctcatccttatggatttacacgagtaatgtcaagctaccgttggccaagatattttgaaaatggaaaagatgttaatgattgggttgggccaccaaatgataatggagtaactaaagaagttactattaatccagacactacttgtggcaatgactgggtctgtgaacatcgatggcgccaaataaggaacatggttaatttccgcaatgtagtggatggccagccttttacaaactggtatgataatgggagcaaccaagtggcttttgggagaggaaacagaggattcattgttttcaacaatgatgactggacattttctttaactttgcaaactggtcttcctgctggcacatactgtgatgtcatttctggagataaaattaatggcaactgcacaggcattaaaatctacgtttctgatgatggcaaagctcatttttctattagtaactctgctgaagatccatttattgcaattcatgctgaatctaaattgtaaaatttaaaattaaatgcaaatccgcaaagcaataaaaaaat

SEQ ID NO: 68728 - DNA, 1801 bp, Homo sapiens
tgaaccagttgtttccgtcttgtcggtctgtcagggttggaaagtccaagccataggacccagtttcctttcttagcttacgttatctaccagagcaccgtgggctgttacttgccttgagttggaagcggttcgcatttataccggaatataaatagtttctggaaaggacactgacaacttcaaagcaaaatgaagctcttttggttgcttttcaccattgggttctgctgggctcagtattcctcaaatacacaacaaggacgaacatctattgttcatctgtttgaatggcgatgggttgatattgctcttgaatgtgagcgatatttagctcccaagggatttggaggggttcaggtctctccaccaaatgaaaatgttgccattcacaaccctttcagaccttggtgggaaagataccaaccagttagctataaattatgcacaagatctggaaatgaagatgaatttagaaacatggtgactagatgcaacaatgttggggttcgtatttatgtggatgctgtaattaatcatatgtgtggtaatgctgtgagtgcaggaacaagcagtacctgtggaagttacttcaaccctggaagtagggactttccagcagtcccatattctggatgggattttaatgatggtaaatgtaaaactggaagtggagatatcgagaactataatgatgctactcaggtcagagattgtcgtctgtctggtcttctcgatcttgcactggggaaggattatgtgcgttctaagattgccgaatatatgaaccatctcattgacattggtgttgcagggttcagaattgatgcttccaagcacatgtggcctggagacataaaggcaattttggacaaactgcataatctaaacagtaactggttcccggaaggtagtaaacctttcatttaccaggaggtaattgatctgggtggtgagccaattaaaagcagtgactactttggtaatggccgggtgacagaattcaagtatggtgcaaaactcggcacagttattcgcaagtggaatggagagaagatgtcttacttaaagaactggggagaaaggttggggtttcatgccttctgacagagcgcttgtctttgtggataaccatgacaatcaacgaggacatggcgctggaggagcctctatacttaccttctgggatgctaggctgtacaaaatggcagttggatttatgcttgctcatccttatggatttacacgagtaatgtcaagctaccgttggccaagatattttgaaaatggaaaagatgttaatgattgggttgggccaccaaatgataatggagtaactaaagaagttactattaatccagacactacttgtggcaatgactgggtctgtgaacatcgatggcgccaaataaggaacatggttaatttccgcaatgtagtggatggccagccttttacaaactggtatgataatgggagcaaccaagtggcttttgggagaggaaacagaggattcattgttttcaacaatgatgactggacattttctttaactttgcaaactggtcttcctgctggcacatactgtgatgtcatttctggagataaaattaatggcaactgcacaggcattaaaatctacgtttctgatgatggcaaagctcatttttctattagtaactctgctgaagatccatttattgcaattcatgctgaatctaaattgtaaaatttaaaattaaatgctgatgcggccgaaacccccttattaaattgcatttacgtctgaaagaaaaaacca

SEQ ID NO: 68729 - DNA, 1447 bp, Homo sapiens
cagaatttggtacttatgaagactgtttaatttgtaggtctctccaccaaatgaaaatgttgccattcacaaccctttcagaccttggtgggaaagataccaaccagttagctataaattatgcacaagatctggaaatgaagatgaatttagaaacatggtgactagatgcaacaatgttggggttcgtatttatgtggatgctgtaattaatcatatgtgtggtaatgctgtgagtgcaggaacaagcagtacctgtggaagttacttcaaccctggaagtagggactttccagcagtcccatattctggatgggattttaatgatggtaaatgtaaaactggaagtggagatatcgagaactataatgatgctactcaggtcagagattgtcgtctgtctggtcttctcgatcttgcactggggaaggattatgtgcgttctaagattgccgaatatatgaaccatctcattgacattggtgttgcagggttcagaattgatgcttccaagcacatgtggcctggagacataaaggcaattttggacaaactgcataatctaaacagtaactggttcccggaaggtagtaaacctttcatttaccaggaggtaattgatctgggtggtgagccaattaaaagcagtgactactttggtaatggccgggtgacagaattcaagtatggtgcaaaactcggcacagttattcgcaagtggaatggagagaagatgtcttacttaaagaactggggagaaaggttggggtttcatgccttctgacagagcgcttgtctttgtggataaccatgacaatcaacgaggacatggcgctggaggagcctctatacttaccttctgggatgctaggctgtacaaaatggcagttggatttatgcttgctcatccttatggatttacacgagtaatgtcaagctaccgttggccaagatattttgaaaatggaaaagatgttaatgattgggttgggccaccaaatgataatggagtaactaaagaagttactattaatccagacactacttgtggcaatgactgggtctgtgaacatcgatggcgccaaataaggaacatggttaatttccgcaatgtagtggatggccagccttttacaaactggtatgataatgggagcaaccaagtggcttttgggagaggaaacagaggattcattgttttcaacaatgatgactggacattttctttaactttgcaaactggtcttcctgctggcacatactgtgatgtcatttctggagataaaattaatggcaactgcacaggcattaaaatctacgtttctgatgatggcaaagctcatttttctattagtaactctgctgaagatccatttattgcaattcatgctgaatctaaattgtaaaatttaaaattaaatgcaaatccgcaaagcaataaaaaaat

SEQ ID NO: 68730 - DNA, 589 bp, Homo sapiens
tggtcttcactggacaccatgaaccacactgtccaaacttcttctctcctgtcaacagcgccagccccccaactatgagatgctcaaggaggagcacgaggtggctgtgctgggggcgccccacaaccctgctcccccgacgtccaccgtgatccacatccgcagcgagacctccgtgcccgaccatgtcgtctggtccctgttcaacaccctcttcatgaacccctgctgcctgggcttcatagcattcgcttactccgtgaagtctagggacaggaagatggttggcgacgtgaccggggcccaggcctatgcctccaccgccaagtgcctgaacatctgggccctgattctgggcatcctcatgaccattctgctcatcgtcatcccagtgctgatcttccaggcctatggatagatcaggaggcatcactgaggccaggagctctgcccatgacctgtatcccacgtactccaacttccattcctcgccctgcccccggagccgagtcctgtatcagccctttatcctcacacgcttttctacaatggcattcaataaagtgcacgtgtttctggtaaaaaataa

SEQ ID NO: 68731 - DNA, 278 bp, Homo sapiens
caaaaattagccgggtgtgctggtacatgcctgtagtcccagctactccggaggctgaggcgggagaatcacctgaacctgggaagtggaggttgcagtgagccgaggtcgcgccactgtactccagcctgggcaacagagtgagactccgtctcagaaaaaacaaaaaatttatttaatacacacaaaaataaaaatatccacgttttggggacagttttctaagtggaaggtcttaatctcttggagaagtggggcatgaatcctgccagcccttc

SEQ ID NO: 68732 - DNA, 346 bp, Homo sapiens
ctagtattttctagagtgctgtgatatttgcagaattaacccacaaaacagtatcctatgggccaaccggtgatgagactgagtttgcctttgagaactccggtgggtgttctaacctaactttcctacctctcttcactgtcatttatattgttgcctgaggactcttcctaatacctagccaaagtatggggggcctctgctgtctgagaggtcaacttctaacaatttagtgtgacctcaaggccaccccatgacctgactccattctcctttttcactctcgtcttcggccacctctctcaatttgccagactatctgctctccctggaatccaccatggac

SEQ ID NO: 68733 - DNA, 188 bp, Homo sapiens
tacggtgtaacatcctcctcctccttctcctcctcctcctcgggagccgctgcaacttcccctcagccagcctcctcctctgcctggggactgcaaaggcatgggatagacccagagccgcttccctctgtctcccctccagccctcgctcaattttcccccctttaaattaaagtctgttcctcgct

SEQ ID NO: 68734 - DNA, 319 bp, Homo sapiens
ttgtgaagaataaatttggtaatacaatttaaaatatctggaaaattataaatggggacaacagatcaatggaggaggattgagcttagatttaattgttaagattgttaggttttctggttgttcacttagtttttagaaaatttttaaaaagactaaaaaaaaacccatttttaaaaaagattgggccaggcgcagtggctcatgcctgtaaccccagcactttgggaggctgaggtgggaggattgcttgagcccaggagttcgagccagcagttcaagaccagcctgggaacatgccaaaccttgtctttacaaa

SEQ ID NO: 68735 - DNA, 1637 bp, Homo sapiens
tttagcttccctgaggtaactggtgattagttcctggaaaggcaggagctcagctgggcacaagagagttaagcagagagctggatcctccggggccctgatgcaccctgacgaggagtggttttcaggcaaggaacttatcacaggagtgagtagtggcacacggtgagtagtgctagctgtcttgtcgttagggtgaggccggtgggagttgtggtttggggagtgtagaggagggttgataggctactgagattggagaatcagctttatgtgggtcatggtggtggcagcctgggagatgaacaaggaaactttgcagagtgggcttcctgatggagagtgacctcttactgcgtgggagtgggtgactcagatctgttaggattcctgttgcttgctagggattgtggctgactatattggtggctgaacattgaggtggatgcaactggaagggttatgtggggctggatgagtttgttcccacgtagaggacagtgtggacctttcttactccaagtcagagtggtgactgtcattgacaacattttaagtaaggaatttctttgtggtatttggatccaaagcttttctctgttcatttttttctttcctccgttgtttttgaattgtgactcatactttcttttcagcactgtggctatttgaaatgatagacaaacttagacttcatcatacatgtaagttccaggcgttttcagtccaattcttataaatctaaatttaaaagcttcttttcactaatttgtgtaccattgtttaatgtgtgcaacactaaagaaggataagaaaactctaacatttatgttgttaaatggtctttccatccttaaatccatgaaatttcatcttctcttactgccatgaagtgagttcgttgaatctattaaatcttagtgactctcatttcagcatccttgtttactctcacaggacattgtcttcactagaagtattatccatcttcaatgaatttggcctgtacactgtctccctgtgacaatctatatcattgaaagacagtacgcaaactccaactctgaggcctgcagctgtgggccggagctctgtatgtattattcaggcaaaagttggtgtgttgtctgtaggtgaggtttaaagggaaccctacatgaacaaaaacagtatcagaatcattgtaccttctgagtttagagtggtaggaaatatagcctaactggagtctagtataaactttcaagtgcaatgttaggtaattctgtttgtagttgtactgatagttctcattattgtaaacattatctttttccttaagctttaaataattatttttcttcaatggtattctttctttcttggctgggtgtggtggctaacgcctgtaatcccaacactttgggaggtcgaggcgggcatatcacatgaggtcaggagattgagcctgcatggcgaaaccctgtctctactaaaactacaaaaattagccggtggggtggcatgtgcctgtagtcccagctactctggaggcagagggacaagaatcacttgaatctgggaggcagaggttacaatgagccgagatcgtgccactgcactccagcctcagcgacaaagcgagactctgactcaaa

SEQ ID NO: 68736 - DNA, 567 bp, Homo sapiens
aataggtccatctaattggagccaatgattacctctgagtgtccacctcttgttccacacttttatacttccccaaaggcgtaagtgaaccttatctaaattcaagccatttactgttattttccatcattttacctttgtcttaatttgctaaatacagttaacacttgaacaacacgggtttgaactgtgcggatcgatcaatgcaacctggtacatgggattctaaacaccgtattgagagggccgacttttcttatactcacattccacaggacggacaggcagacttgagtatgcttggattggggtatatgtggtgggtcctggaaccaatcccacgtatatagtatatgggggatgactgtattgcattaactgaaagagctatgattagcaaactaaaaagcggtgtgtaaacactgcttctttataatttatggaaatgttaaataagatcagtccccactgtttacacttattactaacctttattacttgactttgcttctatttcctagccacaatttaaaaaacaaaattaaaatggtatcaacaacaaaagaa

SEQ ID NO: 68737 - DNA, 920 bp, Homo sapiens
gcacggaggggcagagaccccggagccccagccccaccatgaccctcggccgccgactcgcgtgtcttttcctcgcctgtgtcctgccggccttgctgctggggggcaccgcgctggcctcggagattgtggggggccggcgagcgcggccccacgcgtggcccttcatggtgtccctgcagctgcgcggaggccacttctgcggcgccaccctgattgcgcccaacttcgtcatgtcggccgcgcactgcgtggcgaatgtaaacgtccgcgcggtgcgggtggtcctgggagcccataacctctcgcggcgggagcccacccggcaggtgttcgccgtgcagcgcatcttcgaaaacggctacgaccccgtaaacttgctcaacgacatcgtgattctccagctcaacgggtcggccaccatcaacgccaacgtgcaggtggcccagctgccggctcagggacgccgcctgggcaacggggtgcagtgcctggccatgggctggggccttctgggcaggaaccgtgggatcgccagcgtcctgcaggagctcaacgtgacggtggtgacgtccctctgccgtcgcagcaacgtctgcactctcgtgaggggccggcaggccggcgtctgtttcggggactccggcagccccttggtctgcaacgggctaatccacggaattgcctccttcgtccggggaggctgcgcctcagggctctaccccgatgcctttgccccggtggcacagtttgtaaactggatcgactctatcatccaacgctccgaggacaacccctgtccccacccccgggacccggacccggccagcaggacccactgagaagggctgcccgggtcacctcagctgcccacacccacactctccagcatctggcacaataaacattctctgttttgt

SEQ ID NO: 68738 - DNA, 2582 bp, Homo sapiens
cgagtgacctcgcgatctggcccggctcccgctcgtcgcaacagcgtgactacagggtatggcggggtccgggcactgtgcggctggacccccagttctggggccacgccgcggaaccgcttactgctgcagcttttggggtcgcccggccgccgctattacagtcttcccccgcatcagaaggttccattgccttctctttcccccacaatgcaggcaggcaccatagcccgttggaaaaaaaaagagggggacaaaatcaatgaaggtgacctaattgcagaggttgaaactgataaagccactgttggatttgagagcctggaggagtgttatatggcaaagatacttgttgctgaaggtaccagggatgttcccatcggagcgatcatctgtatcacagttggcaagcctgaggatattgaggcctttaaaaattatacactggattcctcagcagcacctaccccacaagcggccccagcaccaacccctgctgccactgcttcgccacctacaccttctgctcaggctcctggtagctcatatccccctcacatgcaggtacttcttcctgccctctctcccaccatgaccatgggcacagttcagagatgggaaaaaaaagtgggtgagaagctaagtgaaggagacttactggcagagatagaaactgacaaagccactataggttttgaagtacaggaagaaggttatctggcaaaaatcctggtccctgaaggcacaagagatgtccctctaggaaccccactctgtatcattgtagaaaaagaggcagatatatcagcatttgctgactataggccaaccgaagtaacagatttaaaaccacaagcgccaccacctaccccagccccggtggccgctgttcctccaactccccagcctttagctcctacaccttcagcaccctgcccagctactcctgctggaccaaagggaagggtgtttgttagccctcttgcaaagaagttggcagtagagaaagggattgatcttacacaagtaaaagggacaggaccagatggtagaatcaccaagaaggatatcgactcttttgtgcctagtaaagttgctcctgctccggcagctgttgtgcctcccacaggtcctggaatggcaccagttcctacaggtgtcttcacagatatcccaatcagcaacattcgtcgggttattgcacagcgattaatgcaatcaaagcaaaccatacctcattattacctttctatcgatgtaaatatgggagaagttttgttggtacggaaagaacttaataagatattagaagggagaagcaaaatttctgtcaatgacttcatcataaaagcttcagctttggcatgtttaaaagttcccgaagcaaattcttcttggatggacacagttataagacaaaatcatgttgttgatgtcagtgttgcggtcagtactcctgcaggactcatcacacctattgtgtttaatgcacatataaaaggagtggaaaccattgctaatgatgttgtttctttagcaaccaaagcaagagagggtaaactacagccacatgaattccagggtggcacttttacgatctccaatttaggaatgtttggaattaagaatttctctgctattattaacccacctcaagcatgtattttggcaattggtgcttcagaggataaactggtccctgcagataatgaaaaagggtttgatgtggctagcatgatgtctgttacactcagttgtgatcaccgggtggtggatggagcagttggagcccagtggcttgctgagtttagaaagtaccttgaaaaacctatcactatgttgttgtaactaactcaagaatttctaaactctcccaggtcacactgattcattcttaacaagatatttatatgttattaaacaggtggttctttttattttaaccagttatttttattattgagtctgtccagataagttatttataatgggcattactgaatttttaaaatgccgattacacccaaatattgtgcacatttaataatcagacaccagatttttagctctgtactcctaattaagggacatgtatgtggccttgcctagccctttggtgataagtacttcctctaggaaatgtacgataggtagaattgtggttccctaaagacaagtacataaaggtgaccctgatgaaaccttgaagttctgaaatttaactgcctaaaatgttctccttagatgtgagagaaagagaaatcagaaaaattaattctcttgggggaagggcttgaattgaagctttactttagaatttagccctggtttgaaattttccattacatgatcttggtttatcatcgatgggaagggtagaaaacttcaaggaaaataagtgaaattttaaaagtcagcattttcttagacctcttcagctgattgtttatttttctatgaattctgtactcaaaattacacatttgtttaaataaatatccacacaaattctcagttacatcaagtagctggtttatatttagattatctcaagtaggggggaataaccatgtgtaggaatt

SEQ ID NO: 68739 - DNA, 2928 bp, Homo sapiens
cgagtgacctcgcgatctggcccggctcccgctcgtcgcaacagcgtgactacagggtatggcggggtccgggcactgtgcggctggacccccagttctggggccacgccgcggaaccgcttactgctgcagcttttggggtcgcccggccgccgctattacagtcttcccccgcatcagaaggttccattgccttctctttcccccacaatgcaggcaggcaccatagcccgttggaaaaaaaaagagggggacaaaatcaatgaaggtgacctaattgcagaggttgaaactgataaagccactgttggatttgagagcctggaggagtgttatatggcaaagatacttgttgctgaaggtaccagggatgttcccatcggagcgatcatctgtatcacagttggcaagcctgaggatattgaggcctttaaaaattatacactggattcctcagcagcacctaccccacaagcggccccagcaccaacccctgctgccactgcttcgccacctacaccttctgctcaggctcctggtagctcatatccccctcacatgcaggtacttcttcctgccctctctcccaccatgaccatgggcacagttcagagatgggaaaaaaaagtgggtgagaagctaagtgaaggagacttactggcagagatagaaactgacaaagccactataggttttgaagtacaggaagaaggttatctggcaaaaatcctggtccctgaaggcacaagagatgtccctctaggaaccccactctgtatcattgtagaaaaagaggcagatatatcagcatttgctgactataggccaaccgaagtaacagatttaaaaccacaagcgccaccacctaccccagccccggtggccgctgttcctccaactccccagcctttagctcctacaccttcagcaccctgcccagctactcctgctggaccaaagggaagggtgtttgttagccctcttgcaaagaagttggcagtagagaaagggattgatcttacacaagtaaaagggacaggaccagatggtagaatcaccaagaaggatatcgactcttttgtgcctagtaaagttgctcctgctccggcagctgttgtgcctcccacaggtcctggaatggcaccagttcctacaggtgtcttcacagatatcccaatcagcaacattcgtcgggttattgcacagcgattaatgcaatcaaagcaaaccatacctcattattacctttctatcgatgtaaatatgggagaagttttgttggtacggaaagaacttaataagatattagaagggagaagcaaaatttctgtcaatgacttcatcataaaagcttcagctttggcatgtttaaaagttcccgaagcaaattcttcttggatggacacagttataagacaaaatcatgttgttgatgtcagtgttgcggtcagtactcctgcaggactcatcacacctattgtgtttaatgcacatataaaaggagtggaaaccattgctaatgatgttgtttctttagcaaccaaagcaagagagggtaaactacagccacatgaattccagggtggcacttttacgatctccaatttaggaatgtttggaattaagaatttctctgctattattaacccacctcaagcatgtattttggcaattggtgcttcagaggataaactggtccctgcagataatgaaaaagggtttgatgtggctagcatgatgtctgttacactcagttgtgatcaccgggtggtggatggagcagttggagcccagtggcttgctgagtttagaaagtaccttgaaaaacctatcactatgttgttgtaactaactcaagaatttctaaactctcccaggtcacactgattcattcttaacaagatatttatatgttattaaacaggtggttctttttattttaaccagttatttttattattgagtctgtccagataagttatttataatgggcattactgaatttttaaaatgccgattacacccaaatattgtgcacatttaataatcagacaccagatttttagctctgtactcctaattaagggacatgtatgtggccttgcctagccctttggtgataagtacttcctctaggaaatgtacgataggtagaattgtggttccctaaagacaagtacataaaggtgaccctgatgaaaccttgaagttctgaaatttaactgcctaaaatgttctccttagatgtgagagaaagagaaatcagaaaaattaattctcttgggggaagggcttgaattgaagctttactttagaatttagccctggtttgaaattttccattacatgatcttggtttatcatcgatgggaagggtagaaaacttcaaggaaaataagtgaaattttaaaagtcagcattttcttagacctcttcagctgattgtttatttttctatgaattcctacacatggttattcccccctacttgagataatctaaatataaaccagctacttgatgtaactgagaatttgtgtggatatttatttaaacaaatgtgtaattttgagtacagaattcaacagttacctccaaaaaagaaacattgttaatataatttaacagaagttgtgaaactaaaattttctaagattaactggtagttcattgtaaatgaacataatgaacagaatttatgactccactgtggaaaatgctatcaaataactaaggaatatatatggaataagtgtacatatgtaaaatattgttactagagttagatatgtgccaaagtccatttatcccaaatcctgtctgaaaaggaggggtacattggtaaacattttggagtgcttaaaaatgccaaaaacaaatggtaatttctactttgataaagtaaaaaagtcaaatgtgtgtaaaaaa

SEQ ID NO: 68740 - DNA, 737 bp, Homo sapiens
tacccacctcaggtagcctagtgatatttgcaaaatcccaatggcccggtccttttctttactgatggccgtgctggtactcagctacaaatccatctgctctctgggctgtgatctgcctcagacccacagcctgcgtaataggagggccttgatactcctggcacaaatgggaagaatctctcctttctcctgcttgaaggacagacatgaattcagattcccggaggaggagtttgatggccaccagttccagaagactcaagccatctctgtcctccatgagatgatccagcagaccttcaatctcttcagcacagaggactcatctgctgcttgggaacagagcctcctagaaaaattttccactgaactttaccagcaactgaatgacctggaagcatgtgtgatacaggaggttggggtggaagagactcccctgatgaatgaggacttcatcctggctgtgaggaaatacttccaaagaatcactctttatctaacagagaagaaatacagcccttgtgcctgggaggttgtcagagcagaaatcatgagatccttctctttttcaacaaacttgaaaaaaggattaaggaggaaggattgaaaactggttcatcatggaaatgattctcattgactaatgcatcatctcacactttcatgagttcttccatttcaaagactcacttctataaccaccacaagttgaatcaaaatttccaaatgttttc

SEQ ID NO: 68741 - DNA, 398 bp, Homo sapiens
ctgttgtattcattcacatagatataatttataataatgcattttgtttattaaaaaatgactgggccaggcagagtggctcatagtggctcatgcctgtaatcccagcactttgggaggctcaggtgggaggattgcttgagcccaggagttcaagaccagcctgggcaacatggcgaaaccctgtctctacaagaaatacaaaaaaatgagctgggactacaggcgcccatcaccacgcccggctaatttttcttgcatttttagtagagatggggtttcaccatgttagccaggatggtctcgatctcctgacctcgtgatccgcctgcctcagcctcccaaagtgctgggattacgggcgtgacgaccacacccggccgctgttgagctttttt

SEQ ID NO: 68742 - DNA, 199 bp, Homo sapiens
actccagcaacaaatttttattcttttacctttttaaaaaatattttttctccttttttccatatcttatttatacaaaagcaggtggaaaaaatgtcgcggtctttctgttgttctaaagagactatcatatttcttttgactttgaaagatttagctgtttttcaggttaatggaaaacccattcaaaattcctttt

SEQ ID NO: 68743 - DNA, 365 bp, Homo sapiens
ctccttggcatcatttagcctagtatatttgaaacagcaaattaactgtcatcctgtgtattcttttatttttttctcactttatagagtaaacattaaaaacaataacaacaacaaaaaccacctcttactatggtctttgttactttatgattctctactgtaatatgattaacatatagccatgcaccatataacatttccgtgaatgacagatcacatacacatccttatattgtagtactgtatttctaccgtaccttttctatcttcagatatgttttgatacacaaatacttaccattgtattataattgcctacagtattcagtacagtaacttgatgtacagtaggtgtatcgtct

SEQ ID NO: 68744 - DNA, 6614 bp, Homo sapiens
  misc_feature (508)..(508): n is a, c, g, or t
  misc_feature (605)..(605): n is a, c, g, or t
  misc_feature (628)..(628): n is a, c, g, or t
  misc_feature (744)..(744): n is a, c, g, or t
  misc_feature (747)..(747): n is a, c, g, or t
  misc_feature (840)..(840): n is a, c, g, or t
  misc_feature (886)..(886): n is a, c, g, or t
  misc_feature (926)..(927): n is a, c, g, or t
  misc_feature (3068)..(3068): n is a, c, g, or t
  misc_feature (3389)..(3389): n is a, c, g, or t
  misc_feature (6294)..(6294): n is a, c, g, or t
actatcctttcaggaatccctaatttcataggcaatttatatgaacaaaactaatgagccttcaaaattccttagtctaaactattcaatagtgtttttaccctaaagcaataattttggtaaagtacataacactaatgtattcataataaaaaaaagtgtcaggaaaggtttaaaatgtaaaggcagtaagtctaaaataacacaattaagaataagaggatattttcctcacactataagatgtgtaagaattcttacaatgttccttttaatatttagtaacactatctaatagtactttttggccgggtgcagtggctcacgcctgtaatcccaacactttgggaggccgaggcgggcggatcacgagttcaggagatcgagatcacagtgaaacaccgtctctactaaaaatacaaaaaattagctgggggcagtggcgggtgcctgtagtcccagctactcgggaggctgaggcaggagaatggcatgaatccgggaggcngagcttgcagtgagccgagatcgcgccactgcactccagcctgggctatagagggagactccgtctcaaaaaaaaaaaaaaaaaaaaaaaaaaagtngaacttttttcttttaaagtaanaaaagtattttgatagtatttttaagtaccatgtttttctttgtatgttactaaaaaccactgtcatgcaaattctagtaatgaaaacaatttaagctccaagtttttcctaccanaanagcctcaggcacagatggccttttttttaatctagttaacaccatatcccaggtcatcatctgattaagcaagagtgcatttccatgaacaanacactattctttgggaaatatccacaacttatattgaaattgctgngccacagcatataaccgctcccttcagtttttttgaaagnntcttttcttgataataggcaattgtgtgggcctcctgagaaaaacactgggttagtgggaagtgatggatgaagaagatttcagtaaaaatttgagcaaatacttctctttagtttccacatactttaatatttaggaacattttgtaatttgtgaaacacactttcagagtaaaaaaataataattactaaaaccaaaaaaacagaaagagaatatacaaaattatcttatgctagggtgataaaaattatgaatatgattgtacatatcagtgaacactgtttcttatataatatattaaatgtataaaatataaatttaacaaatgaaattatgtgtgtagtttttggtaatcttttttgtctattatatattattaaatgcatatcagtagatacacttctaaaatatgattttacaataataaatatcctaccaaccaaaaaaagcccaggaccagatggattcacagctgaattctaccagatgtacagacaagaactggtactattcctgctaaaactattacaaaaaaggaatcatgttaccccactttaaactagactacagagctacagtaacccaaatagtatggtactagtacaaaaacagacacataaaccaatggaacagaatagagaacccagaaataaggccacacacctacaactatctgatctttgacaaagctgcaaaaaacaagcaatggggaaaggattccctatttaataaatggtgctgggataactggctagcaatatgcagaagattgaaattggaccccttccttataccatgtacaaaaatcaacttaagatgattgaagacttaaatgtaaaacccaaaactgtcaaaactctgaaagacaacctaggcaaaaccattctggtcgtaggagatggcaaaagtttcatgatgaagacaccaaaagcaattacagcaaaagcaaaaattgacaaatgggatctaattaaacttaagatcttctgcacagaaaaactatcaatagagtaaacagcctgcaggatgggagaaaatatttgcaaagtatgcacctgttaaaggcctaatattcataatctataagacacctaaacaaatttacaagaaagaaaacaatcccatcaaaagtgagcaaaggacgtgaacagacacttttcaaaagaagacatacatgcagccaaaaagcatatgaaaaaaagctcagtatcactgatcattagagaagtacaaattcaaacaacaatgtgataccatctcacaccagtcagaatggctattgctaaaagtcaaaaaataacagatgctgttgaggttgtggagaaaaaggaacacttttataccattggtgggaatgtaaattagttcaaccattgcggaaagcagtgtggcacttcctcaaagagctaaaaagagaacaaccatttgacccagcaatatcattattgggtatatacccaaaggaatataaattatcctaccataaagatacatggatgtgtttgttcattgcagcactattcacaatagcaaagacgtggaatcaatggcagattgaataaaaaaagtggtacatatacacgatggaatactatgcaatcacaaaagggagcacaatcatgtcctttgctgaaacatggatggagctggaggccactatccctagcaaactaacacagaaacagaaaaccaaatgccacatgttctcacttacaagtgggcactagatgatgagaatacatagacaagaagaggggaacaacatacactggggcctacttgagggtgaagagagggaggagggaggacggaggggattaagaaaaataactattggctacaaggcttagtacctgggcgattaaattatctgtataccaaacccctgtgtcgtgagtttacctatgtaataaaccttcaatatacttaaagtttttaaaaaaatacacataacatttaaaaatatgatttaatgtctaaattatagtttattgtataaatataccataagttcataaatcaatcctctattattgatcatttaggtcattcacaatttttaccattataaaaactcaaggtaattaaatactaatgctaatttttatgttttgccagtataaattcccagaattagaantgctgtatgcacattttaaggcttttgataatttttaagttctttactgttcttaagcacagatctaataaattttggtcacattcctggaataacagtagaaattaattatgtagacacaaatctgacatttctagggttattttccttcccttgaaagtgctccttctcagctgagcactgtggctcacgtctgtaatcccagcactttggggggccaaggcaggcggatcatgaggtcaagagatcaagaccatcctggccaacatggcgaaaccccatctctactaaaaatacaaaaattagctgggtgtggtggcntgcacctgtagtcccaactactcaggaggctgaggcaggagaatagtttgaacttgggaggtggaaattgcagtgagccaagattgtgccactgcactccagcctagcaacagagcaagactccgtcaaaaaaagaaagaaagaaagaaagaaagtgctcctgaacatttcattcattgacaaaagctgttcattcaatgactccatcatctgttgaattcctgttacttgcaaagtgcctgataagtacgggggatacagcagtaagatttttaaatagaggcacaaccctgatagagctagcttacaggctaatgtagaatataaataaataaacaagaattgcaataagtagtgtttctcaatgtatagtcagagatgttgccccaaagatgtattggaatcacccatgaggttattccaaatctaatatccacctttaaaaaaagtatgggaccccagtcaagaaactcaatgatagtaagttagttagtgaaagttttccaagtattaaaaaagaaaaagaaaaatagaaccagtgttaagcatcactgaaaaataatatttcagtactatatttgatgtgatcaagaaattaaagtacataagagggacacctagatcagctttgaggccctaaagattgtgtctcagaagaagtgatatctgagacgatatatgaaaaataaagatgagtagaagctggttaaaaatgagcatgagaggcaaggagaggggactgtccacggcattctgggcagaatcaacagcaaatagaaatgctgaaagtgagaaatagcataccataaaaaatgaatgtaatttagaactgtgggactgttgcacttaaaggtgttttggttgggtagaaacgaggataaaaaagtaaatggagatgataacatgaaggaatttataaacaacttacctagatttacttaagaactttgggaatttattgattggtattaacaagggaatggcacaatcagattagaattttacaaagatcccttggatacagtgtggaaagtggattggagcagggcccagttagaaacagggaggtaaactgcaatgaggctacaagagatgagagtagcatgctgtacagtgatgccggtaggacagaagggcaggggctggtgtttctagtgatgaaattgacaaagctatgtgatttccaggatggggagtgtcggatgggaaacagcaaagggagagccctagaaatctggtttgagcagctgggaaagcagatgcactcaccaagaaaaacgtttgcagagaagccagtagagaggggaggtccagagacactcaagttgaacaagttaccttgagattcctgtgaggtaaacaatggagagcttgaacaagcagttgagcctgaagtttagaaaagaaatgggtggacatagagatggggtgttggaattattattattattattattattgtttttttgagatggagtcttgctgtgtcacccaggctggagtgcagtggtgtgatctcggttcactgcaacctccgcctgccgggttgaagcgattctcctgcctcagcctcccgagtagctgggattacaggcgcccgccatcgtgcccagctaatttttgtattttttagtagagacagggtttcaccattttggccaggctggtctcgaactcctgacctcgtgatccacccacctcagcctcccaaagtgctgggattacaggtgtgagccaacacgcctggccagaattattaatatacatagtaatcaaagccaactgaatgtatgattacttggagaatttaaagaatggaaaaagaatagagcttaggttagaagcccccaaaacatcaatatattaaggacagaagattgctgcaaataatcctgacatgaagtaaccaatgacgtggagtaaccaacaaaataaaaaatacaaaaacaaaacagaaaaagtgcaggtcagaaaaattaagggaggaatatttttatgcccatttgttaaagtttgtggataagatcagacattcctataaaaattttaaaaactattaggtgatctattgaacaattaaaacttaagacacaatggcccttggtcccttaactataattcactattttacatataaagactgctcttcaactaatacaattaaaagcaatctgttaaaaaaatgtataatctttgacatgcttgctgcaaaggggaaaatataacctagcaataagtagctaattgagttcaaatcatcacacaaatattcagtaagcaggctttgtgaaggaaaacgtgatctgagttacaaacagtaaagacactgagtaatgaacagtaaatccacttggcatatgggtgactgaatttaagaaaagcctcagagtaaagattctatatttgcataaatatagcaatattttccctctatgtttctgtgtcacaagaaagtactagacagattttacccaaatgttagagactgtgtttggaatcatttgacttaaactataaattacacagcagagagcaaatgcctgtgggaacaagggcctctgagcagagactggcagtcagctcccagggtagctgcaggcatggattcctaagtgagctacatctcactcacatgtgcaactctgacagcagagctccaggtgggaaagaaacagaaggaactgattgattgatcgattgattgattaatgaatctcctgagcaatgcagtgctggacagcaaagactgaccattgaaagttaacttaggctgaaattattatgctctggaaataatgcagtgaaaataagacatgcattacctttcaaaaaatagataaatatggatttcattcatgcttaacttttgctattctattcattactgcctttgaaacagaactanagaaaggttttttcttcttcacccattcactgaaggttattggtatccaaagttcattttgttcaactttctattcaaatttctagttttcttctccttctggtatcctcactcgtaaccatttctttgcctgttctgaagacccactacaaagaatcccaagactcgttttcttcagcaacatgagatcctcgccaaacctattataatcctatgtattctttctcttccacctacatctatttttttcctttttctgagaagtcattgatttttttcactttgtaagtttcaaataaacctaaaaacaataacaaact

SEQ ID NO: 68745 - DNA, 307 bp, Homo sapiens
tctcaggactgtaagaaagagatttcaaagatccttgaaagggttcgagtgaggccgggttctaatcctggcccttggtcccctgtgatgtaaaacaagcccttcttgggtggggcctgcctgaccgcccctctataaaatgcatgctcatttctcactccagatgcccagggatttttcacaaagactaaaagggggcaccccaaatcatttcatattccacttttccattttctttttggtccttgcagaaaaggagtgactttttaagagcctgggcatattaaaaagtgaagagatgccaaat

SEQ ID NO: 68746 - DNA, 268 bp, Homo sapiens
cacaaactgaatcatttattccttgtggggtcgcagttaaaaccctagactctgaatacagcaccattgttatttgcactacttttagtgcctgtgaagtttctaacgtcagtcactatataaacatttattgaatataaataaataaatgtggctctttaatctcaaagcataaattatttacttgtttttatttctaagatacactcaaaataaactcaacctcaagctgtacttagcaattaagattcttatatttattaccagg

SEQ ID NO: 68747 - DNA, 1353 bp, Homo sapiens
  misc_feature (4)..(5): n is a, c, g, or t
  misc_feature (26)..(26): n is a, c, g, or t
  misc_feature (28)..(29): n is a, c, g, or t
  misc_feature (53)..(54): n is a, c, g, or t
  misc_feature (60)..(60): n is a, c, g, or t
  misc_feature (93)..(94): n is a, c, g, or t
  misc_feature (761)..(761): n is a, c, g, or t
  misc_feature (763)..(763): n is a, c, g, or t
  misc_feature (766)..(766): n is a, c, g, or t
  misc_feature (984)..(984): n is a, c, g, or t
  misc_feature (991)..(991): n is a, c, g, or t
  misc_feature (994)..(994): n is a, c, g, or t
catnnggggacgctctcagctctcantnnctgcccagcttccttcaaaatgtnnactatntcgaaatcctgtgcaagctcagcttggagggtnntcactctacaccctcaggtgcatatgggtcagtcaaagcctacaccaactttgatgctgagggggatgctttgaacattgaaaggaccatcaggacaaaaggtgtgggtaagttcaccattgtcaacattttgaccaacagcaggaatgctcggagagaggatgttgcctttgcctagcagagaaggaccacaaaggaacttacatcagcactgaagtcagccttactggccacctggagacagtcattttgggcctattgaagacacctgctcagtatgatgcttctgagctaaaagcttccatgaaggggctgggaactgaggaggactccctcgttgagatcatctgctcaacaaccaaccaggagctccaggaaattaacagagtctacaaagaaatgtacaaaactgatctggagaaggacattatttcggacacatatggtgacttctgcaagctgatgtttgccctggcaaatgttagaagaccagaggatggctctgtcgttgattatgaactgattgaccaagatgcccgggatttctgtgatgctggagtgaagaggaaaagaactgatgttcccaagtggatcagcatgatgaccgagtagagcatgtcccacctccagaaagtatttgataggtacaagagctacagcccatcangnganagcatcaagaaagaggttaaaggagacctggaaaatgctttcctgaacctggtccagtgcattcagaacaagcccctgtattttgctgattggctgtactactccatgaagggccagggggctcgagataaggtcctgatcagaatcatcgtctcccgcagtgaagtggacatgttgaaaattaggtctgaattcaagagaaagtatggcatgtcccngtactantanatccagcaagacactaagaacgactaccagaaagcactgctgtacctgtgtggtggagatgactgaagcccaacatagcttgagcttccagaaacggtgctccccacgcttccagctaacaggtctagaaaaccagcttgtggctaacagtccctgtggccgtccctgtgaagatgacattagcattgcccccaacctcattttagttgcgtaagcatagcctggctttcctgtctagtctctcctgtaagccaaagaaatgtacattccaagcagttggaagtgaaatctatgatgtgaaacactttgcctcctgtgtactgtgtcataaacagatgaataaactgaatttgtacttt

SEQ ID NO: 68748 - DNA, 2579 bp, Homo sapiens
actgttccgcgggcaccggcagcgcagcgtctccgatagtaagtcgggctgccggccggctcattcccccagggtaactctgagcccccggctccgagctccctcgaggccgcctaccggcgtcgggaacatggatgagaaatccaacaagctgctgctagctttggtgatgctcttcctatttgccgtgatcgtcctccaatacgtgtgccccggcacagaatgccagctcctccgcctgcaggcgttcagctccccggtgccggacccgtaccgctcggaggatgagagctccgccaggttcgtgccccgctacaatttcacccgcggcgacctcctgcgcaaggtagacttcgacatcaagggcgatgacctgatcgtgttcctgcacatccagaagaccgggggcaccactttcggccgccacttggtgcgtaacatccagctggagcagccgtgcgagtgccgcgtgggtcagaagaaatgcacttgccaccggccgggtaagcgggaaacctggctcttctccaggttctccacgggctggagctgcgggttgcacgccgactggaccgagctcaccagctgtgtgccctccgtggtggacggcaagcgcgacgccaggctgagaccgtccaggaacttccactacatcaccatcctccgagacccagtgtcccggtacttgagtgagtggaggcatgtccagagaggggcaacatggaaagcatccctgcatgtctgcgatggaaggcctccaacctccgaagagctgcccagctgctacactggcgatgactggtctggctgccccctcaaagagtttatggactgtccctacaatctagccaacaaccgccaggtgcgcatgctctccgacctgaccctggtaggctgctacaacctctctgtcatgcctgaaaagcaaagaaacaaggtccttctggaaagtgccaagtcaaatctgaagcacatggcgttcttcggcctcactgagtttcagcggaagacccaatatctgtttgagaaaaccttcaacatgaactttatttcgccatttacccagtataataccactagggcctctagtgtagagatcaatgaggaaattcaaaagcgtattgagggactgaattttctggatatggagttgtacagctatgccaaagacctttttttgcagaggtatcagtttatgaggcagaaagagcatcaggaggccaggcgaaagcgtcaggaacaacgcaaatttctgaagggaaggctccttcagacccatttccagagccagggtcagggccagagccagaatccgaatcagaatcagagtcagaacccaaatccgaatgccaatcagaacctgactcagaatctgatgcagaatctgactcagagtttgagccagaaggagaaccgggaaagcccgaagcagaactcaggcaaggagcagaatgataacaccagcaatggcaccaacgactacataggcagtgtagagaaatggcgttaaatggctcaaaaaggcctgtacatacttctcccaaagcgccactgaaaagatggcatagcttaaaagatgaaagtgtccaaacacatcctgcttccttcattggggaagttttaaaaaaaagtttagatgttgcctttacagttgcctttcaattcagtgttatactgtgtgtaggtaaaacaaatctcaatatggaattaaattgtctttttggggttggactaaatatgaaatccgaaagccaaaccagactcaccagaaattgctgtttagatattttaagaagttcttaaattagttatggagacaaagtgaaaacataaaatgtgaccatttaacttatggctaagaaatggactttaaattattcatgatacactgttaaaacccaatcttggaatcaaatattttttccaggggtgagaataagtataaacataaagcaactaaaatgaaacataaaaccttttattttcttctgattttaacaaggaatctatttaaatagaataacaactgatggtgaatcttaccgagctgtagaaaataaaaaattcctctccaaacatgggtagttttatgtcaaaatattggcttttcaagaacaggactcatatcttgatatttaagagatgtttaaaattttaaactttttctaccttctactgtttaaaggttttacacagggtgtatctcacattaaacaaaacacctttttttcaattttctttagttttaattgaaaatgtttgcttttaaaactgataggtattgttggaaagcaggatgaagcctgagccagtggaaaagcttgttacagaaaaaacattttgtgttattgctgtggtgtgcatgatttgcaaagattaagtgcattttctctgtctatactgattattgtatatagaggatgttataaatatacatatacatttttgccattatgtaaatcccatgatttcaactgtaaacatctgtccattggtgtagctttacaaaccattcactgattttgtgtaatttaacaatagatatgaaataaagtttaaattacaggctcaaaaaaaac

SEQ ID NO: 68749 - DNA, 934 bp, Homo sapiens
gtaaaaagtgttctgtagtgaggttacatatcaggaacatatgagttgagcagagtaatttggtagtgtaagtcgatgcaaaaatacttctatggtacctattacaagctgaccaagataaaaagaagtatgtaacccactgtgctgtcaagcatcatgattccgggcagttttcattttactgtggattttgctatacttatgcaaggacttacactaacctcctggctgtaaatcaaacaaggtgactgaaagtggcatttatgttttcacaagggacatgcttagaagtgtgaccataaagtcacatcttgtacaatctgctcatgtgtttcatctgtagtaatatagccacaaactggacaagaagctgggtatttgggtttaaaatagattttcttgactctgagcttgtatcagtatttctagcttttgttttgtctgacagtattgcagtcttgaaaatcctgagagctaaaaaactgaaaggaatttttccacaccttgaagtcacagtgttttagagtaaaactattttgtgtacaattgtgtttttaaaatagttagtagatcactatggtatttcaattttctttagttttaattgaaaatgtttgcttttaaaactgataggtattgttggaaagcaggatgaagcctgagccagtggaaaagcttgttacagaaaaaacattttgtgttattgctgtggtgtgcatgatttgcaaagattaagtgcattttctctgtctatactgattattgtatatagaggatgttataaatatacatatacatttttgccattatgtaaatcccatgatttcaactgtaaacatctgtccattggtgtagctttacaaaccattcactgattttgtgtaatttaacaatagatatgaaataaagtttaaattacaggctcaaaaaaaac

SEQ ID NO: 68750 - DNA, 2678 bp, Homo sapiens
actgttccgcgggcaccggcagcgcagcgtctccgatagtaagtcgggctgccggccggctcattcccccagggtaactctgagcccccggctccgagctccctcgaggccgcctaccggcgtcgggaacatggatgagaaatccaacaagctgctgctagctttggtgatgctcttcctatttgccgtgatcgtcctccaatacgtgtgccccggcacagaatgccagctcctccgcctgcaggcgttcagctccccggtgccggacccgtaccgctcggaggatgagagctccgccaggttcgtgccccgctacaatttcacccgcggcgacctcctgcgcaaggtagacttcgacatcaagggcgatgacctgatcgtgttcctgcacatccagaagaccgggggcaccactttcggccgccacttggtgcgtaacatccagctggagcagccgtgcgagtgccgcgtgggtcagaagaaatgcacttgccaccggccgggtaagcgggaaacctggctcttctccaggttctccacgggctggagctgcgggttgcacgccgactggaccgagctcaccagctgtgtgccctccgtggtggacggcaagcgcgacgccaggctgagaccgtccaggtggaggatttttcagattctagatgcagcaaggaacttccactacatcaccatcctccgagacccagtgtcccggtacttgagtgagtggaggcatgtccagagaggggcaacatggaaagcatccctgcatgtctgcgatggaaggcctccaacctccgaagagctgcccagctgctacactggcgatgactggtctggctgccccctcaaagagtttatggactgtccctacaatctagccaacaaccgccaggtgcgcatgctctccgacctgaccctggtaggctgctacaacctctctgtcatgcctgaaaagcaaagaaacaaggtccttctggaaagtgccaagtcaaatctgaagcacatggcgttcttcggcctcactgagtttcagcggaagacccaatatctgtttgagaaaaccttcaacatgaactttatttcgccatttacccagtataataccactagggcctctagtgtagagatcaatgaggaaattcaaaagcgtattgagggactgaattttctggatatggagttgtacagctatgccaaagacctttttttgcagaggtatcagtttatgaggcagaaagagcatcaggaggccaggcgaaagcgtcaggaacaacgcaaatttctgaagggaaggctccttcagacccatttccagagccagggtcagggccagagccagaatccgaatcagaatcagagtcagaacccaaatccgaatgccaatcagaacctgactcagaatctgatgcagaatctgactcagagtttgagccagaaggagaaccgggaaagcccgaagcagaactcaggcaaggagcagaatgataacaccagcaatggcaccaacgactacataggcagtgtagagaaatggcgttaaatggctcaaaaaggcctgtacatacttctcccaaagcgccactgaaaagatggcatagcttaaaagatgaaagtgtccaaacacatcctgcttccttcattggggaagttttaaaaaaaagtttagatgttgcctttacagttgcctttcaattcagtgttatactgtgtgtaggtaaaacaaatctcaatatggaattaaattgtctttttggggttggactaaatatgaaatccgaaagccaaaccagactcaccagaaattgctgtttagatattttaagaagttcttaaattagttatggagacaaagtgaaaacataaaatgtgaccatttaacttatggctaagaaatggactttaaattattcatgatacactgttaaaacccaatcttggaatcaaatattttttccaggggtgagaataagtataaacataaagcaactaaaatgaaacataaaaccttttattttcttctgattttaacaaggaatctatttaaatagaataacaactgatggtgaatcttaccgagctgtagaaaataaaaaattcctctccaaacatgggtagttttatgtcaaaatattggcttttcaagaacaggactcatatcttgatatttaagagatgtttaaaattttaaactttttctaccttctactgtttaaaggttttacacagggtgtatctcacattaaacaaaacacctttttttcaaaatgaaataccaatgtaaagatctaatttccaggcgctttcagggcactgtaatttcaacaatactggaatcattttggcgctgcttctcattcattttaaggcttctctgaattgtgctcattccaaattaacccatgtatagaatctttcttcatcatctaaatggtgtgttgctgaagttattgtggtatataatcctggattaaagtcaggactttctttctatagaattattttatcaatatttgtgtagtgaggtcctaatcaagaaacttgaacaggataatgtgtctaaaaatattgctgaagttattcttgatcagatagaatttaacctaaaatgtgaactcttacttactttttgtacatctctattgtaatgtttccagttgggccaactatttctagcc

SEQ ID NO: 68751 - DNA, 1739 bp, Homo sapiens
actgttccgcgggcaccggcagcgcagcgtctccgatagtaagtcgggctgccggccggctcattcccccagggtaactctgagcccccggctccgagctccctcgaggccgcctaccggcgtcgggaacatggatgagaaatccaacaagctgctgctagctttggtgatgctcttcctatttgccgtgatcgtcctccaatacgtgtgccccggcacagaatgccagctcctccgcctgcaggcgttcagctccccggtgccggacccgtaccgctcggaggatgagagctccgccaggttcgtgccccgctacaatttcacccgcggcgacctcctgcgcaaggtagacttcgacatcaagggcgatgacctgatcgtgttcctgcacatccagaagaccgggggcaccactttcggccgccacttggtgcgtaacatccagctggagcagccgtgcgagtgccgcgtgggtcagaagaaatgcacttgccaccggccgggtaagcgggaaacctggctcttctccaggttctccacgggctggagctgcgggttgcacgccgactggaccgagctcaccagctgtgtgccctccgtggtggacggcaagcgcgacgccaggctgagaccgtccaggtggaggatttttcagattctagatgcagcaaggaacttccactacatcaccatcctccgagacccagtgtcccggtacttgagtgagtggaggcatgtccagagaggggcaacatggaaagcatccctgcatgtctgcgatggaaggcctccaacctccgaagagctgcccagctgctacactggcgatgactggtctggctgccccctcaaagagtttatggactgtccctacaatctagccaacaaccgccaggtgcgcatgctctccgacctgaccctggtaggctgctacaacctctctgtcatgcctgaaaagcaaagaaacaaggtccttctggaaagtgccaagtcaaatctgaagcacatggcgttcttcggcctcactgagtttcagcggaagacccaatatctgtttgagaaaaccttcaacatgaactttatttcgccatttacccagtataataccactagggcctctagtgtagagatcaatgaggaaattcaaaagcgtattgagggactgaattttctggatatggagttgtacagctatgccaaagacctttttttgcagaggtatcagtttatgaggcagaaagagcatcaggaggccaggcgaaagcgtcaggaacaacgcaaatttctgaagggaaggctccttcagacccatttccagagccagggtcagggccagagccagaatccgaatcagaatcagagtcagaacccaaatccgaatgccaatcagaacctgactcagaatctgatgcagaatctgactcagagtttgagccagaaggagaaccgggaaagcccgaagcagaactcaggcaaggagcagaatgataacaccagcaatggcaccaacgactacataggcagtgtagagaaatggcgttaaatggctcaaaaaggcctgtacatacttctcccaaagcgccactgaaaagatggcatagcttaaaagatgaaagtgtccaaacacatcctgcttccttcattggggaagttttaaaaaaaagttccgttgaagccgtcagattggcagtagccggggaatgttttctgcataccctcgatagacaagagtcattaat

SEQ ID NO: 68752 - DNA, 2765 bp, Homo sapiens
actgttccgcgggcaccggcagcgcagcgtctccgatagtaagtcgggctgccggccggctcattcccccagggtaactctgagcccccggctccgagctccctcgaggccgcctaccggcgtcgggaacatggatgagaaatccaacaagctgctgctagctttggtgatgctcttcctatttgccgtgatcgtcctccaatacgtgtgccccggcacagaatgccagctcctccgcctgcaggcgttcagctccccggtgccggacccgtaccgctcggaggatgagagctccgccaggttcgtgccccgctacaatttcacccgcggcgacctcctgcgcaaggtagacttcgacatcaagggcgatgacctgatcgtgttcctgcacatccagaagaccgggggcaccactttcggccgccacttggtgcgtaacatccagctggagcagccgtgcgagtgccgcgtgggtcagaagaaatgcacttgccaccggccgggtaagcgggaaacctggctcttctccaggttctccacgggctggagctgcgggttgcacgccgactggaccgagctcaccagctgtgtgccctccgtggtggacggcaagcgcgacgccaggctgagaccgtccaggtggaggatttttcagattctagatgcagcaagtaaggataaacggggttctccaaacactaacgcaggcgccaactctccgtcatccacaaagacccggaacacatctaagagtgggaagaacttccactacatcaccatcctccgagacccagtgtcccggtacttgagtgagtggaggcatgtccagagaggggcaacatggaaagcatccctgcatgtctgcgatggaaggcctccaacctccgaagagctgcccagctgctacactggcgatgactggtctggctgccccctcaaagagtttatggactgtccctacaatctagccaacaaccgccaggtgcgcatgctctccgacctgaccctggtaggctgctacaacctctctgtcatgcctgaaaagcaaagaaacaaggtccttctggaaagtgccaagtcaaatctgaagcacatggcgttcttcggcctcactgagtttcagcggaagacccaatatctgtttgagaaaaccttcaacatgaactttatttcgccatttacccagtataataccactagggcctctagtgtagagatcaatgaggaaattcaaaagcgtattgagggactgaattttctggatatggagttgtacagctatgccaaagacctttttttgcagaggtatcagtttatgaggcagaaagagcatcaggaggccaggcgaaagcgtcaggaacaacgcaaatttctgaagggaaggctccttcagacccatttccagagccagggtcagggccagagccagaatccgaatcagaatcagagtcagaacccaaatccgaatgccaatcagaacctgactcagaatctgatgcagaatctgactcagagtttgagccagaaggagaaccgggaaagcccgaagcagaactcaggcaaggagcagaatgataacaccagcaatggcaccaacgactacataggcagtgtagagaaatggcgttaaatggctcaaaaaggcctgtacatacttctcccaaagcgccactgaaaagatggcatagcttaaaagatgaaagtgtccaaacacatcctgcttccttcattggggaagttttaaaaaaaagtttagatgttgcctttacagttgcctttcaattcagtgttatactgtgtgtaggtaaaacaaatctcaatatggaattaaattgtctttttggggttggactaaatatgaaatccgaaagccaaaccagactcaccagaaattgctgtttagatattttaagaagttcttaaattagttatggagacaaagtgaaaacataaaatgtgaccatttaacttatggctaagaaatggactttaaattattcatgatacactgttaaaacccaatcttggaatcaaatattttttccaggggtgagaataagtataaacataaagcaactaaaatgaaacataaaaccttttattttcttctgattttaacaaggaatctatttaaatagaataacaactgatggtgaatcttaccgagctgtagaaaataaaaaattcctctccaaacatgggtagttttatgtcaaaatattggcttttcaagaacaggactcatatcttgatatttaagagatgtttaaaattttaaactttttctaccttctactgtttaaaggttttacacagggtgtatctcacattaaacaaaacacctttttttcaaaatgaaataccaatgtaaagatctaatttccaggcgctttcagggcactgtaatttcaacaatactggaatcattttggcgctgcttctcattcattttaaggcttctctgaattgtgctcattccaaattaacccatgtatagaatctttcttcatcatctaaatggtgtgttgctgaagttattgtggtatataatcctggattaaagtcaggactttctttctatagaattattttatcaatatttgtgtagtgaggtcctaatcaagaaacttgaacaggataatgtgtctaaaaatattgctgaagttattcttgatcagatagaatttaacctaaaatgtgaactcttacttactttttgtacatctctattgtaatgtttccagttgggccaactatttctagcc

SEQ ID NO: 68753 - DNA, 2590 bp, Homo sapiens
actgttccgcgggcaccggcagcgcagcgtctccgatagtaagtcgggctgccggccggctcattcccccagggtaactctgagcccccggctccgagctccctcgaggccgcctaccggcgtcgggaacatggatgagaaatccaacaagctgctgctagctttggtgatgctcttcctatttgccgtgatcgtcctccaatacgtgtgccccggcacagaatgccagctcctccgcctgcaggcgttcagctccccggtgccggacccgtaccgctcggaggatgagagctccgccaggttcgtgccccgctacaatttcacccgcggcgacctcctgcgcaaggtagacttcgacatcaagggcgatgacctgatcgtgttcctgcacatccagaagaccgggggcaccactttcggccgccacttggtgcgtaacatccagctggagcagccgtgcgagtgccgcgtgggtcagaagaaatgcacttgccaccggccgggtaagcgggaaacctggctcttctccaggttctccacgggctggagctgcgggttgcacgccgactggaccgagctcaccagctgtgtgccctccgtggtggacggcaagcgcgacgccaggctgagaccgtccaggaacttccactacatcaccatcctccgagacccagtgtcccggtacttgagtgagtggaggcatgtccagagaggggcaacatggaaagcatccctgcatgtctgcgatggaaggcctccaacctccgaagagctgcccagctgctacactggcgatgactggtctggctgccccctcaaagagtttatggactgtccctacaatctagccaacaaccgccaggtgcgcatgctctccgacctgaccctggtaggctgctacaacctctctgtcatgcctgaaaagcaaagaaacaaggtccttctggaaagtgccaagtcaaatctgaagcacatggcgttcttcggcctcactgagtttcagcggaagacccaatatctgtttgagaaaaccttcaacatgaactttatttcgccatttacccagtataataccactagggcctctagtgtagagatcaatgaggaaattcaaacctttttttgcagaggtatcagtttatgaggcagaaagagcatcaggaggccaggcgaaagcgtcaggaacaacgcaaatttctgaagggaaggctccttcagacccatttccagagccagggtcagggccagagccagaatccgaatcagaatcagagtcagaacccaaatccgaatgccaatcagaacctgactcagaatctgatgcagaatctgactcagagtttgagccagaaggagaaccgggaaagcccgaagcagaactcaggcaaggagcagaatgataacaccagcaatggcaccaacgactacataggcagtgtagagaaatggcgttaaatggctcaaaaaggcctgtacatacttctcccaaagcgccactgaaaagatggcatagcttaaaagatgaaagtgtccaaacacatcctgcttccttcattggggaagttttaaaaaaaagtttagatgttgcctttacagttgcctttcaattcagtgttatactgtgtgtaggtaaaacaaatctcaatatggaattaaattgtctttttggggttggactaaatatgaaatccgaaagccaaaccagactcaccagaaattgctgtttagatattttaagaagttcttaaattagttatggagacaaagtgaaaacataaaatgtgaccatttaacttatggctaagaaatggactttaaattattcatgatacactgttaaaacccaatcttggaatcaaatattttttccaggggtgagaataagtataaacataaagcaactaaaatgaaacataaaaccttttattttcttctgattttaacaaggaatctatttaaatagaataacaactgatggtgaatcttaccgagctgtagaaaataaaaaattcctctccaaacatgggtagttttatgtcaaaatattggcttttcaagaacaggactcatatcttgatatttaagagatgtttaaaattttaaactttttctaccttctactgtttaaaggttttacacagggtgtatctcacattaaacaaaacacctttttttcaaaatgaaataccaatgtaaagatctaatttccaggcgctttcagggcactgtaatttcaacaatactggaatcattttggcgctgcttctcattcattttaaggcttctctgaattgtgctcattccaaattaacccatgtatagaatctttcttcatcatctaaatggtgtgttgctgaagttattgtggtatataatcctggattaaagtcaggactttctttctatagaattattttatcaatatttgtgtagtgaggtcctaatcaagaaacttgaacaggataatgtgtctaaaaatattgctgaagttattcttgatcagatagaatttaacctaaaatgtgaactcttacttactttttgtacatctctattgtaatgtttccagttgggccaactatttctagcc

SEQ ID NO: 68754 - DNA, 433 bp, Homo sapiens
taagtgaaaacaagcttattaagcaagtgaaggaataaagaatggctactccataggcagagcagcctggtcaagtgatttaaatagcacctgctttcattctttgcttatcttggcctaccctgatctgtttttcttcttaccacttatcatccttatggcatatttatgcttactgtctgtctcacatcatgaggatgtaagcttcataagagtagaggttttacctgcttttgttcactactgtgtagccagtatgtaggcctggtacacagtagacactcatttgtttcttgcatgtaagtcaggagaaaggccccgcacattatgaagtaataaactggcactttcagtttgatacaagccttctgttatttagataatatgagtctgatcactcacaggaatgcaggaaagtctcatttctggatcc

SEQ ID NO: 68755 - DNA, 4012 bp, Homo sapiens
  misc_feature (2073)..(2073): n is a, c, g, or t
  misc_feature (3158)..(3158): n is a, c, g, or t
  misc_feature (3733)..(3733): n is a, c, g, or t
ggcacgaggcttccgccctgttgtgaagtgggtgtctcggtggagccttggggagcagtcccttttctaggagcctcttgaaggactcaccgtagatgcaggaagacattggatgaggtcagcatagctgaagtgaggtgtctgggttagacaatggctatggccctggaattgcaagcccaggcatctccgcagccagagcctgaagaactcctgattgtgaaactggagctgctcgtgctggagcagttcctgactatcttgcctagggaggtccagacctgggtgcaggcacgccaccctgagagtggtgaggaggctgtggccttggtggaggattggcaccgagagaccaggactgcaggacagtcgggactggaattgcatacagaagagaccaggcccttaaagacaggggaagaagctcagagcttccagctgcagccagtggatccctggcctgagggacagtcccagaagaagggggtgaagaatacatgccctgaccttcccaatcacctaaatgccgaggtggcaccacagcctttgaaagagagtgctgtcctcactccccgagtccctactctcccaaagatggggagcgttggagattgggaggtgacagctgagtcccaggaagccctgggccctggcaaacatgctgagaaggagctctgtaaagaccccccaggagacgactgtgggaacagcgtgtgcctgggagttccagtttcaaaaccaagtaatacctccgagaaagagcaaggaccagagttttggggtctaagtcttataaattctgggaaaaggagcactgcagattacagcctggataatgagccagctcaggcattgacctggagggattcaagagcctgggaggaacaataccagtgggatgtggaggacatgaaggtgtcaggtgttcactggggctatgaggagaccaagactttcctggcaattttgagtgaatctcctttctctgaaaagctccggacttgtcaccagaaccgccaggtatatcgggccattgcagagcagctaagggcaaggggcttcctgcggacactggagcaatgtcgctatagggtcaaaaacctcctacggaattaccggaaagccaagagcagccacccaccaggtacctgccccttctatgaggagctggaggccctggtcagggctcggacagccatcagagccacagatggcccaggagaggccgtggcacttcccaggctcggggatagtgacgcagagatggatgagcaggaggaagggggctgggatcctgaagaaatggcagaagactgtaacggtgctggcctggtcaatgttgagtctacccaggggcccaggattgcaggggccccagctctgttccagagtcgtattgcaggtgtgcactggggctatgaggagaccaaggccttcctggcaattctcagtgagtccccattctcggaaaagcttcgtacctgtcaccagaacagccaggtgtaccgggccattgcagagcggctgtgtgctctgggcttcctgcggacactggagcagtgtcgctacagattcaaaaacctccttcgaagctaccggaaagccaagagcagccacccaccagggacatgccctttctatgaggaactggactcgctgatgagggctcgggctgcagtcagggccatggggactgtccgagaggctgcaggtctccctaggtgtgggcagagtagtgctgagactgatgcccaggaggcctggggtgaagtggccaatgaagatgctgtcaaaccttcaaccttgtgtcctaaagccccagacatgggttttgaaatgaggcatgaggatgaagaccagatttcagagcaggacatttttgagggtttgcctggagccttatcaaaatgtcctacagaagctgtttgccaacctcttgactggggagaagacagtgaaaatgaaaatgaagatgaagggcagtggggaaatccctcacaggaacagtggcaagaaagttcttctgaagaggacttagaaaaacttattgaccatcaaggcctgtaccttgcngagaaaccctacaagtgtgacacatgcatgaagagcttcagtcggagctcccacttcattgcccatcagcgaatccacacaggtgagaagccctacaaatgccttgaatgtggaaaaaactttagtgaccgctctaacctcaatacccatcagagaatccacactggagagaagccctataaatgccttgaatgtgggaaaagctttagtgaccattctaatctcatcactcaccagagaattcacacgggggaaaagccctataaatgtggagaatgttggaaaagcttcaaccagagctcaaaccttctgaaacatcagagaatccacttgggaggaaatcctgaccagtgtagtgagcctgggggaaactttgcccaaagcccatcttttagtgctcactggaggaattctacagaagagacagctcctgaacaacctcaaagtatcagtaaggacttgaattctcctggaccacacagcacaaactcaggggagaaactttatgagtgttctgaatgtggaagaagcttctctaagagctctgccctcattagtcaccaaagaatccatacgggagagaaaccatatgaatgtgccgaatgtgggaaaagcttcagtaagagctccaccctggccaaccaccagcgcacccacactggagagaagccgtataaatgtgtggactgtgggaagtgcttcagtgagcgctccaagctcatcacacaccagagagtgcacacaggagagaagccctacaaatgccttgagtgtggaaaattcttccgtgaccgttctaacctcattactcaccagaggattcatacgggagagaagccgtataagtgcagagagtgtgggaaatgctttaaccagagctccagtcttattattcaccagagaatccacacaggggagaaaccctacaagtgcacagagtgtggcaaagacttcaacaacagttcccacttcagtgctcaccggagaacccatgcaggagggaaggcgtcgtaggggacagtttcctcaacaacaaaggaggactcaatgtatatatcttatatcataagatgtatgctagaganaaactttccaatttttaagcttggtgtgtacccagggaagttatcttggtataaaccaggtaatttggaagtgaattacaaatactaaggatccagatttgaaggcacttttaagtgtaatttgtttttcttctgtaaagacccacacagaatcctgactgtccttgtatttgctatcatgtaagagctgtgtcagtatttgagccaaactggcaacttacgagattagagttaaatcagtggtcctgagcagtgattccaaactctcactgtgccttcacaccatccatgtgtaatccaccccatcagcagtggttctcctactttctcagtgggggcatatcctcaagggagaatgttgtgactctggtgagagaggagttggcctagagcaggccactgtgagctcagcacagagtaggaagaacagtgacatcattacaaaatcatcaatagcagcaatagctggtgtttattgagctgttgctctttggcaagctctgtgctaagaactttgtatacatcatctcatttaatcttcacaacggccccaggagataagtactaactttctncccatttcctagaggcttgggaaattaagtaactcgcactggtcacacatctgtaagtgggagaggcaggattcaacagatctgtctgtcttgagtctatcgtgctcttattgctatactgaattcccattcatgttaggtaacttaggggccagaatctccatgcactttgtagaccacatttcctgttatgaaatttccacattttgaattttttaaacaaatatggaaactgagaatccctaaggattaaaggacttgggatatccaaaaaaaaaa

SEQ ID NO: 68756 - DNA, 470 bp, Homo sapiens
taatgttacacaaattttacataatttatctctttatgaatcaaaaatgttttgaacagtgggactctcattgaaacacttggatcgccaccctgtgttcaacagatggtactcatttggtggtataaatgctggtctacctaccaaactcactctgatggctttctcatcctatttcaagccattttggatcttaaaagagcctgttagcctctggactgcagttgtactcaaaataccaaagtgggtcttactgaattgttgattgggaattttgactatttgtgtgtagggactggaattgcatacagaagagaccaggcccttaaagacaggggaagaagctcagagcttccagctgcagccagtggatccctggcctgagggacagtcccagaagaagggggtgaagaatacatgccctgaccttcccaatcacctaaatgccgaggtggcaccacagcctttga

SEQ ID NO: 68757 - DNA, 2505 bp, Homo sapiens
  misc_feature (1896)..(1896): n is a, c, g, or t
cggacgcgtggggtgaagtgggtgtctcggtggagccttggggagcagtcccttttctaggagcctcttgaaggactcaccgtagatgcaggaagacattggatgaggtcagcatagctgaagtgaggtgtctgggttagacaatggctatggccctggaattgcaagcccaggcatctccgcagccagagcctgaagaactcctgattgtgaaactggaagaggactcttggggatcagaatccaaactctgggagaaggaccgtggctctgtctctggcccagaggcctcccgccagcgcttcaggcaattccaatacagggatgcagctggaccccacgaggccttcagccagctctgggctctctgctgtcgttggctgaggccggagatccgtctcaaagagcagatcctggagctgctcgtgctggagcagttcctgactatcttgcctagggaggtccagacctgggtgcaggcacgccaccctgagagtggtgaggaggctgtggccttggtggaggattggcaccgagagaccaggactgcaggacagtcgggactggaattgcatacagaagagaccaggcccttaaagacaggggaagaagctcagagcttccagctgcagccagtggatccctggcctgagggacagtcccagaagaagggggtgaagaatacatgccctgaccttcccaatcacctaaatgccgaggtggcaccacagcctttgaaagagagtggagttccagtttcaaaaccaagtaatacctccgagaaagagcaaggaccagagttttggggtctaagtcttataaattctgggaaaaggagcactgcagattacagcctggataatgagccagctcaggcattgacctggagggattcaagagcctgggaggaacaataccagtgggatgtggaggacatgaaggtgtcaggtgttcactggggctatgaggagaccaagactttcctggcaattttgagtgaatctcctttctctgaaaagctccggacttgtcaccagaaccgccaggtatatcgggccattgcagagcagctaagggcaaggggcttcctgcggacactggagcaatgtcgctatagggtcaaaaacctcctacggaattaccggaaagccaagagcagccacccaccaggtacctgccccttctatgaggagctggaggccctggtcagggctcggacagccatcagagccacagatggcccaggagaggccgtggcacttcccaggctcggggatagtgacgcagagatggatgagcaggaggaagggggctgggatcctgaagaaatggcagaagactgtaacggtgctggcctggtcaatgttgagtctacccaggggcccaggattgcaggggccccagctctgttccagagtcgtattggtaagaacatgggggtttagtcagattcagatttccaaccctcctaccagctagactgctattccctgaggtcagggcacaggctgcaagtctggattgaagccactagagtgaagagctacattccttaggtcatcctcaaactccaactttcttttcccatgaccaagtctctttgcaaaagtcttcttagttatagaagcaaacatttttaaagccttaaggggcctcaaagagtgaatccagtatttccaaaagtgtgtcactggtagtatgggatgatcatcgacgttacatgaatgaactttaaattcttgtatttatatatttctcttaatttgtatgagtgcatcaacctgtgatttcacagataacaaagttaggtaaagagtgatggcgagtgaaatattgaacagataatggcagaaatcccgacagtgtagacttgaataatcaatgtctgggaaacanccaatcattgtaaaggtgcaaacatggaagtccatgagatgaggcgtcttatagacgcacaggtaggagcagagcccggatcagagcctgtggctcctgcctgccggtttcacatggttttccctccaccatgttgccttcctgggctacatcactttcctgcagaggagctgagactagaccacctccttttcattcccctgcaaaggaggaaagtgtgtcctcatttggcctttcttgcaggactatttgaaactcatttatgcctctaatctttaggaattctcagctttcatgttttgttaaaaggagaatttatggccaggtgcggtggctcacgcctgtaatcccaacactttgggaggctgaggtgggcagatcacgaggtcaggagatcaagactatcctggccaacatggtgaaaccctgtctctactaaaaaaaatacaaaaattagctgggtgtggtggcacgcacctgtaatcccagctactcaggaggctgaggcaggagaattgcttgaacccaggaggcagagattgcagtgagccaggattgcatcactgcactccagcctggcggcaaagcgagactccgtctcaaaaaaaa

SEQ ID NO: 68758 - DNA, 288 bp, Homo sapiens
cagaaaggatagaggataaagtgacttgtagtagtctaacatggatacatgctattcctagttctatgcccttgatgttctctaatggaaagctttcaagaccatctccaaaaatgtctgctttcattttatttatctgaactggctgtttccagtgaactgtggcccgcttcctaggcagagaccatacaatagtttattctctctaaaagctttgagtattcctgtcgttcagggagtagcatgcaagtcctgggaaatggtatttaaacaagctcaacttgacca

SEQ ID NO: 68759 - DNA, 368 bp, Homo sapiens
tcttctcgttttctccagacagcaccttcctttagcttgggcacaaaagagaaaggcaggaagtagacacaatatatgaaatgaagaacttaggccgggcgcggtggctcatgcctgtaatcccagcactttgggaggccgaggcaggtggatcacgaggtcaggagattgacaccatcctggctaacacggtgaaaccctgtctctactaaaaaaaaattagcagggcatggtggcgggcgcctgtagtcccagctactcgggaggctgaggcaggagaatggcttgaacccaggaggcggagcttgcaatgagccgagattgcgccactgcactccagcctgggcgacagagcaagactccatctc

SEQ ID NO: 68760 - DNA, 799 bp, Homo sapiens
gtaaatgcaagtttctaccctttgaccgacatctgtctgtttttctcccctcctagcccccagcaaccacggttctaattctactttgtttccatgagttttgtggcaggagaataggggattagaggaacaggggttcagcaggtgcagccagttcctacaggcaggagagcagcaggtgtggcttacaggtcacgtcttccctcgtgataacaagccacatcagcctctgattgactgcgggccgggtctccactacggccactgattggtcctgagccaatccttcatagcatctaaccaattggaagcctctgaagggcgtctaggggtgttgccgggttccttctagcttattacaaaccttaattggggaggctcttgagctgctggctcgatcccgctcccactctgaattgtcttcaataaatctgtgcttttctattcacaatagcaaagacctggaatcaacccaaatgcccatcaatgatagactggataaagaaaatgtggtgggctgggtgcagtggctcacgcctgtaatcccagaactttgggaggccgaggcaggtggatcacgaggtcaagagatggagattatcctggccaacatggtgagaccccgtctctactaaaaatacaaaaaagcagggtgtggtggcgggtgcctgtagtcccagctactcgggaggctgaggcaggagaatcacttgaacccggaaggcagacgttgcagtgggccaagattacgccactgcactccagcctgggcaacagagtaagactctgtctcaaaaaa

SEQ ID NO: 68761 - DNA, 426 bp, Homo sapiens
agtttccaaaaggtactgtaaaaatgtatgaaaaatggtaaaaactttatagggcactaacatgaacgaagcttgcgggacccctctggttgagtcagggagtgagttgtgagtgaatgtgaagctctaggacattactgtaccctattgtagatgttataaacattgtacacttaggctactctaaattaattttttctttagtaataaattaaccttagtctactgtaacgtttttacttcatgaacttttaaaattttaaaaagctttttgactcttttgtaataatagcttaaaacacaaacacattatacagcctgtatagaagtactcctttatattctataaactttttctatttaattttttaacttcgtaaaaaataagttaaaaatgaagacacagacacacacattagtcaaggc

SEQ ID NO: 68762 - DNA, 425 bp, Homo sapiens
ctaaattctaagtcctaaaatttagtttctcccaaagtggtgctattaatgaacttataaaattctgccttcctgcacctcactgtcgaataagctcagatgctaagcaaaataacttagtataaagtcatttatgtgtagaaagatataatcttcctggcctccttaattttgtcatttctgttcatggagcataagctcataaaacattaaagactatgcaaaaatatttgccacaacatgcctaccatcttgggactgaaatattaagtccacataatgtaatgattaaacaaaattaagatgctattttataagatagcaatctaacagaaaactgtttggaggaaatagtgtagttttgtagtttttggagggttttcttgagacagggtcttgatctgtcactcaagctagagtgcagt

SEQ ID NO: 68763 - DNA, 806 bp, Homo sapiens
ccccggaaaataggacaggtagagccggtggtaatcgggctgctatagagccgggtgagagagcgagcgcccgtcggcgggtgtcgagggcgggttgcctcgcgctgacccttcccgccctccttctcgtcacacaccaggtccccgcggaagccgcggtgtcggcgccatggcggagctgacggctcttgagagtctcatcgagatgggcttccccaggggacgcgcggagaaggctctggccctcacagggaaccaggcatcgaggctgcgatggactggctgatggagcacgaagacgaccccgatgtggacgagcctttagagactccccttggacatatcctgggacgggagcccacttcctcagagcaaggcggccttgaaggatctggttctgctgccggagaaggcaaacccgctttgagtgaagaggaaagacaggaacaaactaagaggatgttggagctggtggcccagaagcagcgggagcgtgaagaaagagaggaacgggaggcattggaacgggaacggcagcgcaggagacaagggcaagagttgtcagcagcacgacagcggctacaggaagatgagatgcgccgggctgctgaggagaggcggagggaaaaggccgaggagttagcagccagacaaagagttgagaaaagatcgatgggatcaccttcctgtctggaggcagagtgaggaggaggcgtccatcaacctcaatgcctaacaagttgcccctgtgaaccttgggctgactttctagccagcccgagcttgctaagctggcggaaaggact

SEQ ID NO: 68764 - DNA, 647 bp, Homo sapiens
tcttactcagcagttacccttttacttgttcatgtttttatttggtttattatgtagctatctggtgatgtggtatttatccagattcttttgtataatcttatccttgtctttcttaggttgtgagggagctgggagtctctcatccgcacttagtaaagcggagcctaagtggctgttcatttggtgctttaaatagtagttgtgctggttcaatctaagaagaagggggcccagctttagctcttttccttacttgggcacctcattcagttttgatgcccacaatactgagtatctcccttgccctttaggtcaggctgccagatgggacctcactgacccagacgttccgggcccgggaacagctggcagctgtgaggctctatgtggagctccaccgtggggaggaactaggtgggggccaggaccctgtgcaattgctcagtggcttccccagacgggccttctcagaagctgacatggagcggcctctgcaggagctgggactcgtgccttctgctgttctcattgtggccaagaaatgtcccagctgagggcctttgtcccattgtccctctgtgaccccttcatctttgataaagcactgacatctccttcctaataaatagaccctgagttctgta

SEQ ID NO: 68765 - DNA, 1146 bp, Homo sapiens
  misc_feature (6)..(7): n is a, c, g, or t
gaaaannataggctaggtacgaggcctgggtggctgctatagagccgggtgagagagcgagcgcccgtcggcgggtgtcgagggcgggttgcctcgcgctgacccttcccgccctccttctcgtcacacaccaggtccccgcggaagccgcggtgtcggcgccatggcggagctgacggctcttgagagtctcatcgagatgggcttccccaggggacgcgcggagaaggctctggccctcacagggaaccaggcatcgaggctgcgatggactggctgatggagcacgaagacgaccccgatgtggacgagcctttagagactccccttggacatatcctgggacgggagcccacttcctcagagcaaggcggccttgaaggatctggttctgctgccggagaaggcaaacccgctttgagtgaagaggaaagacaggaacaaactaagaggatgttggagctggtggcccagaagcagcgggagcgtgaagaaagagaggaacgggaggcattggaacgggaacggcagcgcaggagacaagggcaagagttgtcagcagcacgacagcggctacaggaagatgagatgcgccgggctgctgaggagaggcggagggaaaaggccgaggagttagcagccagacaaagagttagagaaaagatcgagagggacaaagcagagagagccaagaagtatggtggcagtgtgggctctcagccacccccagtggcaccagagccaggtcctgttccctcttctcccagccaggagcctcccaccaagcgggagtatgaccagtgtcgcatacaggtcaggctgccagatgggacctcactgacccagacgttccgggcccgggaacagctggcagctgtgaggctctatgtggagctccaccgtggggaggaactaggtgggggccaggaccctgtgcaattgctcagtggcttccccagacgggccttctcagaagctgacatggagcggcctctgcaggagctgggactcgtgccttctgctgttctcattgtggccaagaaatgtcccagctgagggcctttgtcccattgtccctctgtgaccccttcatctttgataaagcactgacatctccttcctaataaatagaccctgagttctgta

SEQ ID NO: 68766 - DNA, 1148 bp, Homo sapiens
  misc_feature (18)..(18): n is a, c, g, or t
  misc_feature (31)..(31): n is a, c, g, or t
  misc_feature (33)..(33): n is a, c, g, or t
gaactcataaggcaggtngcaggcctgggtngnggctgctatagagccgggtgagagagcgagcgcccgtcggcgggtgtcgagggcgggttgcctcgcgctgacccttcccgccctccttctcgtcacacaccaggtccccgcggaagccgcggtgtcggcgccatggcggagctgacggctcttgagagtctcatcgagatgggcttccccaggggacgcgcggagaaggctctggccctcacagggaaccaggcatcgaggctgcgatggactggctgatggagcacgaagacgaccccgatgtggacgagcctttagagactccccttggacatatcctgggacgggagcccacttcctcagagcaaggcggccttgaaggatctggttctgctgccggagaaggcaaacccgctttgagtgaagaggaaagacaggaacaaactaagaggatgttggagctggtggcccagaagcagcgggagcgtgaagaaagagaggaacgggaggcattggaacgggaacggcagcgcaggagacaagggcaagagttgtcagcagcacgacagcggctacaggaagatgagatgcgccgggctgctgaggagaggcggagggaaaaggccgaggagttagcagccagacaaagagttagagaaaagatcgagagggacaaagcagagagagccaagaagtatggtggcagtgtgggctctcagccacccccagtggcaccagagccaggtcctgttccctcttctcccagccaggagcctcccaccaagcgggagtatgaccagtgtcgcatacaggtcaggctgccagatgggacctcactgacccagacgttccgggcccgggaacagctggcagctgtgaggctctatgtggagctccaccgtggggaggaactaggtgggggccaggaccctgtgcaattgctcagtggcttccccagacgggccttctcagaagctgacatggagcggcctctgcaggagctgggactcgtgccttctgctgttctcattgtggccaagaaatgtcccagctgagggcctttgtcccattgtccctctgtgaccccttcatctttgataaagcactgacatctccttcctaataaatagaccctgagttctgta

SEQ ID NO: 68767 - DNA, 1159 bp, Homo sapiens
tcgccttacggctaggtgcgggtctgggtgtggactcggccgagggctgctatagagccgggtgagagagcgagcgcccgtcggcgggtgtcgagggcgggttgcctcgcgctgacccttcccgccctccttctcgtcacacaccaggtccccgcggaagccgcggtgtcggcgccatggcggagctgacggctcttgagagtctcatcgagatgggcttccccaggggacgcgcggagaaggctctggccctcacagggaaccaggcatcgaggctgcgatggactggctgatggagcacgaagacgaccccgatgtggacgagcctttagagactccccttggacatatcctgggacgggagcccacttcctcagagcaaggcggccttgaaggatctggttctgctgccggagaaggcaaacccgctttgagtgaagaggaaagacaggaacaaactaagaggatgttggagctggtggcccagaagcagcgggagcgtgaagaaagagaggaacgggaggcattggaacgggaacggcagcgcaggagacaagggcaagagttgtcagcagcacgacagcggctacaggaagatgagatgcgccgggctgctgaggagaggcggagggaaaaggccgaggagttagcagccagacaaagagttagagaaaagatcgagagggacaaagcagagagagccaagaagtatggtggcagtgtgggctctcagccacccccagtggcaccagagccaggtcctgttccctcttctcccagccaggagcctcccaccaagcgggagtatgaccagtgtcgcatacaggtcaggctgccagatgggacctcactgacccagacgttccgggcccgggaacagctggcagctgtgaggctctatgtggagctccaccgtggggaggaactaggtgggggccaggaccctgtgcaattgctcagtggcttccccagacgggccttctcagaagctgacatggagcggcctctgcaggagctgggactcgtgccttctgctgttctcattgtggccaagaaatgtcccagctgagggcctttgtcccattgtccctctgtgaccccttcatctttgataaagcactgacatctccttcctaataaatagaccctgagttctgta

SEQ ID NO: 68768 - DNA, 1327 bp, Homo sapiens
gtccgcttccttctcggctttcttctcgtcggtgttcccggctgctatagagccgggtgagagagcgagcgcccgtcggcgggtgtcgagggcgggttgcctcgcgctgacccttcccgccctccttctcgtcacacaccaggtccccgcggaagccgcggtgtcggcgccatggcggagctgacggctcttgagagtctcatcgagatgggcttccccaggggacgcgcggagaaggctctggccctcacagggaaccaggcatcgaggctgcgatggactggctgatggagcacgaagacgaccccgatgtggacgagcctttagagactccccttggacatatcctgggacgggagcccacttcctcagagcaaggcggccttgaaggatctggttctgctgccggagaaggcaaacccgctttgagtgaagaggaaagacaggaacaaactaagaggatgttggagctggtggcccagaagcagcgggagcgtgaagaaagagaggaacgggaggcattggaacgggaacggcagcgcaggagacaagggcaagagttgtcagcagcacgacagcggctacaggaagatgagatgcgccgggctgctgaggagaggcggagggaaaaggccgaggagttagcagccagacaaagagttagagaaaagatcgagagggacaaagcagagagagccaagaagtatggtggcagtgtgggctctcagccacccccagtggcaccagagccaggtcctgttccctcttctcccagccaggagcctcccaccaagcgggagtatgaccagtgtcgcatacaggtcaggctgccagatgggacctcactgacccagacgttccgggcccgggaacagctggcagctgtgaggctctatgtggagctccaccgtggggaggaactaggtgggggccaggaccctgtgcaattgctcagtggcttccccagacgggccttctcagaagctgacatggagcggcctctgcaggagctgggtatggctgcaagactagaaaccaggactagaaactgggggagtagggaggcatgcctaggaaaaggagggatgcaaagagaaggggctttgtgaacatggtgcaaggccaggaattttgggagcaaaaaccaagtatccttgtggttcaagcctgttttcttccatcttcaggactcgtgccttctgctgttctcattgtggccaagaaatgtcccagctgagggcctttgtcccattgtccctctgtgaccccttcatctttgataaagcactgacatctccttcctaataaatagaccctgagttctgta

SEQ ID NO: 68769 - DNA, 1078 bp, Homo sapiens
gtccgcttccttctcggctttcttctcgtcggtgttcccggctgctatagagccgggtgagagagcgagcgcccgtcggcgggtgtcgagggcgggttgcctcgcgctgacccttcccgccctccttctcgtcacacaccaggtccccgcggaagccgcggtgtcggcgccatggcggagctgacggctcttgagagtctcatcgagatgggcttccccaggggacgcgcggagaaggctctggccctcacagggaaccaggcatcgaggctgcgatggactggctgatggagcacgaagacgaccccgatgtggacgagcctttagagactccccttggacatatcctgggacgggagcccacttcctcagagcaaggcggccttgaaggatctggttctgctgccggagaaggcaaacccgctttgagtgaagaggaaagacaggaacaaactaagaggatgttggagctggtggcccagaagcagcgggagcgtgaagaaagagaggaacgggaggcattggaacgggaacggcagcgcaggagacaagggcaagagttgtcagcagcacgacagcggctacaggaagatgagatgcgccgggctgctgaggagaggcggagggaaaaggccgaggagttagcagccagacaaagagttagagaaaagatcgagagggacaaagcagagagagccaagaagtatggtggcagtgtgggctctcagccacccccagtggcaccagagccaggtcctgttccctcttctcccagccaggagcctcccaccaagcgggagtatgaccagtgtcgcatacaggtcaggctgccagatgggacctcactgacccagacgttccgggcccgggaacagctggcagctgtgaggctctatgtggagctccaccgtggggaggaactaggtgggggccaggaccctgtgcaattgctcagtggcttccccagacgggccttctcagaagctgacatggagcggcctctgcaggagctgggactcgtgccttctgctgttctcattgtgccacttctgatgcagtgcctcttctgagcaggcca

SEQ ID NO: 68770 - DNA, 1139 bp, Homo sapiens
tctgccatggacagatatgtctccccgttggcgcgatgtaggatggcgctgttccccgaacgctgtcctctactgacaccccttctccatgccccgacctggcgtactggtctggatcccggcccgtctgggtgctgatggagcccagtgaccgcctcgtttagcacgtctctcctccattatctaagcgttgtgtcgctgccccggtgagccacggagaaggctctggccctcacagggaaccaggcatcgaggctgcgatggactggctgatggagcacgaagacgaccccgatgtggacgagcctttagagactccccttggacatatcctgggacgggagcccacttcctcagagcaaggcggccttgaaggatctggttctgctgccggagaaggcaaacccgctttgagtgaagaggaaagacaggaacaaactaagaggatgttggagctggtggcccagaagcagcgggagcgtgaagaaagagaggaacgggaggcattggaacgggaacggcagcgcaggagacaagggcaagagttgtcagcagcacgacagcggctacaggaagatgagatgcgccgggctgctgaggagaggcggagggaaaaggccgaggagttagcagccagacaaagagttagagaaaagatcgagagggacaaagcagagagagccaagaagtatggtggcagtgtgggctctcagccacccccagtggcaccagagccaggtcctgttccctcttctcccagccaggagcctcccaccaagcgggagtatgaccagtgtcgcatacaggtcaggctgccagatgggacctcactgacccagacgttccgggcccgggaacagctggcagctgtgaggctctatgtggagctccaccgtggggaggaactaggtgggggccaggaccctgtgcaattgctcagtggcttccccagacgggccttctcagaagctgacatggagcggcctctgcaggagctgggactcgtgccttctgctgttctcattgtggccaagaaatgtcccagctgagggcctttgtcccattgtccctctgtgaccccttcatctttgataaagcactgacatctccttcctaataaatagaccctgagttctgta

SEQ ID NO: 68771 - DNA, 1300 bp, Homo sapiens
gtccgcttccttctcggctttcttctcgtcggtgttcccggctgctatagagccgggtgagagagcgagcgcccgtcggcgggtgtcgagggcgggttgcctcgcgctgacccttcccgccctccttctcgtcacacaccaggtccccgcggaagccgcggtgtcggcgccatggcggagctgacggctcttgagagtctcatcgagatgggcttccccaggggacgcgcggagaaggctctggccctcacagggaaccaggcatcgaggctgcgatggactggctgatggagcacgaagacgaccccgatgtggacgagcctttagagactccccttggacatatcctgggacgggagcccacttcctcagagcaaggcggccttgaaggatctggttctgctgccggagaaggcaaacccgctttgagtgaagaggaaagacaggaacaaactaagaggatgttggagctggtggcccagaagcagcgggagcgtgaagaaagagaggaacgggaggcattggaacgggaacggcagcgcaggagacaagggcaagagttgtcagcagcacgacagcggctacaggaagatgagatgcgccgggctgctgaggagaggcggagggaaaaggccgaggagttagcagccagacaaagagttagagaaaagatcgagagggacaaagcagagagagccaagaaggtaggtgactgagaagacgccacgggtaatggagtgggcaggttagtaaatcttttccagcttcagagggaaagcatgggcttatatgatctgtttcacctgaggatgggtgagtacctgattgactgttttactttgccctttagtatggtggcagtgtgggctctcagccacccccagtggcaccagagccaggtcctgttccctcttctcccagccaggagcctcccaccaagcgggagtatgaccagtgtcgcatacaggtcaggctgccagatgggacctcactgacccagacgttccgggcccgggaacagctggcagctgtgaggctctatgtggagctccaccgtggggaggaactaggtgggggccaggaccctgtgcaattgctcagtggcttccccagacgggccttctcagaagctgacatggagcggcctctgcaggagctgggactcgtgccttctgctgttctcattgtggccaagaaatgtcccagctgagggcctttgtcccattgtccctctgtgaccccttcatctttgataaagcactgacatctccttcctaataaatagaccctgagttctgta

SEQ ID NO: 68772 - DNA, 1407 bp, Homo sapiens
gtccgcttccttctcggctttcttctcgtcggtgttcccggctgctatagagccgggtgagagagcgagcgcccgtcggcgggtgtcgagggcgggttgcctcgcgctgacccttcccgccctccttctcgtcacacaccaggtccccgcggaagccgcggtgtcggcgccatggcggagctgacggctcttgagagtctcatcgagatgggcttccccaggggacgcgcggagaaggctctggccctcacagggaaccaggcatcgaggctgcgatggactggctgatggagcacgaagacgaccccgatgtggacgagcctttagagactccccttggacatatcctgggacgggagcccacttcctcagagcaaggcggccttgaaggatctggttctgctgccggagaaggcaaacccgctttgagtgaagaggaaagacaggaacaaactaagaggatgttggagctggtggcccagaagcagcgggagcgtgaagaaagagaggaacgggaggcattggaacgggaacggcagcgcaggagacaagggcaagagttgtcagcagcacgacagcggctacaggaagatgagatgcgccgggctgctgaggagaggcggagggaaaaggccgaggagttagcagccaggtctgggcaggggaaatgatggatagcagatgagaaagaaatcaagatttgctttgttgatgtctgacctaatttcttcttgtctacatttcagacaaagagttagagaaaagatcgagagggacaaagcagagagagccaagaagtatggtggcagtgtgggctctcagccacccccagtggcaccagagccaggtcctgttccctcttctcccagccaggagcctcccaccaagcgggagtatgaccagtgtcgcatacaggtcaggctgccagatgggacctcactgacccagacgttccgggcccgggaacagctggcagctgtgaggctctatgtggagctccaccgtggggaggaactaggtgggggccaggaccctgtgcaattgctcagtggcttccccagacgggccttctcagaagctgacatggagcggcctctgcaggagctgggactcgtgccttctgctgttctcattgtggccaagaaatgtcccagctgagggcctttgtcccattgtccctctgtgaccccttcatctttgataaagcactgacatctccttcctaataaatagaccctgagttctgtaaaaaaaaaaaaaaaaaaaaaaaacaaaaaatttgtgcgggcgcggctcgggccccgagaaaagtttttaaaaccatccgtttggggggggggggccccaggggtaggggaccatggggcacagggggtgccgaggggaacccgggggcgaaaaaggggg

SEQ ID NO: 68773 - DNA, 1102 bp, Homo sapiens
gtccgcttccttctcggctttcttctcgtcggtgttcccggctgctatagagccgggtgagagagcgagcgcccgtcggcgggtgtcgagggcgggttgcctcgcgctgacccttcccgccctccttctcgtcacacaccaggtccccgcggaagccgcggtgtcggcgccatggcggagctgacggctcttgagagtctcatcgagatgggcttccccaggggacgcgcggagaaggctctggccctcacagggaaccaggcatcgaggctgcgatggactggctgatggagcacgaagacgaccccgatgtggacgagcctttagagactccccttggacatatcctgggacgggagcccacttcctcagagcaaggcggccttgaaggatctggttctgctgccggagaaggcaaacccgctttgagtgaagaggaaagacaggaacaaactaagaggatgttggagctggtggcccagaagcagcgggagcgtgaagaaagagaggaacgggaggcattggaacgggaacggcagcgcaggagacaagggcaagagttgtcagcagcacgacagcggctacaggaagatgagatgcgccgggctgctgaggagaggcggagggaaaaggccgaggagttagcagccagtatggtggcagtgtgggctctcagccacccccagtggcaccagagccaggtcctgttccctcttctcccagccaggagcctcccaccaagcgggagtatgaccagtgtcgcatacaggtcaggctgccagatgggacctcactgacccagacgttccgggcccgggaacagctggcagctgtgaggctctatgtggagctccaccgtggggaggaactaggtgggggccaggaccctgtgcaattgctcagtggcttccccagacgggccttctcagaagctgacatggagcggcctctgcaggagctgggactcgtgccttctgctgttctcattgtggccaagaaatgtcccagctgagggcctttgtcccattgtccctctgtgaccccttcatctttgataaagcactgacatctccttcctaataaatagaccctgagttctgta

SEQ ID NO: 68774 - DNA, 792 bp, Homo sapiens
gtccgcttccttctcggctttcttctcgtcggtgttcccggctgctatagagccgggtgagagagcgagcgcccgtcggcgggtgtcgagggcgggttgcctcgcgctgacccttcccgccctccttctcgtcacacaccaggtccccgcggaagccgcggtgtcggcgccatggcggagctgacggctcttgagagtctcatcgagatgggcttccccaggggacgcgcggagaaggctctggccctcacagggaaccaggcatcgaggctgcgatggactggctgatggagcacgaagacgaccccgatgtggacgagcctttagagactccccttggacatatcctgggacgggagcccacttcctcagagcaaggcggccttgaaggatctggttctgctgccggagaaggcaaacccgctttgagtgaagaggaaagacaggaacaaactaagaggatgttggagctggtggcccagaagcagcgggagcgtgaagaaagagaggaacgggaggcattggaacgggaacggcagcgcaggagacaagggcaagagttgtcagcagcacgacagcggctacaggaagatgagatgcgccgggctgctgaggagaggcggagggaaaaggccgaggagttagcagccagtatggtggcagtgtgggctctcagccacccccagtggcaccagagccaggtcctgttccctcttctcccagccaggagcctcccaccaagcgggagtatgaccagtgtcgcatacaggtgctgccattctaattcttatc

SEQ ID NO: 68775 - DNA, 808 bp, Homo sapiens
gtccgcttccttctcggctttcttctcgtcggtgttcccggctgctatagagccgggtgagagagcgagcgcccgtcggcgggtgtcgagggcgggttgcctcgcgctgacccttcccgccctccttctcgtcacacaccaggtccccgcggaagccgcggtgtcggcgccatggcggagctgacggctcttgagagtctcatcgagatgggcttccccaggggacgcgcggagaaggctctggccctcacagggaaccaggcatcgaggctgcgatggactggctgatggagcacgaagacgaccccgatgtggacgagcctttagagactccccttggacatatcctgggacgggagcccacttcctcagagcaaggcggccttgaaggatctggttctgctgccggagaaggcaaacccgctttgagtgaagaggaaagacaggaacaaactaagaggatgttggagctggtggcccagaagcagcgggagcgtgaagaaagagaggaacgggaggcattggaacgggaacggcagcgcaggagacaagggcaagagttgtcagcagcacgacagcggctacaggaagatgagatgcgccgggctgctgaggagaggcggagggaaaaggccgaggagttagcagccagacaaagagttgagaaaagatcgatgggatcaccttcctgtctggaggcagagtgaggaggaggcgtccatcaacctcaatgcctaacaagttgcccctgtgaaccttgggctgactttctagccagcccgagcttgctaagctggcggaaaggact

SEQ ID NO: 68776 - DNA, 704 bp, Homo sapiens
tactactaaattcagcggccgctcgacaggagttagcagccagacaaagagttagagaaaagatcgagagggacaaagcagagagagccaagaagtatggtggcagtgtgggctctcagccacccccagtggcaccagagccaggtcctgttccctcttctcccagccaggagcctcccaccaagcgggagtatgaccagtgtcgcatacaggtcaggctgccagatgggacctcactgacccagacgttccgggcccgggaacagctggcagctgtgaggctctatgtggagctccaccgtggggaggaactaggtgggggccaggaccctgtgcaattgctcagtggcttccccagacgggccttctcagaagctgacatggagcggcctctgcaggagctgggactcgtgccttctgctgttctcattgtggccaagaaatgtcccagctgagggcctttgtcccattgtccctctgtgaccccttcatctttgataaagcactgacatctccttcctaataaatagaccctgagttctgtaaaaaaaaaaaaaaaaaaaaaaaacaaaaaatttgtgcgggcgcggctcgggccccgagaaaagtttttaaaaccatccgtttggggggggggggccccaggggtaggggaccatggggcacagggggtgccgaggggaacccgggggcgaaaaaggggg

SEQ ID NO: 68777 - DNA, 773 bp, Homo sapiens
gagatggctgcttctggactcacgtgggtcaccattgcagcagcacgacagcggctacaggaagatgagatgcgccgggctgctgaggagaggcggagggaaaaggccgaggagttagcagccagacaaagagttagagaaaagatcgagagggacaaagcagagagagccaagaaggtaggtgactgagaagacgccacgggtaatggagtgggcaggttagtaaatcttttccagcttcagagggaaagcatgggcttatatgatctgtttcacctgaggatgggtgagtacctgattgactgttttactttgccctttagtatggtggcagtgtgggctctcagccacccccagtggcaccagagccaggtcctgttccctcttctcccagccaggagcctcccaccaagcgggagtatgaccagtgtcgcatacaggtcaggctgccagatgggacctcactgacccagacgttccgggcccgggaacagctggcagctgtgaggctctatgtggagctccaccgtggggaggaactaggtgggggccaggaccctgtgcaattgctcagtggcttccccagacgggccttctcagaagctgacatggagcggcctctgcaggagctgggactcgtgccttctgctgttctcattgtggccaagaaatgtcccagctgagggcctttgtcccattgtccctctgtgaccccttcatctttgataaagcactgacatctccttcctaataaatagaccctgagttctgta

SEQ ID NO: 68778 - DNA, 623 bp, Homo sapiens
gtccgcttccttctcggctttcttctcgtcggtgttcccggctgctatagagccgggtgagagagcgagcgcccgtcggcgggtgtcgagggcgggttgcctcgcgctgacccttcccgccctccttctcgtcacacaccaggtccccgcggaagccgcggtgtcggcgccatggcggagctgacggctcttgagagtctcatcgagatgggcttccccaggggacgcgcggagaaggctctggccctcacagggaaccaggcatcgaggctgcgatggactggctgatggagcacgaagacgaccccgatgtggacgagcctttagagactccccttggacatatcctgggacgggagcccacttcctcagagcaaggcggccttgaaggatctggttctgctgccggagaaggcaaacccgctttgagtgaagaggaaagacaggaacaaactaagaggatgttggagctggtggcccagaagcagcgggagcgtgaagaaagagaatggaatgggaagatgatcttcccctagagtttggccatccagcagctgatttcctctttgaccacccccagtcgaattcctctcaacattcagacattccttctcttctctctg

SEQ ID NO: 68779 - DNA, 820 bp, Homo sapiens
tcttactcagcagttacccttttacttgttcatgtttttatttggtttattatgtagctatctggtgatgtggtatttatccagattcttttgtataatcttatccttgtctttcttaggttgtgagggagctgggagtctctcatccgcacttagtaaagcggagcctaagtggctgttcatttggtgctttaaatagtagttgtgctggttcaatctaagaagaagggggcccagctttagctcttttccttacttgggcacctcattcagttttgatgcccacaatactgagtatctcccttgccctttaggtcaggctgccagatgggacctcactgacccagacgttccgggcccgggaacagctggcagctgtgaggctctatgtggagctccaccgtggggaggaactaggtgggggccaggaccctgtgcaattgctcagtggcttccccagacgggccttctcagaagctgacatggagcggcctctgcaggagctgggtatggctgcaagactagaaaccaggactagaaactgggggagtagggaggcatgcctaggaaaaggagggatgcaaagagaaggggctttgtgaacatggtgcaaggccaggaattttgggagcaaaaaccaagtatccttgtggttcaagcctgttttcttccatcttcaggactcgtgccttctgctgttctcattgtggccaagaaatgtcccagctgagggcctttgtcccattgtccctctgtgaccccttcatctttgataaagcactgacatctccttcctaataaatagaccctgagttctgta

SEQ ID NO: 68780 - DNA, 1154 bp, Homo sapiens
gtccgcttccttctcggctttcttctcgtcggtgttcccggctgctatagagccgggtgagagagcgagcgcccgtcggcgggtgtcgagggcgggttgcctcgcgctgacccttcccgccctccttctcgtcacacaccaggtccccgcggaagccgcggtgtcggcgccatggcggagctgacggctcttgagagtctcatcgagatgggcttccccaggggacgcgcggagaaggctctggccctcacagggaaccaggcatcgaggctgcgatggactggctgatggagcacgaagacgaccccgatgtggacgagcctttagagactccccttggacatatcctgggacgggagcccacttcctcagagcaaggcggccttgaaggatctggttctgctgccggagaaggcaaacccgctttgagtgaagaggaaagacaggaacaaactaagaggatgttggagctggtggcccagaagcagcgggagcgtgaagaaagagaggaacgggaggcattggaacgggaacggcagcgcaggagacaagggcaagagttgtcagcagcacgacagcggctacaggaagatgagatgcgccgggctgctgaggagaggcggagggaaaaggccgaggagttagcagccagacaaagagttagagaaaagatcgagagggacaaagcagagagagccaagaagtatggtggcagtgtgggctctcagccacccccagtggcaccagagccaggtcctgttccctcttctcccagccaggagcctcccaccaagcgggagtatgaccagtgtcgcatacaggtcaggctgccagatgggacctcactgacccagacgttccgggcccgggaacagctggcagctgtgaggctctatgtggagctccaccgtggggaggaactaggtgggggccaggaccctgtgcaattgctcagtggcttccccagacgggccttctcagaagctgacatggagcggcctctgcaggagctgggactcgtgccttctgctgttctcattgtggccaagaaatgtcccagctgagggcctttgtcccattgtccctctgtgaccccttcatctttgataaagcactgacatctccttcctaataaatagaccctgagttctgta

SEQ ID NO: 68781 - DNA, 1162 bp, Homo sapiens
  misc_feature (13)..(13): n is a, c, g, or t
ttgcggctgtccncccggggtttgggattcgtcgaccaggcgtcgtaggctgctatagagccgggtgagagagcgagcgcccgtcggcgggtgtcgagggcgggttgcctcgcgctgacccttcccgccctccttctcgtcacacaccaggtccccgcggaagccgcggtgtcggcgccatggcggagctgacggctcttgagagtctcatcgagatgggcttccccaggggacgcgcggagaaggctctggccctcacagggaaccaggcatcgaggctgcgatggactggctgatggagcacgaagacgaccccgatgtggacgagcctttagagactccccttggacatatcctgggacgggagcccacttcctcagagcaaggcggccttgaaggatctggttctgctgccggagaaggcaaacccgctttgagtgaagaggaaagacaggaacaaactaagaggatgttggagctggtggcccagaagcagcgggagcgtgaagaaagagaggaacgggaggcattggaacgggaacggcagcgcaggagacaagggcaagagttgtcagcagcacgacagcggctacaggaagatgagatgcgccgggctgctgaggagaggcggagggaaaaggccgaggagttagcagccagacaaagagttagagaaaagatcgagagggacaaagcagagagagccaagaagtatggtggcagtgtgggctctcagccacccccagtggcaccagagccaggtcctgttccctcttctcccagccaggagcctcccaccaagcgggagtatgaccagtgtcgcatacaggtcaggctgccagatgggacctcactgacccagacgttccgggcccgggaacagctggcagctgtgaggctctatgtggagctccaccgtggggaggaactaggtgggggccaggaccctgtgcaattgctcagtggcttccccagacgggccttctcagaagctgacatggagcggcctctgcaggagctgggactcgtgccttctgctgttctcattgtggccaagaaatgtcccagctgagggcctttgtcccattgtccctctgtgaccccttcatctttgataaagcactgacatctccttcctaataaatagaccctgagttctgta

SEQ ID NO: 68782 - DNA, 1313 bp, Homo sapiens
gtccgcttccttctcggctttcttctcgtcggtgttcccggctgctatagagccgggtgagagagcgagcgcccgtcggcgggtgtcgagggcgggttgcctcgcgctgacccttcccgccctccttctcgtcacacaccaggtccccgcggaagccgcggtgtcggcgccatggcggagctgacggctcttgagagtctcatcgagatgggcttccccaggggacgcgcggagaaggctctggccctcacagggaaccaggcatcgaggctgcgatggactggctgatggagcacgaagacgaccccgatgtggacgagcctttagagactccccttggacatatcctgggacgggagcccacttcctcagagcaaggcggccttgaaggatctggttctgctgccggagaaggcaaacccgctttgagtgaagaggaaagacaggaacaaactaagaggatgttggagctggtggcccagaagcagcgggagcgtgaagaaagagaggaacgggaggcattggaacgggaacggcagcgcaggagacaagggcaagagttgtcagcagcacgacagcggctacaggaagatgagatgcgccgggctgctgaggagaggcggagggaaaaggccgaggagttagcagccagacaaagagttagagaaaagatcgagagggacaaagcagagagagccaagaagtatggtggcagtgtgggctctcagccacccccagtggcaccagagccaggtcctgttccctcttctcccagccaggagcctcccaccaagcgggagtatgaccagtgtcgcatacaggtcaggctgccagatgggacctcactgacccagacgttccgggcccgggaacagctggcagctgtgaggctctatgtggagctccaccgtggggaggaactaggtgggggccaggaccctgtgcaattgctcagtggcttccccagacgggccttctcagaagctgacatggagcggcctctgcaggagctgggactcgtgccttctgctgttctcattgtggccaagaaatgtcccagctgagggcctttgtcccattgtccctctgtgaccccttcatctttgataaagcactgacatctccttcctaataaatagaccctgagttctgtaaaaaaaaaaaaaaaaaaaaaaaacaaaaaatttgtgcgggcgcggctcgggccccgagaaaagtttttaaaaccatccgtttggggggggggggccccaggggtaggggaccatggggcacagggggtgccgaggggaacccgggggcgaaaaaggggg

SEQ ID NO: 68783 - DNA, 1301 bp, Homo sapiens
gtccgcttccttctcggctttcttctcgtcggtgttcccggctgctatagagccgggtgagagagcgagcgcccgtcggcgggtgtcgagggcgggttgcctcgcgctgacccttcccgccctccttctcgtcacacaccaggtccccgcggaagccgcggtgtcggcgccatggcggagctgacggctcttgagagtctcatcgagatgggcttccccaggggacgcgcggagaaggctctggccctcacagggaaccaggcatcgaggctgcgatggactggctgatggagcacgaagacgaccccgatgtggacgagcctttagagactccccttggacatatcctgggacgggagcccacttcctcagagcaaggcggccttgaaggatctggttctgctgccggagaaggcaaacccgctttgagtgaagaggaaagacaggaacaaactaagaggatgttggagctggtggcccagaagcagcgggagcgtgaagaaagagaggaacgggaggcattggaacgggaacggcagcgcaggagacaagggcaagagttgtcagcagcacgacagcggctacaggaagatgagatgcgccgggctgctgaggagaggcggagggaaaaggccgaggagttagcagccagacaaagagttagagaaaagatcgagagggacaaagcagagagagccaagaagtatggtggcagtgtgggctctcagccacccccagtggcaccagagccaggtcctgttccctcttctcccagccaggagcctcccaccaagcgggagtatgaccagtgtcgcatacaggtcaggctgccagatgggacctcactgacccagacgttccgggcccgggaacagctggcagctgtgaggctctatgtggagctccaccgtggggaggaactaggtgggggccaggaccctgtgcaattgctcagtggcttccccagacgggccttctcagaagctgacatggagcggcctctgcaggagctgggactcgtgccttctgctgttctcattgtggccaagaaatgtcccagctgagggcctttgtcccattgtccctctgtgaccccttcatctttgataaagcactgacatctccttcctaataaatagaccctgagttctgtaaaaaaacaaccacttaaaaaaaaaaactcgggcataaatctcggggggcggacaagagggatcaagggcacggccaaaggttctcggaccccattttggcacaaggggatactgggcgcccaaaggagggaaaatttaaaaccggcg

SEQ ID NO: 68784 - DNA, 1052 bp, Homo sapiens
gtccgcttccttctcggctttcttctcgtcggtgttcccggtccccgcggaagccgcggtgtcggcgccatggcggagctgacggctcttgagagtctcatcgagatgggcttccccaggggacgcgcggagaaggctctggccctcacagggaaccaggcatcgaggctgcgatggactggctgatggagcacgaagacgaccccgatgtggacgagcctttagagactccccttggacatatcctgggacgggagcccacttcctcagagcaaggcggccttgaaggatctggttctgctgccggagaaggcaaacccgctttgagtgaagaggaaagacaggaacaaactaagaggatgttggagctggtggcccagaagcagcgggagcgtgaagaaagagaggaacgggaggcattggaacgggaacggcagcgcaggagacaagggcaagagttgtcagcagcacgacagcggctacaggaagatgagatgcgccgggctgctgaggagaggcggagggaaaaggccgaggagttagcagccagacaaagagttagagaaaagatcgagagggacaaagcagagagagccaagaagtatggtggcagtgtgggctctcagccacccccagtggcaccagagccaggtcctgttccctcttctcccagccaggagcctcccaccaagcgggagtatgaccagtgtcgcatacaggtcaggctgccagatgggacctcactgacccagacgttccgggcccgggaacagctggcagctgtgaggctctatgtggagctccaccgtggggaggaactaggtgggggccaggaccctgtgcaattgctcagtggcttccccagacgggccttctcagaagctgacatggagcggcctctgcaggagctgggactcgtgccttctgctgttctcattgtggccaagaaatgtcccagctgagggcctttgtcccattgtccctctgtgaccccttcatctttgataaagcactgacatctccttcctaataaatagaccctgagttctgta

SEQ ID NO: 68785 - DNA, 977 bp, Homo sapiens
gtccgcttccttctcggctttcttctcgtcggtgttcccggctgctatagagccgggtgagagagcgagcgcccgtcggcgggtgtcgagggcgggttgcctcgcgctgacccttcccgccctccttctcgtcacacaccaggtccccgcggaagccgcggtgtcggcgccatggcggagctgacggctcttgagagtctcatcgagatgggcttccccaggggacgcgcggagaaggctctggccctcacagggaaccaggcatcgaggctgcgatggactggatgttggagctggtggcccagaagcagcgggagcgtgaagaaagagaggaacgggaggcattggaacgggaacggcagcgcaggagacaagggcaagagttgtcagcagcacgacagcggctacaggaagatgagatgcgccgggctgctgaggagaggcggagggaaaaggccgaggagttagcagccagacaaagagttagagaaaagatcgagagggacaaagcagagagagccaagaagtatggtggcagtgtgggctctcagccacccccagtggcaccagagccaggtcctgttccctcttctcccagccaggagcctcccaccaagcgggagtatgaccagtgtcgcatacaggtcaggctgccagatgggacctcactgacccagacgttccgggcccgggaacagctggcagctgtgaggctctatgtggagctccaccgtggggaggaactaggtgggggccaggaccctgtgcaattgctcagtggcttccccagacgggccttctcagaagctgacatggagcggcctctgcaggagctgggactcgtgccttctgctgttctcattgtggccaagaaatgtcccagctgagggcctttgtcccattgtccctctgtgaccccttcatctttgataaagcactgacatctccttcctaataaatagaccctgagttctgta

SEQ ID NO: 68786 - DNA, 1394 bp, Homo sapiens
gtccgcttccttctcggctttcttctcgtcggtgttcccggctgctatagagccgggtgagagagcgagcgcccgtcggcgggtgtcgagggcgggttgcctcgcgctgacccttcccgccctccttctcgtcacacaccaggtccccgcggaagccgcggtgtcggcgccatggcggagctgacggctcttgagagtctcatcgagatgggcttccccaggggacgcgcggagaaggctctggccctcacagggaaccaggcatcgaggctgcgatggactggctgatggagcacgaagacgaccccgatgtggacgagcctttagagactccccttggacatatcctgggacgggagcccacttcctcagagcaaggcggccttgaaggatctggttctgctgccggagaaggcaaacccgctttgagtgaagaggaaagacaggaacaaactaagaggatgttggagctggtggcccagaagcagcgggagcgtgaagaaagagaggaacgggaggcattggaacgggaacggcagcgcaggagacaagggcaagagttgtcagcagcacgacagcggctacaggaagatgagatgcgccgggctgctgaggagaggcggagggaaaaggccgaggagttagcagccaggtctgggcaggggaaatgatggatagcagatgagaaagaaatcaagatttgctttgttgatgtctgacctaatttcttcttgtctacatttcagacaaagagttagagaaaagatcgagagggacaaagcagagagagccaagaaggtaggtgactgagaagacgccacgggtaatggagtgggcaggttagtaaatcttttccagcttcagagggaaagcatgggcttatatgatctgtttcacctgaggatgggtgagtacctgattgactgttttactttgccctttagtatggtggcagtgtgggctctcagccacccccagtggcaccagagccaggtcctgttccctcttctcccagccaggagcctcccaccaagcgggagtatgaccagtgtcgcatacaggtcaggctgccagatgggacctcactgacccagacgttccgggcccgggaacagctggcagctgtgaggctctatgtggagctccaccgtggggaggaactaggtgggggccaggaccctgtgcaattgctcagtggcttccccagacgggccttctcagaagctgacatggagcggcctctgcaggagctgggactcgtgccttctgctgttctcattgtggccaagaaatgtcccagctgagggcctttgtcccattgtccctctgtgaccccttcatctttgataaagcactgacatctccttcctaataaatagaccctgagttctgta

SEQ ID NO: 68787 - DNA, 1058 bp, Homo sapiens
gtccgcttccttctcggctttcttctcgtcggtgttcccggctgctatagagccgggtgagagagcgagcgcccgtcggcgggtgtcgagggcgggttgcctcgcgctgacccttcccgccctccttctcgtcacacaccaggtccccgcggaagccgcggtgtcggcgccatggcggagctgacggctcttgagagtctcatcgagatgggcttccccaggggacgcgcggagaaggctctggccctcacagggaaccaggcatcgaggctgcgatggactggctgatggagcacgaagacgaccccgatgtggacgagcctttagagactccccttggacatatcctgggacgggagcccacttcctcagagcaaggcggccttgaaggatctggttctgctgccggagaaggcaaacccgctttgagtgaagaggaaagacaggaacaaactaagaggatgttggagctggtggcccagaagcagcgggagcgtgaagaaagagaggaacgggaggcattggaacgggaaaaggccgaggagttagcagccagacaaagagttagagaaaagatcgagagggacaaagcagagagagccaagaagtatggtggcagtgtgggctctcagccacccccagtggcaccagagccaggtcctgttccctcttctcccagccaggagcctcccaccaagcgggagtatgaccagtgtcgcatacaggtcaggctgccagatgggacctcactgacccagacgttccgggcccgggaacagctggcagctgtgaggctctatgtggagctccaccgtggggaggaactaggtgggggccaggaccctgtgcaattgctcagtggcttccccagacgggccttctcagaagctgacatggagcggcctctgcaggagctgggactcgtgccttctgctgttctcattgtggccaagaaatgtcccagctgagggcctttgtcccattgtccctctgtgaccccttcatctttgataaagcactgacatctccttcctaataaatagaccctgagttctgta

SEQ ID NO: 68788 - DNA, 1421 bp, Homo sapiens
gtccgcttccttctcggctttcttctcgtcggtgttcccggctgctatagagccgggtgagagagcgagcgcccgtcggcgggtgtcgagggcgggttgcctcgcgctgacccttcccgccctccttctcgtcacacaccaggtccccgcggaagccgcggtgtcggcgccatggcggagctgacggctcttgagagtctcatcgagatgggcttccccaggggacgcgcgtaagggagttccccaaccccggcctgcgggtgtggggggtcgcggacctgtctcggcctttgccccagcctgaccgtcaccatggctcgtgggcgctattcatggtgtttctgcccccagggagaaggctctggccctcacagggaaccaggcatcgaggctgcgatggactggctgatggagcacgaagacgaccccgatgtggacgagcctttagagactccccttggacatatcctgggacgggagcccacttcctcagagcaaggcggccttgaaggatctggttctgctgccggagaaggcaaacccgctttgagtgaagaggaaagacaggaacaaactaagaggatgttggagctggtggcccagaagcagcgggagcgtgaagaaagagaggaacgggaggcattggaacgggaacggcagcgcaggagacaagggcaagagttgtcagcagcacgacagcggctacaggaagatgagatgcgccgggctgctgaggagaggcggagggaaaaggccgaggagttagcagccagacaaagagttagagaaaagatcgagagggacaaagcagagagagccaagaaggtaggtgactgagaagacgccacgggtaatggagtgggcaggttagtaaatcttttccagcttcagagggaaagcatgggcttatatgatctgtttcacctgaggatgggtgagtacctgattgactgttttactttgccctttagtatggtggcagtgtgggctctcagccacccccagtggcaccagagccaggtcctgttccctcttctcccagccaggagcctcccaccaagcgggagtatgaccagtgtcgcatacaggtcaggctgccagatgggacctcactgacccagacgttccgggcccgggaacagctggcagctgtgaggctctatgtggagctccaccgtggggaggaactaggtgggggccaggaccctgtgcaattgctcagtggcttccccagacgggccttctcagaagctgacatggagcggcctctgcaggagctgggactcgtgccttctgctgttctcattgtggccaagaaatgtcccagctgagggcctttgtcccattgtccctctgtgaccccttcatctttgataaagcactgacatctccttcctaataaatagaccctgagttctgta

SEQ ID NO: 68789 - DNA, 1079 bp, Homo sapiens
  misc_feature (1001)..(1001): n is a, c, g, or t
  misc_feature (1037)..(1037): n is a, c, g, or t
gtccgcttccttctcggctttcttctcgtcggtgttcccggctgctatagagccgggtgagagagcgagcgcccgtcggcgggtgtcgagggcgggttgcctcgcgctgacccttcccgccctccttctcgtcacacaccaggtccccgcggaagccgcggtgtcggcgccatggcggagctgacggctcttgagagtctcatcgagatgggcttccccaggggacgcgcggagaaggctctggccctcacagggaaccaggcatcgaggctgcgatggactggctgatggagcacgaagacgaccccgatgtggacgagcctttagagactccccttggacatatcctgggacgggagcccacttcctcagagcaaggcggccttgaaggatctggttctgctgccggagaaggcaaacccgctttgagtgaagaggaaagacaggaacaaactaagaggatgttggagctggtggcccagaagcagcgggagcgtgaagaaagagaggaacgggaggcattggaacgggaacggcagcgcaggagacaagggcaagagttgtccggcgcatctcatcttcctgtagccgctgtcgtgctgctgacaactcttgcccttctctctccactccccgttctctctccaccccgggagtggagagagaaggatgaggaaggaggagggaagggaggaggtggaaggttaacactttaccatgattagggagacctcacctccatcactaatccctgggaagagtatgaaaatggggagaagaaagggtaagaaatcaaacctcagcggttgaacaaagggtcaccgagctatactagtcaagaagcagcttctatgtaactgaccctgaggggataaaaacagggaagattccaccatctcccctgtgacctcagcacctaagcaggcactcgactataggctttccttctccatgattccccaactctatacatcttacttccaaaccccattctaaggtgngctggctcccagggaaaggatcagctcaggcagggnaggacagccccagcagacgtattgacatctctctcactccgg

SEQ ID NO: 68790 - DNA, 689 bp, Homo sapiens
gtccgcttccttctcggctttcttctcgtcggtgttcccggctgctatagagccgggtgagagagcgagcgcccgtcggcgggtgtcgagggcgggttgcctcgcgctgacccttcccgccctccttctcgtcacacaccaggtccccgcggaagccgcggtgtcggcgccatggcggagctgacggctcttgagagtctcatcgagatgggcttccccaggggacgcgcggagaaggctctggccctcacagggaaccaggcatcgaggctgcgatggactggctgatggagcacgaagacgaccccgatgtggacgagcctttagagactccccttggacatatcctgggacgggagcccacttcctcagagcaaggcggccttgaaggatctggttctgctgccggagaaggcaaacccgctttgagtgaagaggaaagacaggaacaaactaagagatgttggagctgctggcccttacgcgccgcccgccgtcgccatctgtttcccttccctcccccatacctagcccgagtctgagccctaacgagaaggctgggcctaggccgctggatgctggagtgacaggaagggagaaagggaaaaagcgggaagagtcgagaagcctgagtgttaacaggccaagtgcgtcgcgcgtgaggggcagcaggtgtatgctctagacac

SEQ ID NO: 68791 - DNA, 930 bp, Homo sapiens
ggctcttcccagctgaagagcaccctcctggagcagcctcttcagcaggctgctccaggagcacagcggcatctttggcttcagcgtgtcccataccacgaggaacccgaggcccggcgaggagaacggcaaagattactactttgtaaccagggaggtgatgcagcgtgacatagcagccggcgacttcatcgagcatgccgagttctcggggaacctgtatggcacgagcaaggtggcggtgcaggccgtgcaggccatgaaccgcatctgtgtgctggacgtggacctgcagggtgtgcggaacatcaaggccaccgatctgcggcccatctacatctctgtgcagccgccttcactgcacgtgctggagcagcggctgcggcagcgcaacactgaaaccgaggagagcctggtgaagcggctggctgctgcccaggccgacatggagagcagcaaggagcccggcctgtttgatgtggtcatcattaacgacagcctggaccaggcctacgcagagctgaaggaggcgctctctgaggaaatcaagaaagctcaaaggaccggcgcctgaggcttgctgtctgttctcggcaccccgggcccatacaggaccagggcagcagcattgagccacccccttggcaggcgatacggcagctctgtgcccttggccagcatgtggagtggaggagatgctgcccctgtggttggaacatcctggggtgacccccgacccagcctcgctgggctgtcccctgtccctatctctcactctggacccagggctgacatcctaataaaataactgttggattagaaaccacagagaagaaaaactcgacggactaacagcgcggccgcacaaagtcataaggggacaggtaaaatgttcgcgcacacgcttctgcaaagggacatacggaccca

SEQ ID NO: 68792 - DNA, 1647 bp, Homo sapiens
  misc_feature (1640)..(1640): n is a, c, g, or t
cacaaaaaagtttttaaattttttggtacagaaggggtttccctatgatccccaggctggtctccaattcctggcctcaagcggtcctcccggctcggactcccaaagagctgggatcacagacgtgaaccacgcgcccggccacattccccaattaatggtttttggagagtggccggtttggaacgggctagcggagtcgttcgttagttaggtccctgcagtgtagatggaggacggaaacggcgctgtgacataagcgggaggaggcgggctgaggcagcgctgtgacgtagcagatgaaagccgggcccgcgctgcactgaggtacttctctgagtgacaagcgggacaagtacgccgtgggcggggccggcgggtcgtgatgttagttcgcgctgtgtggaggcgggccggcgtggcgctgtgacgcagcgggagaagacgggctgggagggcgctgtgctgaacgcccctgcggtcgcgacaggccagcgcaggtggaggcggggctagcgaggcactgaggtaagtacttccctaaggggcggggaagaacgagtgagacatgggcggggcagtcgcctcatgacgtcagtctcgcgcgcgggcggaggtgggccggtgcggcgctgtcacgtaggttcagtgggcggaagaggtggccccggatgctgcggcgcccgctggccgggctggctgcggccgccctgggccgggccccaccggacggcatgtcgggccccaggcctgtggtgctgagcgggccttcgggagctgggaagagcaccctgctgaagaggctgctccaggagcacagcggcatctttggcttcagcgtgtcccataccacgaggaacccgaggcccggcgaggagaacggcaaagattactactttgtaaccagggaggtgatgcagcgtgacatagcagccggcgacttcatcgagcatgccgagttctcggggaacctgtatggcacgagcaaggtggcggtgcaggccgtgcaggccatgaaccgcatctgtgtgctggacgtggacctgcagggtgtgcggaacatcaaggccaccgatctgcggcccatctacatctctgtgcagccgccttcactgcacgtgctggagcagcggctgcggcagcgcaacactgaaaccgaggagagcctggtgaagcggctggctgctgcccaggccgacatggagagcagcaaggagcccggcctgtttgatgtggtcatcattaacgacagcctggaccaggcctacgcagagctgaaggaggcgctctctgaggaaatcaagaaagctcaaaggaccggcgcctgaggcttgctgtctgttctcggcaccccgggcccatacaggaccagggcagcagcattgagccacccccttggcaggcgatacggcagctctgtgcccttggccagcatgtggagtggaggagatgctgcccctgtggttggaacatcctggggtgacccccgacccagcctcgctgggctgtcccctgtccctatctctcactctggacccagggctgacatcctaataaaataactgttggattagaaacaaataaaaaaaaaaaaaaaaaaaaaaaaaaaaaatacaaaaaaaaaaaaaaaaaaaaaaagngggggcg

SEQ ID NO: 68793 - DNA, 1684 bp, Homo sapiens
cacaaaaaagtttttaaattttttggtacagaaggggtttccctatgatccccaggctggtctccaattcctggcctcaagcggtcctcccggctcggactcccaaagagctgggatcacagacgtgaaccacgcgcccggccacattccccaattaatggtttttggagagtggccggtttggaacgggctagcggagtcgttcgttagttaggtccctgcagtgtagatggaggacggaaacggcgctgtgacataagcgggaggaggcgggctgaggcagcgctgtgacgtagcagatgaaagccgggcccgcgctgcactgaggtacttctctgagtgacaagcgggacaagtacgccgtgggcggggccggcgggtcgtgatgttagttcgcgctgtgtggaggcgggccggcgtggcgctgtgacgcagcgggagaagacgggctgggagggcgctgtgctgaacgcccctgcggtcgcgacaggccagcgcaggtggaggcggggctagcgaggcactgaggtaagtacttccctaaggggcggggaagaacgagtgagacatgggcggggcagtcgcctcatgacgtcagtctcgcgcgcgggcggaggtgggccggtgcggcgctgtcacgtaggttcagtgggcggaagaggtggccccggatgctgcggcgcccgctggccgggctggctgcggccgccctgggccgggccccaccggacggcatgtcgggccccaggcctgtggtgctgagcgggccttcgggagctgggaagagcaccctgctgaagaggctgctccaggagcacagcggcatctttggcttcagcgtgtcccataccacgaggaacccgaggcccggcgaggagaacggcaaagattactactttgtaaccagggaggtgatgcagcgtgacatagcagccggcgacttcatcgagcatgccgagttctcggggaacctgtatggcacgagcaaggtggcggtgcaggccgtgcaggccatgaaccgcatctgtgtgctggacgtggacctgcagggtgtgcggaacatcaaggccaccgatctgcggcccatctacatctctgtgcagccgccttcactgcacgtgctggagcagcggctgcggcagcgcaacactgaaaccgaggagagcctggtgaagcggctggctgctgcccaggccgacatggagagcagcaaggagcccggcctgtttgatgtggtcatcattaacgacagcctggaccaggcctacgcagagctgaaggaggcgctctctgaggaaatcaagaaagctcaaaggaccggcgcctgaggcttgctgtctgttctcggcaccccgggcccatacaggaccagggcagcagcattgagccacccccttggcaggcgatacggcagctctgtgcccttggccagcatgtggagtggaggagatgctgcccctgtggttggaacatcctggggtgacccccgacccagcctcgctgggctgtcccctgtccctatctctcactctggacccagggctgacatcctaataaaataactgttggattagaaaccacagagaagaaaaactcgacggactaacagcgcggccgcacaaagtcataaggggacaggtaaaatgttcgcgcacacgcttctgcaaagggacatacggaccca

SEQ ID NO: 68794 - DNA, 2524 bp, Homo sapiens
cacaaaaaagtttttaaattttttggtacagaaggggtttccctatgatccccaggctggtctccaattcctggcctcaagcggtcctcccggctcggactcccaaagagctgggatcacagacgtgaaccacgcgcccggccacattccccaattaatggtttttggagagtggccggtttggaacgggctagcggagtcgttcgttagttaggtccctgcagtgtagatggaggacggaaacggcgctgtgacataagcgggaggaggcgggctgaggcagcgctgtgacgtagcagatgaaagccgggcccgcgctgcactgaggtacttctctgagtgacaagcgggacaagtacgccgtgggcggggccggcgggtcgtgatgttagttcgcgctgtgtggaggcgggccggcgtggcgctgtgacgcagcgggagaagacgggctgggagggcgctgtgctgaacgcccctgcggtcgcgacaggccagcgcaggtggaggcggggctagcgaggcactgaggtaagtacttccctaaggggcggggaagaacgagtgagacatgggcggggcagtcgcctcatgacgtcagtctcgcgcgcgggcggaggtgggccggtgcggcgctgtcacgtaggttcagtgggcggaagaggtggccccggatgctgcggcgcccgctggccgggctggctgcggccgccctgggccgggccccaccggacggtgagtacgacaagcgcgatcgcgagggtgactcgggtcgaggcggcagcggtccctgcgctttgcggtcgcccagtccacgccgcctccggatctcctcctagccgagacgccctgtgccgcattcaactgtgggccctgagaacgggggagctctggagggcggacgggctggcaacgcagcggagcccgggtcccggagggcggggcgctcctcaggagctgggcaggccggcagttatcgcagtgtcgagctgctccccgggcgtataggagcgctcggtgtcttcccgacacctgggcgcgccgccaaagagagcagctgggagtccctaccgctggcccggcgcggtgtgcgctccggttcccacctcaccctgcaagccttggggtcctgggcggatggagccggctattccggggctcccaggattctgcctactccgcggcacggcgcagagacggggacttggggaaacagcaggccttcccgacgcatgggtgtggcatttggggttcggattctccaaagccagagtccgggttggggttcttgaagctgccctgctgccattcttgagcgtcgccttagaagtatgccccagtaaggactggtgtgggaagcaggtgcctcaaagttgattttgaccctgcgtgtggtgggcctcggtttcgtctttgcatgaaagaggtcggtcctgaggccccgggctgggtcctgctctgctgtctttgggctcatggccccttcctgtctcaggcttgctctgctctttacctggggttgctgtcgaggaccctgtgcaagactcggccggtttttctttctccctgatggacagacccaaacatagccgcgcagcatcgtgaagggctggggccttcactcctctgtggctctggaagagcccgatttcctcaggaggcatgtcgggccccaggcctgtggtgctgagcgggccttcgggagctgggaagagcaccctgctgaagaggctgctccaggagcacagcggcatctttggcttcagcgtgtcccataccacgaggaacccgaggcccggcgaggagaacggcaaagattactactttgtaaccagggaggtgatgcagcgtgacatagcagccggcgacttcatcgagcatgccgagttctcggggaacctgtatggcacgagcaaggtggcggtgcaggccgtgcaggccatgaaccgcatctgtgtgctggacgtggacctgcagggtgtgcggaacatcaaggccaccgatctgcggcccatctacatctctgtgcagccgccttcactgcacgtgctggagcagcggctgcggcagcgcaacactgaaaccgaggagagcctggtgaagcggctggctgctgcccaggccgacatggagagcagcaaggagcccggcctgtttgatgtggtcatcattaacgacagcctggaccaggcctacgcagagctgaaggaggcgctctctgaggaaatcaagaaagctcaaaggaccggcgcctgaggcttgctgtctgttctcggcaccccgggcccatacaggaccagggcagcagcattgagccacccccttggcaggcgatacggcagctctgtgcccttggccagcatgtggagtggaggagatgctgcccctgtggttggaacatcctggggtgacccccgacccagcctcgctgggctgtcccctgtccctatctctcactctggacccagggctgacatcctaataaaataactgttggattagaaactccaaaaaaaatggaatgtgg

SEQ ID NO: 68795 - DNA, 3065 bp, Homo sapiens
cacaaaaaagtttttaaattttttggtacagaaggggtttccctatgatccccaggctggtctccaattcctggcctcaagcggtcctcccggctcggactcccaaagagctgggatcacagacgtgaaccacgcgcccggccacattccccaattaatggtttttggagagtggccggtttggaacgggctagcggagtcgttcgttagttaggtccctgcagtgtagatggaggacggaaacggcgctgtgacataagcgggaggaggcgggctgaggcagcgctgtgacgtagcagatgaaagccgggcccgcgctgcactgaggtacttctctgagtgacaagcgggacaagtacgccgtgggcggggccggcgggtcgtgatgttagttcgcgctgtgtggaggcgggccggcgtggcgctgtgacgcagcgggagaagacgggctgggagggcgctgtgctgaacgcccctgcggtcgcgacaggccagcgcaggtggaggcggggctagcgaggcactgaggtaagtacttccctaaggggcggggaagaacgagtgagacatgggcggggcagtcgcctcatgacgtcagtctcgcgcgcgggcggaggtgggccggtgcggcgctgtcacgtaggttcagtgggcggaagaggtggccccggatgctgcggcgcccgctggccgggctggctgcggccgccctgggccgggccccaccggacggtgagtacgacaagcgcgatcgcgagggtgactcgggtcgaggcggcagcggtccctgcgctttgcggtcgcccagtccacgccgcctccggatctcctcctagccgagacgccctgtgccgcattcaactgtgggccctgagaacgggggagctctggagggcggacgggctggcaacgcagcggagcccgggtcccggagggcggggcgctcctcaggagctgggcaggccggcagttatcgcagtgtcgagctgctccccgggcgtataggagcgctcggtgtcttcccgacacctgggcgcgccgccaaagagagcagctgggagtccctaccgctggcccggcgcggtgtgcgctccggttcccacctcaccctgcaagccttggggtcctgggcggatggagccggctattccggggctcccaggattctgcctactccgcggcacggcgcagagacggggacttggggaaacagcaggccttcccgacgcatgggtgtggcatttggggttcggattctccaaagccagagtccgggttggggttcttgaagctgccctgctgccattcttgagcgtcgccttagaagtatgccccagtaaggactggtgtgggaagcaggtgcctcaaagttgattttgaccctgcgtgtggtgggcctcggtttcgtctttgcatgaaagaggtcggtcctgaggccccgggctgggtcctgctctgctgtctttgggctcatggccccttcctgtctcaggcttgctctgctctttacctggggttgctgtcgaggaccctgtgcaagactcggccggtttttctttctccctgatggacagacccaaacatagccgcgcagcatcgtgaagggctggggccttcactcctctgtggctctggaagagcccgatttcctcaggaggtaaaggaatgttcctgtcccccccggggaaagaaagtgaaaatgaaagcgccctggctgctcctggtgtggtcccatttaaaacgaggttgctgaaggccaggatgcgtgctacccggatgtgtgcccagaaaccctgcagccaagagcagccgcctggaccaccagcctccccttcatccacctggcccagcccagagcccaggcccacgtctggtggtttgtgtcttacgagaggccaggcgggggctgaattctctcggttctcagaaggtcaagccctctgttagcatctcctcgaacagtgggccgggggcaaggtggtgactctgttcagtccttaggatggctggaagccagaaggaggagattatgccgccacagcagggagtgcctttccaggaaagcggctgctggggcagcatgggagcccagtccagggagcgttctggcagagaccattccggaacatggatctgcgccggcggctcccaggagaccttccatctcggagctcctgtggagaccacgtgcctggcaggcatgtcgggccccaggcctgtggtgctgagcgggccttcgggagctgggaagagcaccctgctgaagaggctgctccaggagcacagcggcatctttggcttcagcgtgtcccataccacgaggaacccgaggcccggcgaggagaacggcaaagattactactttgtaaccagggaggtgatgcagcgtgacatagcagccggcgacttcatcgagcatgccgagttctcggggaacctgtatggcacgagcaaggtggcggtgcaggccgtgcaggccatgaaccgcatctgtgtgctggacgtggacctgcagggtgtgcggaacatcaaggccaccgatctgcggcccatctacatctctgtgcagccgccttcactgcacgtgctggagcagcggctgcggcagcgcaacactgaaaccgaggagagcctggtgaagcggctggctgctgcccaggccgacatggagagcagcaaggagcccggcctgtttgatgtggtcatcattaacgacagcctggaccaggcctacgcagagctgaaggaggcgctctctgaggaaatcaagaaagctcaaaggaccggcgcctgaggcttgctgtctgttctcggcaccccgggcccatacaggaccagggcagcagcattgagccacccccttggcaggcgatacggcagctctgtgcccttggccagcatgtggagtggaggagatgctgcccctgtggttggaacatcctggggtgacccccgacccagcctcgctgggctgtcccctgtccctatctctcactctggacccagggctgacatcctaataaaataactgttggattagaaactccaaaaaaaatggaatgtgg

SEQ ID NO: 68796 - DNA, 2305 bp, Homo sapiens
cacaaaaaagtttttaaattttttggtacagaaggggtttccctatgatccccaggctggtctccaattcctggcctcaagcggtcctcccggctcggactcccaaagagctgggatcacagacgtgaaccacgcgcccggccacattccccaattaatggtttttggagagtggccggtttggaacgggctagcggagtcgttcgttagttaggtccctgcagtgtagatggaggacggaaacggcgctgtgacataagcgggaggaggcgggctgaggcagcgctgtgacgtagcagatgaaagccgggcccgcgctgcactgaggtacttctctgagtgacaagcgggacaagtacgccgtgggcggggccggcgggtcgtgatgttagttcgcgctgtgtggaggcgggccggcgtggcgctgtgacgcagcgggagaagacgggctgggagggcgctgtgctgaacgcccctgcggtcgcgacaggccagcgcaggtggaggcggggctagcgaggcactgaggtaagtacttccctaaggggcggggaagaacgagtgagacatgggcggggcagtcgcctcatgacgtcagtctcgcgcgcgggcggaggtgggccggtgcggcgctgtcacgtaggttcagtgggcggaagaggtggccccggatgctgcggcgcccgctggccgggctggctgcggccgccctgggccgggccccaccggacggcttgctctgctctttacctggggttgctgtcgaggaccctgtgcaagactcggccggtttttctttctccctgatggacagacccaaacatagccgcgcagcatcgtgaagggctggggccttcactcctctgtggctctggaagagcccgatttcctcaggaggtaaaggaatgttcctgtcccccccggggaaagaaagtgaaaatgaaagcgccctggctgctcctggtgtggtcccatttaaaacgaggttgctgaaggccaggatgcgtgctacccggatgtgtgcccagaaaccctgcagccaagagcagccgcctggaccaccagcctccccttcatccacctggcccagcccagagcccaggcccacgtctggtggtttgtgtcttacgagaggccaggcgggggctgaattctctcggttctcagaaggtcaagccctctgttagcatctcctcgaacagtgggccgggggcaaggtggtgactctgttcagtccttaggatggctggaagccagaaggaggagattatgccgccacagcagggagtgcctttccaggaaagcggctgctggggcagcatgggagcccagtccagggagcgttctggcagagaccattccggaacatggatctgcgccggcggctcccaggagaccttccatctcggagctcctgtggagaccacgtgcctggcaggcatgtcgggccccaggcctgtggtgctgagcgggccttcgggagctgggaagagcaccctgctgaagaggctgctccaggagcacagcggcatctttggcttcagcgtgtcccataccacgaggaacccgaggcccggcgaggagaacggcaaagattactactttgtaaccagggaggtgatgcagcgtgacatagcagccggcgacttcatcgagcatgccgagttctcggggaacctgtatggcacgagcaaggtggcggtgcaggccgtgcaggccatgaaccgcatctgtgtgctggacgtggacctgcagggtgtgcggaacatcaaggccaccgatctgcggcccatctacatctctgtgcagccgccttcactgcacgtgctggagcagcggctgcggcagcgcaacactgaaaccgaggagagcctggtgaagcggctggctgctgcccaggccgacatggagagcagcaaggagcccggcctgtttgatgtggtcatcattaacgacagcctggaccaggcctacgcagagctgaaggaggcgctctctgaggaaatcaagaaagctcaaaggaccggcgcctgaggcttgctgtctgttctcggcaccccgggcccatacaggaccagggcagcagcattgagccacccccttggcaggcgatacggcagctctgtgcccttggccagcatgtggagtggaggagatgctgcccctgtggttggaacatcctggggtgacccccgacccagcctcgctgggctgtcccctgtccctatctctcactctggacccagggctgacatcctaataaaataactgttggattagaaactccaaaaaaaatggaatgtgg

SEQ ID NO: 68797 - DNA, 2162 bp, Homo sapiens
  misc_feature (443)..(443): n is a, c, g, or t
agcgggtaggctcctgcgccttcccagtggtgtgcttcactggctgcctgcatcctggggctcaagtgctgtcgggactgcaagggaaacgctgggtggggcattgggctccgagcagcccccgatgggtgacaggtctctctgctagataccacgaggaacccgaggcccggcgaggagaacggcaaagggaggtgatgcagcgtgacatagcagccggcgacttcatcgagcatgccgagttctcggggaacctgtatggcacgagcaaggtggcggtgcaggccgtgcaggccatgaaccgcatctgtgtgctggacgtggacctgcagggtgtgcggaacatcaaggccaccgatctgcggcccatctacatctctgtgcagccgccttcactgcacgtgctggagcagcggctgcggcagcgcaacactgaaaccgangagagcctggtgaagcggctggctgctgcccaggccgacatggagagcagcaaggagcccggcctgtttgatgtggtcatcattaacgacagcctggaccaggcctacgcagagctgaaggaggcgctctctgaggaaatcaagaaagctcaaaggaccggcgcctggggttgctgtcgaggaccctgtgcaagactcggccggtttttctttctccctgatggacagacccaaacatagccgcgcagcatcgtgaagggctggggccttcactcctctgtggctctggaagagcccgatttcctcaggaggtaaaggaatgttcctgtcccccccggggaaagaaagtgaaaatgaaagcgccctggctgctcctggtgtggtcccatttaaaacgaggttgctgaaggccaggatgcgtgctacccggatgtgtgcccagaaaccctgcagccaagagcagccgcctggaccaccagcctccccttcatccacctggcccagcccagagcccaggcccacgtctggtggtttgtgtcttacgagaggccaggcgggggctgaattctctcggttctcagaaggtcaagccctctgttagcatctcctcgaacagtgggccgggggcaaggtggtgactctgttcagtccttaggatggctggaagccagaaggaggagattatgccgccacagcagggagtgcctttccaggaaagcggctgctggggcagcatgggagcccagtccagggagcgttctggcagagaccattccggaacatggatctgcgccggcggctcccaggagaccttccatctcggagctcctgtggagaccacgtgcctggcaggcatgtcgggccccaggcctgtggtgctgagcgggccttcgggagctgggaagagcaccctgctgaagaggctgctccaggagcacagcggcatctttggcttcagcgtgtcccataccacgaggaacccgaggcccggcgaggagaacggcaaagattactactttgtaaccagggaggtgatgcagcgtgacatagcagccggcgacttcatcgagcatgccgagttctcggggaacctgtatggcacgagcaaggtggcggtgcaggccgtgcaggccatgaaccgcatctgtgtgctggacgtggacctgcagggtgtgcggaacatcaaggccaccgatctgcggcccatctacatctctgtgcagccgccttcactgcacgtgctggagcagcggctgcggcagcgcaacactgaaaccgaggagagcctggtgaagcggctggctgctgcccaggccgacatggagagcagcaaggagcccggcctgtttgatgtggtcatcattaacgacagcctggaccaggcctacgcagagctgaaggaggcgctctctgaggaaatcaagaaagctcaaaggaccggcgcctgaggcttgctgtctgttctcggcaccccgggcccatacaggaccagggcagcagcattgagccacccccttggcaggcgatacggcagctctgtgcccttggccagcatgtggagtggaggagatgctgcccctgtggttggaacatcctggggtgacccccgacccagcctcgctgggctgtcccctgtccctatctctcactctggacccagggctgacatcctaataaaataactgttggattagaaactccaaaaaaaatggaatgtgg

SEQ ID NO: 68798 - DNA, 1212 bp, Homo sapiens
aaggagaaaatagaaaaattgtaaaaaaaaaggctggtaaggtccggaattcccgggatcccaaacatagccgcgcagcatcgtgaagggctggggccttcactcctctgtggctctggaagagcccgatttcctcaggagtccttaggatggctggaagccagaaggaggagattatgccgccacagcagggagtgcctttccaggaaagcggctgctggggcagcatgggagcccagtccagggagcgttctggcagagaccattccggaacatggatctgcgccggcggctcccaggagaccttccatctcggagctcctgtggagaccacgtgcctggcaggcatgtcgggccccaggcctgtggtgctgagcgggccttcgggagctgggaagagcaccctgctgaagaggctgctccaggagcacagcggcatctttggcttcagcgtgtcccataccacgaggaacccgaggcccggcgaggagaacggcaaagattactactttgtaaccagggaggtgatgcagcgtgacatagcagccggcgacttcatcgagcatgccgagttctcggggaacctgtatggcacgagcaaggtggcggtgcaggccgtgcaggccatgaaccgcatctgtgtgctggacgtggacctgcagggtgtgcggaacatcaaggccaccgatctgcggcccatctacatctctgtgcagccgccttcactgcacgtgctggagcagcggctgcggcagcgcaacactgaaaccgaggagagcctggtgaagcggctggctgctgcccaggccgacatggagagcagcaaggagcccggcctgtttgatgtggtcatcattaacgacagcctggaccaggcctacgcagagctgaaggaggcgctctctgaggaaatcaagaaagctcaaaggaccggcgcctgaggcttgctgtctgttctcggcaccccgggcccatacaggaccagggcagcagcattgagccacccccttggcaggcgatacggcagctctgtgcccttggccagcatgtggagtggaggagatgctgcccctgtggttggaacatcctggggtgacccccgacccagcctcgctgggctgtcccctgtccctatctctcactctggacccagggctgacatcctaataaaataactgttggattagaaactccaaaaaaaatggaatgtgg

SEQ ID NO: 68799 - DNA, 1621 bp, Homo sapiens
  misc_feature (443)..(443): n is a, c, g, or t
agcgggtaggctcctgcgccttcccagtggtgtgcttcactggctgcctgcatcctggggctcaagtgctgtcgggactgcaagggaaacgctgggtggggcattgggctccgagcagcccccgatgggtgacaggtctctctgctagataccacgaggaacccgaggcccggcgaggagaacggcaaagggaggtgatgcagcgtgacatagcagccggcgacttcatcgagcatgccgagttctcggggaacctgtatggcacgagcaaggtggcggtgcaggccgtgcaggccatgaaccgcatctgtgtgctggacgtggacctgcagggtgtgcggaacatcaaggccaccgatctgcggcccatctacatctctgtgcagccgccttcactgcacgtgctggagcagcggctgcggcagcgcaacactgaaaccgangagagcctggtgaagcggctggctgctgcccaggccgacatggagagcagcaaggagcccggcctgtttgatgtggtcatcattaacgacagcctggaccaggcctacgcagagctgaaggaggcgctctctgaggaaatcaagaaagctcaaaggaccggcgcctggggttgctgtcgaggaccctgtgcaagactcggccggtttttctttctccctgatggacagacccaaacatagccgcgcagcatcgtgaagggctggggccttcactcctctgtggctctggaagagcccgatttcctcaggaggcatgtcgggccccaggcctgtggtgctgagcgggccttcgggagctgggaagagcaccctgctgaagaggctgctccaggagcacagcggcatctttggcttcagcgtgtcccataccacgaggaacccgaggcccggcgaggagaacggcaaagattactactttgtaaccagggaggtgatgcagcgtgacatagcagccggcgacttcatcgagcatgccgagttctcggggaacctgtatggcacgagcaaggtggcggtgcaggccgtgcaggccatgaaccgcatctgtgtgctggacgtggacctgcagggtgtgcggaacatcaaggccaccgatctgcggcccatctacatctctgtgcagccgccttcactgcacgtgctggagcagcggctgcggcagcgcaacactgaaaccgaggagagcctggtgaagcggctggctgctgcccaggccgacatggagagcagcaaggagcccggcctgtttgatgtggtcatcattaacgacagcctggaccaggcctacgcagagctgaaggaggcgctctctgaggaaatcaagaaagctcaaaggaccggcgcctgaggcttgctgtctgttctcggcaccccgggcccatacaggaccagggcagcagcattgagccacccccttggcaggcgatacggcagctctgtgcccttggccagcatgtggagtggaggagatgctgcccctgtggttggaacatcctggggtgacccccgacccagcctcgctgggctgtcccctgtccctatctctcactctggacccagggctgacatcctaataaaataactgttggattagaaactccaaaaaaaatggaatgtgg

SEQ ID NO: 68800 - DNA, 1920 bp, Homo sapiens
atggttggctggcacgtagaggaggtggcagggctgggtgagcagcaggagccaggttagtggggaggcccgagctaagcgcaggggcaaattctgcgggtgggagagccaggagggcatggggtgcatggtgagatgaaaacgatgtgtgcttgtgacaaaaagcccagaagaggcagtaaggagggaggagtctatcccttatggagagcacatggacttctgggtgggtgtcctgcagttcccttcctcttgagtctttttaactgggggtccggtgtgtttgtgatcaatgacatgtatgcgtgtgcatgtgtacctttgcaggtacacatgtgtggtgtgtgtgcatttgcttggtgtgcgtgcatttgtgtgtgtgttttgtgtgtgcatgcatgtgtgtgtgtttgtggtaggtttgtgcacacatcctgcatacctttgtgcctgggagtggcatgtgtgtggtgggtgtcgctgtgcatgatggagttgcagccgtggtgcatttgtgagattacctcggtggcctaaattggggattaggagggcatcctcaggtccttcccactgtctgctcgtctgcccacaggcggctgtgccctaaacaggaggaggccattcacgcctcgcctgagttgtgtccaaggtgtgcgtgtggccaggggtccatccgcttccctctagcccagcccctgaacacagctgcagtgcacggccccactcctcagctctgctccccatcccaactcgaagacgctgccctggccctgtgtgtgcagctcatgtggactgggagggcagggcaggtgcaggtcttggggcaagagctggagctgtcttttccttcctgcacagccgcagagcaggtggatggggctgcttccctgcaagggcccagggccaggccccctggggatttattcgtggcttagaagggtggggccagaagcaggcgtagtggggattagggactcagcacccccagctctcagtccagcagacagacccaccccaggctgactacagaggctgcacctcagcaaacaggcatgtcgggccccaggcctgtggtgctgagcgggccttcgggagctgggaagagcaccctgctgaagaggctgctccaggagcacagcggcatctttggcttcagcgtgtcccataccacgaggaacccgaggcccggcgaggagaacggcaaagattactactttgtaaccagggaggtgatgcagcgtgacatagcagccggcgacttcatcgagcatgccgagttctcggggaacctgtatggcacgagcaaggtggcggtgcaggccgtgcaggccatgaaccgcatctgtgtgctggacgtggacctgcagggtgtgcggaacatcaaggccaccgatctgcggcccatctacatctctgtgcagccgccttcactgcacgtgctggagcagcggctgcggcagcgcaacactgaaaccgaggagagcctggtgaagcggctggctgctgcccaggccgacatggagagcagcaaggagcccggcctgtttgatgtggtcatcattaacgacagcctggaccaggcctacgcagagctgaaggaggcgctctctgaggaaatcaagaaagctcaaaggaccggcgcctgaggcttgctgtctgttctcggcaccccgggcccatacaggaccagggcagcagcattgagccacccccttggcaggcgatacggcagctctgtgcccttggccagcatgtggagtggaggagatgctgcccctgtggttggaacatcctggggtgacccccgacccagcctcgctgggctgtcccctgtccctatctctcactctggacccagggctgacatcctaataaaataactgttggattagaaactccaaaaaaaatggaatgtgg

SEQ ID NO: 68801 - DNA, 2678 bp, Homo sapiens
atggttggctggcacgtagaggaggtggcagggctgggtgagcagcaggagccaggttagtggggaggcccgagctaagcgcaggggcaaattctgcgggtgggagagccaggagggcatggggtgcatggtgagatgaaaacgatgtgtgcttgtgacaaaaagcccagaagaggcagtaaggagggaggagtctatcccttatggagagcacatggacttctgggtgggtgtcctgcagttcccttcctcttgagtctttttaactgggggtccggtgtgtttgtgatcaatgacatgtatgcgtgtgcatgtgtacctttgcaggtacacatgtgtggtgtgtgtgcatttgcttggtgtgcgtgcatttgtgtgtgtgttttgtgtgtgcatgcatgtgtgtgtgtttgtggtaggtttgtgcacacatcctgcatacctttgtgcctgggagtggcatgtgtgtggtgggtgtcgctgtgcatgatggagttgcagccgtggtgcatttgtgagattacctcggtggcctaaattggggattaggagggcatcctcaggtccttcccactgtctgctcgtctgcccacaggcggctgtgccctaaacaggaggaggccattcacgcctcgcctgagttgtgtccaaggtgtgcgtgtggccaggggtccatccgcttccctctagcccagcccctgaacacagctgcagtgcacggccccactcctcagctctgctccccatcccaactcgaagacgctgccctggccctgtgtgtgcagctcatgtggactgggagggcagggcaggtgcaggtcttggggcaagagctggagctgtcttttccttcctgcacagccgcagagcaggtggatggggctgcttccctgcaagggcccagggccaggccccctggggatttattcgtggcttagaagggtggggccagaagcaggcgtagtggggattagggactcagcacccccagctctcagtccagcagacagacccaccccaggctgactacagaggctgcacctcagcaaacaggtaggccctgttcttggggaggattcccaccaggcaaaggccagctcccgggccctcacctgccacgtgtccaagctaggatcctgtttgcctttcccttgggggctgggagggaggcctccaaccccctctggcattaccagcatcacagataggagtcccaagtcctatgagaagttcctggaataggtgtagattcagtagatctttacaagaccatatctgcagggcaaggtaccagaggacagaggcggggacagggacacttccattccagacctagcagcccagcactcagcaccatgcatgggagcaaatggctggactcctgggtggggtgggggtctcagagcaggctcccagagggcttggaggtgactccaccaggtggggacggcagctcccaggtagggtgtcatcagagtagacagcattgcttgctagggacccctggggaggctgacagggtcagtgggtttcagttggggggctcccctgctgagaacccagtaaagccggccttccattcgtctcccgtgtgcccagagcctggtctgagggccgccctgtgcatgccggcccttccaacgtggcagagctcagggggaagaacacccaggctctcaggagactctcaggccaatgtctccatccctgggtcagccctttcctgccatgaattcaggaaggcagaggcagctcagcagatggggactagaggccgcactgctatccacagcctctcttctcacccccaggcatgtcgggccccaggcctgtggtgctgagcgggccttcgggagctgggaagagcaccctgctgaagaggctgctccaggagcacagcggcatctttggcttcagcgtgtcccataccacgaggaacccgaggcccggcgaggagaacggcaaagattactactttgtaaccagggaggtgatgcagcgtgacatagcagccggcgacttcatcgagcatgccgagttctcggggaacctgtatggcacgagcaaggtggcggtgcaggccgtgcaggccatgaaccgcatctgtgtgctggacgtggacctgcagggtgtgcggaacatcaaggccaccgatctgcggcccatctacatctctgtgcagccgccttcactgcacgtgctggagcagcggctgcggcagcgcaacactgaaaccgaggagagcctggtgaagcggctggctgctgcccaggccgacatggagagcagcaaggagcccggcctgtttgatgtggtcatcattaacgacagcctggaccaggcctacgcagagctgaaggaggcgctctctgaggaaatcaagaaagctcaaaggaccggcgcctgaggcttgctgtctgttctcggcaccccgggcccatacaggaccagggcagcagcattgagccacccccttggcaggcgatacggcagctctgtgcccttggccagcatgtggagtggaggagatgctgcccctgtggttggaacatcctggggtgacccccgacccagcctcgctgggctgtcccctgtccctatctctcactctggacccagggctgacatcctaataaaataactgttggattagaaactccaaaaaaaatggaatgtgg

SEQ ID NO: 68802 - DNA, 1395 bp, Homo sapiens
cacaaaaaagtttttaaattttttggtacagaaggggtttccctatgatccccaggctggtctccaattcctggcctcaagcggtcctcccggctcggactcccaaagagctgggatcacagacgtgaaccacgcgcccggccacattccccaattaatggtttttggagagtggccggtttggaacgggctagcggagtcgttcgttagttaggtccctgcagtgtagatggaggacggaaacggcgctgtgacataagcgggaggaggcgggctgaggcagcgctgtgacgtagcagatgaaagccgggcccgcgctgcactgaggtacttctctgagtgacaagcgggacaagtacgccgtgggcggggccggcgggtcgtgatgttagttcgcgctgtgtggaggcgggccggcgtggcgctgtgacgcagcgggagaagacgggctgggagggcgctgtgctgaacgcccctgcggtcgcgacaggccagcgcaggtggaggcggggctagcgaggcactgaggcatgtcgggccccaggcctgtggtgctgagcgggccttcgggagctgggaagagcaccctgctgaagaggctgctccaggagcacagcggcatctttggcttcagcgtgtcccataccacgaggaacccgaggcccggcgaggagaacggcaaagattactactttgtaaccagggaggtgatgcagcgtgacatagcagccggcgacttcatcgagcatgccgagttctcggggaacctgtatggcacgagcaaggtggcggtgcaggccgtgcaggccatgaaccgcatctgtgtgctggacgtggacctgcagggtgtgcggaacatcaaggccaccgatctgcggcccatctacatctctgtgcagccgccttcactgcacgtgctggagcagcggctgcggcagcgcaacactgaaaccgaggagagcctggtgaagcggctggctgctgcccaggccgacatggagagcagcaaggagcccggcctgtttgatgtggtcatcattaacgacagcctggaccaggcctacgcagagctgaaggaggcgctctctgaggaaatcaagaaagctcaaaggaccggcgcctgaggcttgctgtctgttctcggcaccccgggcccatacaggaccagggcagcagcattgagccacccccttggcaggcgatacggcagctctgtgcccttggccagcatgtggagtggaggagatgctgcccctgtggttggaacatcctggggtgacccccgacccagcctcgctgggctgtcccctgtccctatctctcactctggacccagggctgacatcctaataaaataactgttggattagaaactccaaaaaaaatggaatgtgg

SEQ ID NO: 68803 - DNA, 1618 bp, Homo sapiens
cacaaaaaagtttttaaattttttggtacagaaggggtttccctatgatccccaggctggtctccaattcctggcctcaagcggtcctcccggctcggactcccaaagagctgggatcacagacgtgaaccacgcgcccggccacattccccaattaatggtttttggagagtggccggtttggaacgggctagcggagtcgttcgttagttaggtccctgcagtgtagatggaggacggaaacggcgctgtgacataagcgggaggaggcgggctgaggcagcgctgtgacgtagcagatgaaagccgggcccgcgctgcactgaggtacttctctgagtgacaagcgggacaagtacgccgtgggcggggccggcgggtcgtgatgttagttcgcgctgtgtggaggcgggccggcgtggcgctgtgacgcagcgggagaagacgggctgggagggcgctgtgctgaacgcccctgcggtcgcgacaggccagcgcaggtggaggcggggctagcgaggcactgaggtaagtacttccctaaggggcggggaagaacgagtgagacatgggcggggcagtcgcctcatgacgtcagtctcgcgcgcgggcggaggtgggccggtgcggcgctgtcacgtaggttcagtgggcggaagaggtggccccggatgctgcggcgcccgctggccgggctggctgcggccgccctgggccgggccccaccggacgcctctcttctcacccccaggcatgtcgggccccaggcctgtggtgctgagcgggccttcgggagctgggaagagcaccctgctgaagaggctgctccaggagcacagcggcatctttggcttcagcgtgtcccataccacgaggaacccgaggcccggcgaggagaacggcaaagattactactttgtaaccagggaggtgatgcagcgtgacatagcagccggcgacttcatcgagcatgccgagttctcggggaacctgtatggcacgagcaaggtggcggtgcaggccgtgcaggccatgaaccgcatctgtgtgctggacgtggacctgcagggtgtgcggaacatcaaggccaccgatctgcggcccatctacatctctgtgcagccgccttcactgcacgtgctggagcagcggctgcggcagcgcaacactgaaaccgaggagagcctggtgaagcggctggctgctgcccaggccgacatggagagcagcaaggagcccggcctgtttgatgtggtcatcattaacgacagcctggaccaggcctacgcagagctgaaggaggcgctctctgaggaaatcaagaaagctcaaaggaccggcgcctgaggcttgctgtctgttctcggcaccccgggcccatacaggaccagggcagcagcattgagccacccccttggcaggcgatacggcagctctgtgcccttggccagcatgtggagtggaggagatgctgcccctgtggttggaacatcctggggtgacccccgacccagcctcgctgggctgtcccctgtccctatctctcactctggacccagggctgacatcctaataaaataactgttggattagaaactccaaaaaaaatggaatgtgg

SEQ ID NO: 68804 - DNA, 1275 bp, Homo sapiens
ggtttcacactcctgctgtcctgcgtgctgtgtctcccttccctgggtctgttgagtactgattactgggccacagtgtttctttctgggagaaccctcgccttggaggctgacagggtcagtgggtttcagttggggggctcccctgctgagaacccagtaaagccggccttccattcgtctcccgtgtgcccagagcctggtctgagggccgccctgtgcatgccggcccttccaacgtggcagagctcagggggaagaacacccaggctctcaggagactctcaggccaatgtctccatccctgggtcagccctttcctgccatgaattcaggaaggcagaggcagctcagcagatggggactagaggccgcactgctatccacagcctctcttctcacccccaggcatgtcgggccccaggcctgtggtgctgagcgggccttcgggagctgggaagagcaccctgctgaagaggctgctccaggagcacagcggcatctttggcttcagcgtgtcccataccacgaggaacccgaggcccggcgaggagaacggcaaagattactactttgtaaccagggaggtgatgcagcgtgacatagcagccggcgacttcatcgagcatgccgagttctcggggaacctgtatggcacgagcaaggtggcggtgcaggccgtgcaggccatgaaccgcatctgtgtgctggacgtggacctgcagggtgtgcggaacatcaaggccaccgatctgcggcccatctacatctctgtgcagccgccttcactgcacgtgctggagcagcggctgcggcagcgcaacactgaaaccgaggagagcctggtgaagcggctggctgctgcccaggccgacatggagagcagcaaggagcccggcctgtttgatgtggtcatcattaacgacagcctggaccaggcctacgcagagctgaaggaggcgctctctgaggaaatcaagaaagctcaaaggaccggcgcctgaggcttgctgtctgttctcggcaccccgggcccatacaggaccagggcagcagcattgagccacccccttggcaggcgatacggcagctctgtgcccttggccagcatgtggagtggaggagatgctgcccctgtggttggaacatcctggggtgacccccgacccagcctcgctgggctgtcccctgtccctatctctcactctggacccagggctgacatcctaataaaataactgttggattagaaactccaaaaaaaatggaatgtgg

SEQ ID NO: 68805 - DNA, 1539 bp, Homo sapiens
cacaaaaaagtttttaaattttttggtacagaaggggtttccctatgatccccaggctggtctccaattcctggcctcaagcggtcctcccggctcggactcccaaagagctgggatcacagacgtgaaccacgcgcccggccacattccccaattaatggtttttggagagtggccggtttggaacgggctagcggagtcgttcgttagttaggtccctgcagtgtagatggaggacggaaacggcgctgtgacataagcgggaggaggcgggctgaggcagcgctgtgacgtagcagatgaaagccgggcccgcgctgcactgaggtacttctctgagtgacaagcgggacaagtacgccgtgggcggggccggcgggtcgtgatgttagttcgcgctgtgtggaggcgggccggcgtggcgctgtgacgcagcgggagaagacgggctgggagggcgctgtgctgaacgcccctgcggtcgcgacaggccagcgcaggtggaggcggggctagcgaggcactgaggtaagtacttccctaaggggcggggaagaacgagtgagacatgggcggggcagtcgcctcatgacgtcagtctcgcgcgcgggcggaggtgggccggtgcggcgctgtcacgtaggttcagtgggcggaagaggtggccccggatgctgcggcgcccgctggccgggctggctgcggccgccctgggccgggccccaccggacggcatgtcgggccccaggcctgtggtgctgagcgggccttcgggagctgggaagagcaccctgctgaagaggctgctccaggagcacagcggcatctttggcttcagcgtgtcccataccacgaggaacccgaggcccggcgaggagaacggcaaagattactactttgtaaccagggaggtgatgcagcgtgacatagcagccggcgacttcatcgagcatgccgagttctcggggaacctgtatggcacgagcaaggtggcggtgcaggccgtgcaggccatgaaccgcatctgtgtgctggacgtggacctgcagggtgtgcggaacatcaaggccaccgatctgcggcccatctacatctctgtgcagccgccttcactgcacgtgctggagcagcggctgcggcagcgcaacactgaaaccgaggagagcctggtgaagcggctggctgctgcccaggccgacatggagagcagcaaggagcccggcctgtttgatgtggtcatcattaacgacagcctggaccaggcctacgcagagctgaaggaggcgctctctgaggaaatcaagaaagctcaaaggaccggcgcctgaggcttgctgtctgttctcggcaccccgggcccatacaggaccagggcagcagcattgagccacccccttggcaggcgatacggcagctctgtgcccttggccagcatgtggagtggaggagatgctgcccctgtggttggaacatcctggggtgacccccgacccagcctcgctgggctgtccccgcccgcgaccggtaccgattcgattt

SEQ ID NO: 68806 - DNA, 3090 bp, Homo sapiens
cacaaaaaagtttttaaattttttggtacagaaggggtttccctatgatccccaggctggtctccaattcctggcctcaagcggtcctcccggctcggactcccaaagagctgggatcacagacgtgaaccacgcgcccggccacattccccaattaatggtttttggagagtggccggtttggaacgggctagcggagtcgttcgttagttaggtccctgcagtgtagatggaggacggaaacggcgctgtgacataagcgggaggaggcgggctgaggcagcgctgtgacgtagcagatgaaagccgggcccgcgctgcactgaggtacttctctgagtgacaagcgggacaagtacgccgtgggcggggccggcgggtcgtgatgttagttcgcgctgtgtggaggcgggccggcgtggcgctgtgacgcagcgggagaagacgggctgggagggcgctgtgctgaacgcccctgcggtcgcgacaggccagcgcaggtggaggcggggctagcgaggcactgaggtaagtacttccctaaggggcggggaagaacgagtgagacatgggcggggcagtcgcctcatgacgtcagtctcgcgcgcgggcggaggtgggccggtgcggcgctgtcacgtaggttcagtgggcggaagaggtggccccggatgctgcggcgcccgctggccgggctggctgcggccgccctgggccgggccccaccggacggtgagtacgacaagcgcgatcgcgagggtgactcgggtcgaggcggcagcggtccctgcgctttgcggtcgcccagtccacgccgcctccggatctcctcctagccgagacgccctgtgccgcattcaactgtgggccctgagaacgggggagctctggagggcggacgggctggcaacgcagcggagcccgggtcccggagggcggggcgctcctcaggagctgggcaggccggcagttatcgcagtgtcgagctgctccccgggcgtataggagcgctcggtgtcttcccgacacctgggcgcgccgccaaagagagcagctgggagtccctaccgctggcccggcgcggtgtgcgctccggttcccacctcaccctgcaagccttggggtcctgggcggatggagccggctattccggggctcccaggattctgcctactccgcggcacggcgcagagacggggacttggggaaacagcaggccttcccgacgcatgggtgtggcatttggggttcggattctccaaagccagagtccgggttggggttcttgaagctgccctgctgccattcttgagcgtcgccttagaagtatgccccagtaaggactggtgtgggaagcaggtgcctcaaagttgattttgaccctgcgtgtggtgggcctcggtttcgtctttgcatgaaagaggtcggtcctgaggccccgggctgggtcctgctctgctgtctttgggctcatggccccttcctgtctcaggcttgctctgctctttacctggggttgctgtcgaggaccctgtgcaagactcggccggtttttctttctccctgatggacagacccaaacatagccgcgcagcatcgtgaagggctggggccttcactcctctgtggctctggaagagcccgatttcctcaggaggtaaaggaatgttcctgtcccccccggggaaagaaagtgaaaatgaaagcgccctggctgctcctggtgtggtcccatttaaaacgaggttgctgaaggccaggatgcgtgctacccggatgtgtgcccagaaaccctgcagccaagagcagccgcctggaccaccagcctccccttcatccacctggcccagcccagagcccaggcccacgtctggtggtttgtgtcttacgagaggccaggcgggggctgaattctctcggttctcagaaggtcaagccctctgttagcatctcctcgaacagtgggccgggggcaaggtggtgactctgttcagtccttaggatggctggaagccagaaggaggagattatgccgccacagcagggagtgcctttccaggaaagcggctgctggggcagcatgggagcccagtccagggagcgttctggcagagaccattccggaacatggatctgcgccggcggctcccaggagaccttccatctcggagctcctgtggagaccacgtgcctggcaggcatgtcgggccccaggcctgtggtgctgagcgggccttcgggagctgggaagagcaccctgctgaagaggctgctccaggagcacagcggcatctttggcttcagcgtgtcccgtgagtccagggctctcgtggagggataccacgaggaacccgaggcccggcgaggagaacggcaaagattactactttgtaaccagggaggtgatgcagcgtgacatagcagccggcgacttcatcgagcatgccgagttctcggggaacctgtatggcacgagcaaggtggcggtgcaggccgtgcaggccatgaaccgcatctgtgtgctggacgtggacctgcagggtgtgcggaacatcaaggccaccgatctgcggcccatctacatctctgtgcagccgccttcactgcacgtgctggagcagcggctgcggcagcgcaacactgaaaccgaggagagcctggtgaagcggctggctgctgcccaggccgacatggagagcagcaaggagcccggcctgtttgatgtggtcatcattaacgacagcctggaccaggcctacgcagagctgaaggaggcgctctctgaggaaatcaagaaagctcaaaggaccggcgcctgaggcttgctgtctgttctcggcaccccgggcccatacaggaccagggcagcagcattgagccacccccttggcaggcgatacggcagctctgtgcccttggccagcatgtggagtggaggagatgctgcccctgtggttggaacatcctggggtgacccccgacccagcctcgctgggctgtcccctgtccctatctctcactctggacccagggctgacatcctaataaaataactgttggattagaaactccaaaaaaaatggaatgtgg

SEQ ID NO: 68807 - DNA, 2549 bp, Homo sapiens
cacaaaaaagtttttaaattttttggtacagaaggggtttccctatgatccccaggctggtctccaattcctggcctcaagcggtcctcccggctcggactcccaaagagctgggatcacagacgtgaaccacgcgcccggccacattccccaattaatggtttttggagagtggccggtttggaacgggctagcggagtcgttcgttagttaggtccctgcagtgtagatggaggacggaaacggcgctgtgacataagcgggaggaggcgggctgaggcagcgctgtgacgtagcagatgaaagccgggcccgcgctgcactgaggtacttctctgagtgacaagcgggacaagtacgccgtgggcggggccggcgggtcgtgatgttagttcgcgctgtgtggaggcgggccggcgtggcgctgtgacgcagcgggagaagacgggctgggagggcgctgtgctgaacgcccctgcggtcgcgacaggccagcgcaggtggaggcggggctagcgaggcactgaggtaagtacttccctaaggggcggggaagaacgagtgagacatgggcggggcagtcgcctcatgacgtcagtctcgcgcgcgggcggaggtgggccggtgcggcgctgtcacgtaggttcagtgggcggaagaggtggccccggatgctgcggcgcccgctggccgggctggctgcggccgccctgggccgggccccaccggacggtgagtacgacaagcgcgatcgcgagggtgactcgggtcgaggcggcagcggtccctgcgctttgcggtcgcccagtccacgccgcctccggatctcctcctagccgagacgccctgtgccgcattcaactgtgggccctgagaacgggggagctctggagggcggacgggctggcaacgcagcggagcccgggtcccggagggcggggcgctcctcaggagctgggcaggccggcagttatcgcagtgtcgagctgctccccgggcgtataggagcgctcggtgtcttcccgacacctgggcgcgccgccaaagagagcagctgggagtccctaccgctggcccggcgcggtgtgcgctccggttcccacctcaccctgcaagccttggggtcctgggcggatggagccggctattccggggctcccaggattctgcctactccgcggcacggcgcagagacggggacttggggaaacagcaggccttcccgacgcatgggtgtggcatttggggttcggattctccaaagccagagtccgggttggggttcttgaagctgccctgctgccattcttgagcgtcgccttagaagtatgccccagtaaggactggtgtgggaagcaggtgcctcaaagttgattttgaccctgcgtgtggtgggcctcggtttcgtctttgcatgaaagaggtcggtcctgaggccccgggctgggtcctgctctgctgtctttgggctcatggccccttcctgtctcaggcttgctctgctctttacctggggttgctgtcgaggaccctgtgcaagactcggccggtttttctttctccctgatggacagacccaaacatagccgcgcagcatcgtgaagggctggggccttcactcctctgtggctctggaagagcccgatttcctcaggaggcatgtcgggccccaggcctgtggtgctgagcgggccttcgggagctgggaagagcaccctgctgaagaggctgctccaggagcacagcggcatctttggcttcagcgtgtcccgtgagtccagggctctcgtggagggataccacgaggaacccgaggcccggcgaggagaacggcaaagattactactttgtaaccagggaggtgatgcagcgtgacatagcagccggcgacttcatcgagcatgccgagttctcggggaacctgtatggcacgagcaaggtggcggtgcaggccgtgcaggccatgaaccgcatctgtgtgctggacgtggacctgcagggtgtgcggaacatcaaggccaccgatctgcggcccatctacatctctgtgcagccgccttcactgcacgtgctggagcagcggctgcggcagcgcaacactgaaaccgaggagagcctggtgaagcggctggctgctgcccaggccgacatggagagcagcaaggagcccggcctgtttgatgtggtcatcattaacgacagcctggaccaggcctacgcagagctgaaggaggcgctctctgaggaaatcaagaaagctcaaaggaccggcgcctgaggcttgctgtctgttctcggcaccccgggcccatacaggaccagggcagcagcattgagccacccccttggcaggcgatacggcagctctgtgcccttggccagcatgtggagtggaggagatgctgcccctgtggttggaacatcctggggtgacccccgacccagcctcgctgggctgtcccctgtccctatctctcactctggacccagggctgacatcctaataaaataactgttggattagaaactccaaaaaaaatggaatgtgg

SEQ ID NO: 68808 - DNA, 3466 bp, Homo sapiens
cacaaaaaagtttttaaattttttggtacagaaggggtttccctatgatccccaggctggtctccaattcctggcctcaagcggtcctcccggctcggactcccaaagagctgggatcacagacgtgaaccacgcgcccggccacattccccaattaatggtttttggagagtggccggtttggaacgggctagcggagtcgttcgttagttaggtccctgcagtgtagatggaggacggaaacggcgctgtgacataagcgggaggaggcgggctgaggcagcgctgtgacgtagcagatgaaagccgggcccgcgctgcactgaggtacttctctgagtgacaagcgggacaagtacgccgtgggcggggccggcgggtcgtgatgttagttcgcgctgtgtggaggcgggccggcgtggcgctgtgacgcagcgggagaagacgggctgggagggcgctgtgctgaacgcccctgcggtcgcgacaggccagcgcaggtggaggcggggctagcgaggcactgaggtaagtacttccctaaggggcggggaagaacgagtgagacatgggcggggcagtcgcctcatgacgtcagtctcgcgcgcgggcggaggtgggccggtgcggcgctgtcacgtaggttcagtgggcggaagaggtggccccggatgctgcggcgcccgctggccgggctggctgcggccgccctgggccgggccccaccggacggtgagtacgacaagcgcgatcgcgagggtgactcgggtcgaggcggcagcggtccctgcgctttgcggtcgcccagtccacgccgcctccggatctcctcctagccgagacgccctgtgccgcattcaactgtgggccctgagaacgggggagctctggagggcggacgggctggcaacgcagcggagcccgggtcccggagggcggggcgctcctcaggagctgggcaggccggcagttatcgcagtgtcgagctgctccccgggcgtataggagcgctcggtgtcttcccgacacctgggcgcgccgccaaagagagcagctgggagtccctaccgctggcccggcgcggtgtgcgctccggttcccacctcaccctgcaagccttggggtcctgggcggatggagccggctattccggggctcccaggattctgcctactccgcggcacggcgcagagacggggacttggggaaacagcaggccttcccgacgcatgggtgtggcatttggggttcggattctccaaagccagagtccgggttggggttcttgaagctgccctgctgccattcttgagcgtcgccttagaagtatgccccagtaaggactggtgtgggaagcaggtgcctcaaagttgattttgaccctgcgtgtggtgggcctcggtttcgtctttgcatgaaagaggtcggtcctgaggccccgggctgggtcctgctctgctgtctttgggctcatggccccttcctgtctcaggcttgctctgctctttacctggggttgctgtcgaggaccctgtgcaagactcggccggtttttctttctccctgatggacagacccaaacatagccgcgcagcatcgtgaagggctggggccttcactcctctgtggctctggaagagcccgatttcctcaggaggtaaaggaatgttcctgtcccccccggggaaagaaagtgaaaatgaaagcgccctggctgctcctggtgtggtcccatttaaaacgaggttgctgaaggccaggatgcgtgctacccggatgtgtgcccagaaaccctgcagccaagagcagccgcctggaccaccagcctccccttcatccacctggcccagcccagagcccaggcccacgtctggtggtttgtgtcttacgagaggccaggcgggggctgaattctctcggttctcagaaggtcaagccctctgttagcatctcctcgaacagtgggccgggggcaaggtggtgactctgttcagtccttaggatggctggaagccagaaggaggagattatgccgccacagcagggagtgcctttccaggaaagcggctgctggggcagcatgggagcccagtccagggagcgttctggcagagaccattccggaacatggatctgcgccggcggctcccaggagaccttccatctcggagctcctgtggagaccacgtgcctggcaggcatgtcgggccccaggcctgtggtgctgagcgggccttcgggagctgggaagagcaccctgctgaagaggctgctccaggagcacagcggcatctttggcttcagcgtgtcccgtgagtccagggctctcgtggaggggtgcgtagacctcaaggctgctgagtagtcctagcaccgtgagcaggccaggagcccaaacccaacaggcacacccaccctgcagactgtccgaactcttgcacactcccccccacacagaacctgaggttatcacactcctgctgtcctgcgtgcctgtgtctcccttccctgggtctgttgagtactgataactgggccacagtgtttctttctgggagaaccctcgccttgtaggctcctgcgccttcccagtggtgtgcttcactggctgcctgcatcctggggctcaagtgctgtcgggactgcaagggaaacgctgggtggggcattgggctccgagcagcccccgatgggtgacaggtctctctgctagataccacgaggaacccgaggcccggcgaggagaacggcaaagattactactttgtaaccagggaggtgatgcagcgtgacatagcagccggcgacttcatcgagcatgccgagttctcggggaacctgtatggcacgagcaaggtggcggtgcaggccgtgcaggccatgaaccgcatctgtgtgctggacgtggacctgcagggtgtgcggaacatcaaggccaccgatctgcggcccatctacatctctgtgcagccgccttcactgcacgtgctggagcagcggctgcggcagcgcaacactgaaaccgaggagagcctggtgaagcggctggctgctgcccaggccgacatggagagcagcaaggagcccggcctgtttgatgtggtcatcattaacgacagcctggaccaggcctacgcagagctgaaggaggcgctctctgaggaaatcaagaaagctcaaaggaccggcgcctgaggcttgctgtctgttctcggcaccccgggcccatacaggaccagggcagcagcattgagccacccccttggcaggcgatacggcagctctgtgcccttggccagcatgtggagtggaggagatgctgcccctgtggttggaacatcctggggtgacccccgacccagcctcgctgggctgtcccctgtccctatctctcactctggacccagggctgacatcctaataaaataactgttggattagaaactccaaaaaaaatggaatgtgg

SEQ ID NO: 68809 - DNA, 2925 bp, Homo sapiens
cacaaaaaagtttttaaattttttggtacagaaggggtttccctatgatccccaggctggtctccaattcctggcctcaagcggtcctcccggctcggactcccaaagagctgggatcacagacgtgaaccacgcgcccggccacattccccaattaatggtttttggagagtggccggtttggaacgggctagcggagtcgttcgttagttaggtccctgcagtgtagatggaggacggaaacggcgctgtgacataagcgggaggaggcgggctgaggcagcgctgtgacgtagcagatgaaagccgggcccgcgctgcactgaggtacttctctgagtgacaagcgggacaagtacgccgtgggcggggccggcgggtcgtgatgttagttcgcgctgtgtggaggcgggccggcgtggcgctgtgacgcagcgggagaagacgggctgggagggcgctgtgctgaacgcccctgcggtcgcgacaggccagcgcaggtggaggcggggctagcgaggcactgaggtaagtacttccctaaggggcggggaagaacgagtgagacatgggcggggcagtcgcctcatgacgtcagtctcgcgcgcgggcggaggtgggccggtgcggcgctgtcacgtaggttcagtgggcggaagaggtggccccggatgctgcggcgcccgctggccgggctggctgcggccgccctgggccgggccccaccggacggtgagtacgacaagcgcgatcgcgagggtgactcgggtcgaggcggcagcggtccctgcgctttgcggtcgcccagtccacgccgcctccggatctcctcctagccgagacgccctgtgccgcattcaactgtgggccctgagaacgggggagctctggagggcggacgggctggcaacgcagcggagcccgggtcccggagggcggggcgctcctcaggagctgggcaggccggcagttatcgcagtgtcgagctgctccccgggcgtataggagcgctcggtgtcttcccgacacctgggcgcgccgccaaagagagcagctgggagtccctaccgctggcccggcgcggtgtgcgctccggttcccacctcaccctgcaagccttggggtcctgggcggatggagccggctattccggggctcccaggattctgcctactccgcggcacggcgcagagacggggacttggggaaacagcaggccttcccgacgcatgggtgtggcatttggggttcggattctccaaagccagagtccgggttggggttcttgaagctgccctgctgccattcttgagcgtcgccttagaagtatgccccagtaaggactggtgtgggaagcaggtgcctcaaagttgattttgaccctgcgtgtggtgggcctcggtttcgtctttgcatgaaagaggtcggtcctgaggccccgggctgggtcctgctctgctgtctttgggctcatggccccttcctgtctcaggcttgctctgctctttacctggggttgctgtcgaggaccctgtgcaagactcggccggtttttctttctccctgatggacagacccaaacatagccgcgcagcatcgtgaagggctggggccttcactcctctgtggctctggaagagcccgatttcctcaggaggcatgtcgggccccaggcctgtggtgctgagcgggccttcgggagctgggaagagcaccctgctgaagaggctgctccaggagcacagcggcatctttggcttcagcgtgtcccgtgagtccagggctctcgtggaggggtgcgtagacctcaaggctgctgagtagtcctagcaccgtgagcaggccaggagcccaaacccaacaggcacacccaccctgcagactgtccgaactcttgcacactcccccccacacagaacctgaggttatcacactcctgctgtcctgcgtgcctgtgtctcccttccctgggtctgttgagtactgataactgggccacagtgtttctttctgggagaaccctcgccttgtaggctcctgcgccttcccagtggtgtgcttcactggctgcctgcatcctggggctcaagtgctgtcgggactgcaagggaaacgctgggtggggcattgggctccgagcagcccccgatgggtgacaggtctctctgctagataccacgaggaacccgaggcccggcgaggagaacggcaaagattactactttgtaaccagggaggtgatgcagcgtgacatagcagccggcgacttcatcgagcatgccgagttctcggggaacctgtatggcacgagcaaggtggcggtgcaggccgtgcaggccatgaaccgcatctgtgtgctggacgtggacctgcagggtgtgcggaacatcaaggccaccgatctgcggcccatctacatctctgtgcagccgccttcactgcacgtgctggagcagcggctgcggcagcgcaacactgaaaccgaggagagcctggtgaagcggctggctgctgcccaggccgacatggagagcagcaaggagcccggcctgtttgatgtggtcatcattaacgacagcctggaccaggcctacgcagagctgaaggaggcgctctctgaggaaatcaagaaagctcaaaggaccggcgcctgaggcttgctgtctgttctcggcaccccgggcccatacaggaccagggcagcagcattgagccacccccttggcaggcgatacggcagctctgtgcccttggccagcatgtggagtggaggagatgctgcccctgtggttggaacatcctggggtgacccccgacccagcctcgctgggctgtcccctgtccctatctctcactctggacccagggctgacatcctaataaaataactgttggattagaaactccaaaaaaaatggaatgtgg

SEQ ID NO: 68810 - DNA, 1624 bp, Homo sapiens
cacaaaaaagtttttaaattttttggtacagaaggggtttccctatgatccccaggctggtctccaattcctggcctcaagcggtcctcccggctcggactcccaaagagctgggatcacagacgtgaaccacgcgcccggccacattccccaattaatggtttttggagagtggccggtttggaacgggctagcggagtcgttcgttagttaggtccctgcagtgtagatggaggacggaaacggcgctgtgacataagcgggaggaggcgggctgaggcagcgctgtgacgtagcagatgaaagccgggcccgcgctgcactgaggtacttctctgagtgacaagcgggacaagtacgccgtgggcggggccggcgggtcgtgatgttagttcgcgctgtgtggaggcgggccggcgtggcgctgtgacgcagcgggagaagacgggctgggagggcgctgtgctgaacgcccctgcggtcgcgacaggccagcgcaggtggaggcggggctagcgaggcactgaggtaagtacttccctaaggggcggggaagaacgagtgagacatgggcggggcagtcgcctcatgacgtcagtctcgcgcgcgggcggaggtgggccggtgcggcgctgtcacgtaggttcagtgggcggaagaggtggccccggatgctgcggcgcccgctggccgggctggctgcggccgccctgggccgggccccaccggacggcatgtcgggccccaggcctgtggtgctgagcgggccttcgggagctgggaagagcaccctgctgaagaggctgctccaggagcacagcggcatctttggcttcagcgtgtcccgtgagtccagggctctcgtggagggataccacgaggaacccgaggcccggcgaggagaacggcaaagattactactttgtaaccagggaggtgatgcagcgtgacatagcagccggcgacttcatcgagcatgccgagttctcggggaacctgtatggcacgagcaaggtggcggtgcaggccgtgcaggccatgaaccgcatctgtgtgctggacgtggacctgcagggtgtgcggaacatcaaggccaccgatctgcggcccatctacatctctgtgcagccgccttcactgcacgtgctggagcagcggctgcggcagcgcaacactgaaaccgaggagagcctggtgaagcggctggctgctgcccaggccgacatggagagcagcaaggagcccggcctgtttgatgtggtcatcattaacgacagcctggaccaggcctacgcagagctgaaggaggcgctctctgaggaaatcaagaaagctcaaaggaccggcgcctgaggcttgctgtctgttctcggcaccccgggcccatacaggaccagggcagcagcattgagccacccccttggcaggcgatacggcagctctgtgcccttggccagcatgtggagtggaggagatgctgcccctgtggttggaacatcctggggtgacccccgacccagcctcgctgggctgtcccctgtccctatctctcactctggacccagggctgacatcctaataaaataactgttggattagaaactccaaaaaaaatggaatgtgg

SEQ ID NO: 68811 - DNA, 2165 bp, Homo sapiens
cacaaaaaagtttttaaattttttggtacagaaggggtttccctatgatccccaggctggtctccaattcctggcctcaagcggtcctcccggctcggactcccaaagagctgggatcacagacgtgaaccacgcgcccggccacattccccaattaatggtttttggagagtggccggtttggaacgggctagcggagtcgttcgttagttaggtccctgcagtgtagatggaggacggaaacggcgctgtgacataagcgggaggaggcgggctgaggcagcgctgtgacgtagcagatgaaagccgggcccgcgctgcactgaggtacttctctgagtgacaagcgggacaagtacgccgtgggcggggccggcgggtcgtgatgttagttcgcgctgtgtggaggcgggccggcgtggcgctgtgacgcagcgggagaagacgggctgggagggcgctgtgctgaacgcccctgcggtcgcgacaggccagcgcaggtggaggcggggctagcgaggcactgaggtaagtacttccctaaggggcggggaagaacgagtgagacatgggcggggcagtcgcctcatgacgtcagtctcgcgcgcgggcggaggtgggccggtgcggcgctgtcacgtaggttcagtgggcggaagaggtggccccggatgctgcggcgcccgctggccgggctggctgcggccgccctgggccgggccccaccggacggcttgctctgctctttacctggggttgctgtcgaggaccctgtgcaagactcggccggtttttctttctccctgatggacagacccaaacatagccgcgcagcatcgtgaagggctggggccttcactcctctgtggctctggaagagcccgatttcctcaggaggcatgtcgggccccaggcctgtggtgctgagcgggccttcgggagctgggaagagcaccctgctgaagaggctgctccaggagcacagcggcatctttggcttcagcgtgtcccgtgagtccagggctctcgtggaggggtgcgtagacctcaaggctgctgagtagtcctagcaccgtgagcaggccaggagcccaaacccaacaggcacacccaccctgcagactgtccgaactcttgcacactcccccccacacagaacctgaggttatcacactcctgctgtcctgcgtgcctgtgtctcccttccctgggtctgttgagtactgataactgggccacagtgtttctttctgggagaaccctcgccttgtaggctcctgcgccttcccagtggtgtgcttcactggctgcctgcatcctggggctcaagtgctgtcgggactgcaagggaaacgctgggtggggcattgggctccgagcagcccccgatgggtgacaggtctctctgctagataccacgaggaacccgaggcccggcgaggagaacggcaaagattactactttgtaaccagggaggtgatgcagcgtgacatagcagccggcgacttcatcgagcatgccgagttctcggggaacctgtatggcacgagcaaggtggcggtgcaggccgtgcaggccatgaaccgcatctgtgtgctggacgtggacctgcagggtgtgcggaacatcaaggccaccgatctgcggcccatctacatctctgtgcagccgccttcactgcacgtgctggagcagcggctgcggcagcgcaacactgaaaccgaggagagcctggtgaagcggctggctgctgcccaggccgacatggagagcagcaaggagcccggcctgtttgatgtggtcatcattaacgacagcctggaccaggcctacgcagagctgaaggaggcgctctctgaggaaatcaagaaagctcaaaggaccggcgcctgaggcttgctgtctgttctcggcaccccgggcccatacaggaccagggcagcagcattgagccacccccttggcaggcgatacggcagctctgtgcccttggccagcatgtggagtggaggagatgctgcccctgtggttggaacatcctggggtgacccccgacccagcctcgctgggctgtcccctgtccctatctctcactctggacccagggctgacatcctaataaaataactgttggattagaaactccaaaaaaaatggaatgtgg

SEQ ID NO: 68812 - DNA, 3079 bp, Homo sapiens
atggttggctggcacgtagaggaggtggcagggctgggtgagcagcaggagccaggttagtggggaggcccgagctaagcgcaggggcaaattctgcgggtgggagagccaggagggcatggggtgcatggtgagatgaaaacgatgtgtgcttgtgacaaaaagcccagaagaggcagtaaggagggaggagtctatcccttatggagagcacatggacttctgggtgggtgtcctgcagttcccttcctcttgagtctttttaactgggggtccggtgtgtttgtgatcaatgacatgtatgcgtgtgcatgtgtacctttgcaggtacacatgtgtggtgtgtgtgcatttgcttggtgtgcgtgcatttgtgtgtgtgttttgtgtgtgcatgcatgtgtgtgtgtttgtggtaggtttgtgcacacatcctgcatacctttgtgcctgggagtggcatgtgtgtggtgggtgtcgctgtgcatgatggagttgcagccgtggtgcatttgtgagattacctcggtggcctaaattggggattaggagggcatcctcaggtccttcccactgtctgctcgtctgcccacaggcggctgtgccctaaacaggaggaggccattcacgcctcgcctgagttgtgtccaaggtgtgcgtgtggccaggggtccatccgcttccctctagcccagcccctgaacacagctgcagtgcacggccccactcctcagctctgctccccatcccaactcgaagacgctgccctggccctgtgtgtgcagctcatgtggactgggagggcagggcaggtgcaggtcttggggcaagagctggagctgtcttttccttcctgcacagccgcagagcaggtggatggggctgcttccctgcaagggcccagggccaggccccctggggatttattcgtggcttagaagggtggggccagaagcaggcgtagtggggattagggactcagcacccccagctctcagtccagcagacagacccaccccaggctgactacagaggctgcacctcagcaaacaggtaggccctgttcttggggaggattcccaccaggcaaaggccagctcccgggccctcacctgccacgtgtccaagctaggatcctgtttgcctttcccttgggggctgggagggaggcctccaaccccctctggcattaccagcatcacagataggagtcccaagtcctatgagaagttcctggaataggtgtagattcagtagatctttacaagaccatatctgcagggcaaggtaccagaggacagaggcggggacagggacacttccattccagacctagcagcccagcactcagcaccatgcatgggagcaaatggctggactcctgggtggggtgggggtctcagagcaggctcccagagggcttggaggtgactccaccaggtggggacggcagctcccaggtagggtgtcatcagagtagacagcattgcttgctagggacccctggggaggctgacagggtcagtgggtttcagttggggggctcccctgctgagaacccagtaaagccggccttccattcgtctcccgtgtgcccagagcctggtctgagggccgccctgtgcatgccggcccttccaacgtggcagagctcagggggaagaacacccaggctctcaggagactctcaggccaatgtctccatccctgggtcagccctttcctgccatgaattcaggaaggcagaggcagctcagcagatggggactagaggccgcactgctatccacagcctctcttctcacccccaggcatgtcgggccccaggcctgtggtgctgagcgggccttcgggagctgggaagagcaccctgctgaagaggctgctccaggagcacagcggcatctttggcttcagcgtgtcccgtgagtccagggctctcgtggaggggtgcgtagacctcaaggctgctgagtagtcctagcaccgtgagcaggccaggagcccaaacccaacaggcacacccaccctgcagactgtccgaactcttgcacactcccccccacacagaacctgaggttatcacactcctgctgtcctgcgtgcctgtgtctcccttccctgggtctgttgagtactgataactgggccacagtgtttctttctgggagaaccctcgccttgtaggctcctgcgccttcccagtggtgtgcttcactggctgcctgcatcctggggctcaagtgctgtcgggactgcaagggaaacgctgggtggggcattgggctccgagcagcccccgatgggtgacaggtctctctgctagataccacgaggaacccgaggcccggcgaggagaacggcaaagattactactttgtaaccagggaggtgatgcagcgtgacatagcagccggcgacttcatcgagcatgccgagttctcggggaacctgtatggcacgagcaaggtggcggtgcaggccgtgcaggccatgaaccgcatctgtgtgctggacgtggacctgcagggtgtgcggaacatcaaggccaccgatctgcggcccatctacatctctgtgcagccgccttcactgcacgtgctggagcagcggctgcggcagcgcaacactgaaaccgaggagagcctggtgaagcggctggctgctgcccaggccgacatggagagcagcaaggagcccggcctgtttgatgtggtcatcattaacgacagcctggaccaggcctacgcagagctgaaggaggcgctctctgaggaaatcaagaaagctcaaaggaccggcgcctgaggcttgctgtctgttctcggcaccccgggcccatacaggaccagggcagcagcattgagccacccccttggcaggcgatacggcagctctgtgcccttggccagcatgtggagtggaggagatgctgcccctgtggttggaacatcctggggtgacccccgacccagcctcgctgggctgtcccctgtccctatctctcactctggacccagggctgacatcctaataaaataactgttggattagaaactccaaaaaaaatggaatgtgg

SEQ ID NO: 68813 - DNA, 2000 bp, Homo sapiens
cacaaaaaagtttttaaattttttggtacagaaggggtttccctatgatccccaggctggtctccaattcctggcctcaagcggtcctcccggctcggactcccaaagagctgggatcacagacgtgaaccacgcgcccggccacattccccaattaatggtttttggagagtggccggtttggaacgggctagcggagtcgttcgttagttaggtccctgcagtgtagatggaggacggaaacggcgctgtgacataagcgggaggaggcgggctgaggcagcgctgtgacgtagcagatgaaagccgggcccgcgctgcactgaggtacttctctgagtgacaagcgggacaagtacgccgtgggcggggccggcgggtcgtgatgttagttcgcgctgtgtggaggcgggccggcgtggcgctgtgacgcagcgggagaagacgggctgggagggcgctgtgctgaacgcccctgcggtcgcgacaggccagcgcaggtggaggcggggctagcgaggcactgaggtaagtacttccctaaggggcggggaagaacgagtgagacatgggcggggcagtcgcctcatgacgtcagtctcgcgcgcgggcggaggtgggccggtgcggcgctgtcacgtaggttcagtgggcggaagaggtggccccggatgctgcggcgcccgctggccgggctggctgcggccgccctgggccgggccccaccggacggcatgtcgggccccaggcctgtggtgctgagcgggccttcgggagctgggaagagcaccctgctgaagaggctgctccaggagcacagcggcatctttggcttcagcgtgtcccgtgagtccagggctctcgtggaggggtgcgtagacctcaaggctgctgagtagtcctagcaccgtgagcaggccaggagcccaaacccaacaggcacacccaccctgcagactgtccgaactcttgcacactcccccccacacagaacctgaggttatcacactcctgctgtcctgcgtgcctgtgtctcccttccctgggtctgttgagtactgataactgggccacagtgtttctttctgggagaaccctcgccttgtaggctcctgcgccttcccagtggtgtgcttcactggctgcctgcatcctggggctcaagtgctgtcgggactgcaagggaaacgctgggtggggcattgggctccgagcagcccccgatgggtgacaggtctctctgctagataccacgaggaacccgaggcccggcgaggagaacggcaaagattactactttgtaaccagggaggtgatgcagcgtgacatagcagccggcgacttcatcgagcatgccgagttctcggggaacctgtatggcacgagcaaggtggcggtgcaggccgtgcaggccatgaaccgcatctgtgtgctggacgtggacctgcagggtgtgcggaacatcaaggccaccgatctgcggcccatctacatctctgtgcagccgccttcactgcacgtgctggagcagcggctgcggcagcgcaacactgaaaccgaggagagcctggtgaagcggctggctgctgcccaggccgacatggagagcagcaaggagcccggcctgtttgatgtggtcatcattaacgacagcctggaccaggcctacgcagagctgaaggaggcgctctctgaggaaatcaagaaagctcaaaggaccggcgcctgaggcttgctgtctgttctcggcaccccgggcccatacaggaccagggcagcagcattgagccacccccttggcaggcgatacggcagctctgtgcccttggccagcatgtggagtggaggagatgctgcccctgtggttggaacatcctggggtgacccccgacccagcctcgctgggctgtcccctgtccctatctctcactctggacccagggctgacatcctaataaaataactgttggattagaaactccaaaaaaaatggaatgtgg

SEQ ID NO: 68814 - DNA, 752 bp, Homo sapiens
tgtgctcatcccacctgttgtgctcatcccacctgtgtgctattactactttgtaaccagggaggtgatgcagcgtgacatagcagccggcgacttcatcgagcatgccgagttctcggggaacctgtatggcacgagcaaggtggcggtgcaggccgtgcaggccatgaaccgcatctgtgtgctggacgtggacctgcagggtgtgcggaacatcaaggccaccgatctgcggcccatctacatctctgtgcagccgccttcactgcacgtgctggagcagcggctgcggcagcgcaacactgaaaccgaggagagcctggtgaagcggctggctgctgcccaggccgacatggagagcagcaaggagcccggcctgtttgatgtggtcatcattaacgacagcctggaccaggcctacgcagagctgaaggaggcgctctctgaggaaatcaagaaagctcaaaggaccggcgcctgaggcttgctgtctgttctcggcaccccgggcccatacaggaccagggcagcagcattgagccacccccttggcaggcgatacggcagctctgtgcccttggccagcatgtggagtggaggagatgctgcccctgtggttggaacatcctggggtgacccccgacccagcctcgctgggctgtcccctgtccctatctctcactctggacccagggctgacatcctaataaaataactgttggattagaaactccaaaaaaaatggaatgtgg

SEQ ID NO: 68815 - DNA, 693 bp, Homo sapiens
  misc_feature (8)..(8): n is a, c, g, or t
  misc_feature (14)..(14): n is a, c, g, or t
  misc_feature (32)..(32): n is a, c, g, or t
ggcacganctcgtncgaattcggcacgaggcngacttcatcgagcatgccgagttctcggggaacctgtatggcacgagcaaggtggcggtgcaggccgtgcaggccatgaaccgcatctgtgtgctggacgtggacctgcagggtgtgcggaacatcaaggccaccgatctgcggcccatctacatctctgtgcagccgccttcactgcacgtgctggagcagcggctgcggcagcgcaacactgaaaccgaggagagcctggtgaagcggctggctgctgcccaggccgacatggagagcagcaaggagcccggcctgtttgatgtggtcatcattaacgacagcctggaccaggcctacgcagagctgaaggaggcgctctctgaggaaatcaagaaagctcaaaggaccggcgcctgaggcttgctgtctgttctcggcaccccgggcccatacaggaccagggcagcagcattgagccacccccttggcaggcgatacggcagctctgtgcccttggccagcatgtggagtggaggagatgctgcccctgtggttggaacatcctggggtgacccccgacccagcctcgctgggctgtcccctgtccctatctctcactctggacccagggctgacatcctaataaaataactgttggattagaaactccaaaaaaaatggaatgtgg

SEQ ID NO: 68816 - DNA, 1502 bp, Homo sapiens
cacaaaaaagtttttaaattttttggtacagaaggggtttccctatgatccccaggctggtctccaattcctggcctcaagcggtcctcccggctcggactcccaaagagctgggatcacagacgtgaaccacgcgcccggccacattccccaattaatggtttttggagagtggccggtttggaacgggctagcggagtcgttcgttagttaggtccctgcagtgtagatggaggacggaaacggcgctgtgacataagcgggaggaggcgggctgaggcagcgctgtgacgtagcagatgaaagccgggcccgcgctgcactgaggtacttctctgagtgacaagcgggacaagtacgccgtgggcggggccggcgggtcgtgatgttagttcgcgctgtgtggaggcgggccggcgtggcgctgtgacgcagcgggagaagacgggctgggagggcgctgtgctgaacgcccctgcggtcgcgacaggccagcgcaggtggaggcggggctagcgaggcactgaggtaagtacttccctaaggggcggggaagaacgagtgagacatgggcggggcagtcgcctcatgacgtcagtctcgcgcgcgggcggaggtgggccggtgcggcgctgtcacgtaggttcagtgggcggaagaggtggccccggatgctgcggcgcccgctggccgggctggctgcggccgccctgggccgggccccaccggacggcatgtcgggccccaggcctgtggtgctgagcgggccttcgggagctgggaagagcaccctgctgaagaggctgctccaggagcacagcggcatctttggcttcagcgtgtcccataccacgaggaacccgaggcccggcgaggagaacggcaaagattactactttgtaaccagggaggtgatgcagcgtgacatagcagccggcgacttcatcgagcatgccgagttctcggggaacctgtatggcacgagcaaggtggcggtgcaggccgtgcaggccatgaaccgcatctgtgtgctggacgtggacctgcagggtgtgcggaacatcaaggccaccgatctgcggcccatctacatctctgtgcagccgccttcactgcacgtgctggagcagcggctgcggcagcgcaacactgaaaccgaggagagcctggtgaagcggctggctgctgcccaggccgacatggagagcagcaaggagcccggcctgtttgatgtggtcatcattaacgacagcctggaccaggcctacgcagagctgaaggaggcgctctctgaggaaatcaagaaagctcaaaggaccggcgcctgaggcttgctgtctgttctcggcaccccgggcccatacaggaccagggcagcagcattgagccacccccttggcaggcgatacggcagctctgtgcccttggccagcgggtggacctggacggaaaagaaacacactgtgtttggagagaaaagcgcacgcggtttcccacacatc

SEQ ID NO: 68817 - DNA, 606 bp, Homo sapiens
acctgcctccagcggcaccgctttaccgcatctgtgtgctggacgtggacctgcagggtgtgcggaacatcaaggccaccgatctgcggcccatctacatctctgtgcagccgccttcactgcacgtgctggagcagcggctgcggcagcgcaacactgaaaccgaggagagcctggtgaagcggctggctgctgcccaggccgacatggagagcagcaaggagcccggcctgtttgatgtggtcatcattaacgacagcctggaccaggcctacgcagagctgaaggaggcgctctctgaggaaatcaagaaagctcaaaggaccggcgcctgaggcttgctgtctgttctcggcaccccgggcccatacaggaccagggcagcagcattgagccacccccttggcaggcgatacggcagctctgtgcccttggccagcatgtggagtggaggagatgctgcccctgtggttggaacatcctggggtgacccccgacccagcctcgctgggctgtcccctgtccctatctctcactctggacccagggctgacatcctaataaaataactgttggattagaaactccaaaaaaaatggaatgtgg

SEQ ID NO: 68818 - DNA, 1979 bp, Homo sapiens
  misc_feature (1972)..(1972): n is a, c, g, or t
cacaaaaaagtttttaaattttttggtacagaaggggtttccctatgatccccaggctggtctccaattcctggcctcaagcggtcctcccggctcggactcccaaagagctgggatcacagacgtgaaccacgcgcccggccacattccccaattaatggtttttggagagtggccggtttggaacgggctagcggagtcgttcgttagttaggtccctgcagtgtagatggaggacggaaacggcgctgtgacataagcgggaggaggcgggctgaggcagcgctgtgacgtagcagatgaaagccgggcccgcgctgcactgaggtacttctctgagtgacaagcgggacaagtacgccgtgggcggggccggcgggtcgtgatgttagttcgcgctgtgtggaggcgggccggcgtggcgctgtgacgcagcgggagaagacgggctgggagggcgctgtgctgaacgcccctgcggtcgcgacaggccagcgcaggtggaggcggggctagcgaggcactgaggtaagtacttccctaaggggcggggaagaacgagtgagacatgggcggggcagtcgcctcatgacgtcagtctcgcgcgcgggcggaggtgggccggtgcggcgctgtcacgtaggttcagtgggcggaagaggtggccccggatgctgcggcgcccgctggccgggctggctgcggccgccctgggccgggccccaccggacggcttgctctgctctttacctggggttgctgtcgaggaccctgtgcaagactcggccggtttttctttctccctgatggacagacccaaacatagccgcgcagcatcgtgaagggctggggccttcactcctctgtggctctggaagagcccgatttcctcaggaggcatgtcgggccccaggcctgtggtgctgagcgggccttcgggagctgggaagagcaccctgctgaagaggctgctccaggagcacagcggcatctttggcttcagcgtgtcccataccacgaggaacccgaggcccggcgaggagaacggcaaagattactactttgtaaccagggaggtgatgcagcgtgacatagcagccggcgacttcatcgagcatgccgagttctcggggaacctgtatggcacgagcaaggtggcggtgcaggccgtgcaggccatgaaccgcatctgtgtgctggacgtggacctgcagggtgtgcggaacatcaaggccaccgatctgcggcccatctacatctctgtgcagccgccttcactgcacgtgctggagcagcggctgcggcagcgcaacactgaaaccgaggagagcctggtgaagcggctggctgctgcccaggccgacatggagagcagcaaggagcccggcctgtttgatgtggtcatcattaacgacagcctggaccaggcctacgcagagctgaaggaggcgctctctgaggtgggcccatccttgtgcctacctgggcaaggcccaaggggaggcctgggggccaggcctttgttgtccatgaggccactgaggttagatgggacagtcctacccaagcactggcatgagacaccgaggtccacggtggagggagagcaggaagcccagcccttcctggataccagccctcccaactccctttcttcctcactggcaggaaatcaagaaagctcaaaggaccggcgcctgaggcttgctgtctgttctcggcaccccgggcccatacaggaccagggcagcagcattgagccacccccttggcaggcgatacggcagctctgtgcccttggccagcatgtggagtggaggagatgctgcccctgtggttggaacatcctggggtgacccccgacccagcctcgctgggctgtcccctgtccctatctctcactctggacccagggctgacatcctaataaaataactgttggattagaaacaaaaaaaaaaaaaaaaaaagngggggcg

SEQ ID NO: 68819 - DNA, 1854 bp, Homo sapiens
  misc_feature (1847)..(1847): n is a, c, g, or t
cacaaaaaagtttttaaattttttggtacagaaggggtttccctatgatccccaggctggtctccaattcctggcctcaagcggtcctcccggctcggactcccaaagagctgggatcacagacgtgaaccacgcgcccggccacattccccaattaatggtttttggagagtggccggtttggaacgggctagcggagtcgttcgttagttaggtccctgcagtgtagatggaggacggaaacggcgctgtgacataagcgggaggaggcgggctgaggcagcgctgtgacgtagcagatgaaagccgggcccgcgctgcactgaggtacttctctgagtgacaagcgggacaagtacgccgtgggcggggccggcgggtcgtgatgttagttcgcgctgtgtggaggcgggccggcgtggcgctgtgacgcagcgggagaagacgggctgggagggcgctgtgctgaacgcccctgcggtcgcgacaggccagcgcaggtggaggcggggctagcgaggcactgaggtaagtacttccctaaggggcggggaagaacgagtgagacatgggcggggcagtcgcctcatgacgtcagtctcgcgcgcgggcggaggtgggccggtgcggcgctgtcacgtaggttcagtgggcggaagaggtggccccggatgctgcggcgcccgctggccgggctggctgcggccgccctgggccgggccccaccggacggcttgctctgctctttacctggggttgctgtcgaggaccctgtgcaagactcggccggtttttctttctccctgatggacagacccaaacatagccgcgcagcatcgtgaagggctggggccttcactcctctgtggctctggaagagcccgatttcctcaggaggcatgtcgggccccaggcctgtggtgctgagcgggccttcgggagctgggaagagcaccctgctgaagaggctgctccaggagcacagcggcatctttggcttcagcgtgtcccataccacgaggaacccgaggcccggcgaggagaacggcaaagattactactttgtaaccagggaggtgatgcagcgtgacatagcagccggcgacttcatcgagcatgccgagttctcggggaacctgtatggcacgagcaaggtggcggtgcaggccgtgcaggccatgaaccgcatctgtgtgctggacgtggacctgcagggtgtgcggaacatcaaggccaccgatctgcggcccatctacatctctgtgcagccgccttcactgcacgtgctggagcagcggctgcggcagcgcaacactgaaaccgaggagagcctggtgaagcggctggctgctgcccaggccgacatggagagcagcaaggagcccggcctgtttgatgtggtcatcattaacgacagcctggaccaggcctacgcagagctgaaggaggcgctctctgaggtgggcccatccttgtgcctacctgggcaaggcccaaggggaggcctgggggccaggcctttgttgtccatgaggccactgaggaaatcaagaaagctcaaaggaccggcgcctgaggcttgctgtctgttctcggcaccccgggcccatacaggaccagggcagcagcattgagccacccccttggcaggcgatacggcagctctgtgcccttggccagcatgtggagtggaggagatgctgcccctgtggttggaacatcctggggtgacccccgacccagcctcgctgggctgtcccctgtccctatctctcactctggacccagggctgacatcctaataaaataactgttggattagaaacaaaaaaaaaaaaaaaaaaagngggggcg

SEQ ID NO: 68820 - DNA, 1460 bp, Homo sapiens
cacaaaaaagtttttaaattttttggtacagaaggggtttccctatgatccccaggctggtctccaattcctggcctcaagcggtcctcccggctcggactcccaaagagctgggatcacagacgtgaaccacgcgcccggccacattccccaattaatggtttttggagagtggccggtttggaacgggctagcggagtcgttcgttagttaggtccctgcagtgtagatggaggacggaaacggcgctgtgacataagcgggaggaggcgggctgaggcagcgctgtgacgtagcagatgaaagccgggcccgcgctgcactgaggtacttctctgagtgacaagcgggacaagtacgccgtgggcggggccggcgggtcgtgatgttagttcgcgctgtgtggaggcgggccggcgtggcgctgtgacgcagcgggagaagacgggctgggagggcgctgtgctgaacgcccctgcggtcgcgacaggccagcgcaggtggaggcggggctagcgaggcactgaggtaagtacttccctaaggggcggggaagaacgagtgagacatgggcggggcagtcgcctcatgacgtcagtctcgcgcgcgggcggaggtgggccggtgcggcgctgtcacgtaggttcagtgggcggaagaggtggccccggatgctgcggcgcccgctggccgggctggctgcggccgccctgggccgggccccaccggacggcatgtcgggccccaggcctgtggtgctgagcgggccttcgggagctgggaagagcaccctgctgaagaggctgctccaggagcacagcggcatctttggcttcagcgtgtcccataccacgaggaacccgaggcccggcgaggagaacggcaaagattactactttgtaaccagggaggtgatgcagcgtgacatagcagccggcgacttcatcgagcatgccgagttctcggggaacctgtatggcacgaggagcagcggctgcggcagcgcaacactgaaaccgaggagagcctggtgaagcggctggctgctgcccaggccgacatggagagcagcaaggagcccggcctgtttgatgtggtcatcattaacgacagcctggaccaggcctacgcagagctgaaggaggcgctctctgaggaaatcaagaaagctcaaaggaccggcgcctgaggcttgctgtctgttctcggcaccccgggcccatacaggaccagggcagcagcattgagccacccccttggcaggcgatacggcagctctgtgcccttggccagcatgtggagtggaggagatgctgcccctgtggttggaacatcctggggtgacccccgacccagcctcgctgggctgtcccctgtccctatctctcactctggacccagggctgacatcctaataaaataactgttggattagaaactccaaaaaaaatggaatgtgg

SEQ ID NO: 68821 - DNA, 507 bp, Homo sapiens
atgccaggctctgattgccaccccctttttaggagcagcggctgcggcagcgcaacactgaaaccgaggagagcctggtgaagcggctggctgctgcccaggccgacatggagagcagcaaggagcccggcctgtttgatgtggtcatcattaacgacagcctggaccaggcctacgcagagctgaaggaggcgctctctgaggaaatcaagaaagctcaaaggaccggcgcctgaggcttgctgtctgttctcggcaccccgggcccatacaggaccagggcagcagcattgagccacccccttggcaggcgatacggcagctctgtgcccttggccagcatgtggagtggaggagatgctgcccctgtggttggaacatcctggggtgacccccgacccagcctcgctgggctgtcccctgtccctatctctcactctggacccagggctgacatcctaataaaataactgttggattagaaactccaaaaaaaatggaatgtgg

SEQ ID NO: 68822 - DNA, 1517 bp, Homo sapiens
  misc_feature (1500)..(1500): n is a, c, g, or t
cacaaaaaagtttttaaattttttggtacagaaggggtttccctatgatccccaggctggtctccaattcctggcctcaagcggtcctcccggctcggactcccaaagagctgggatcacagacgtgaaccacgcgcccggccacattccccaattaatggtttttggagagtggccggtttggaacgggctagcggagtcgttcgttagttaggtccctgcagtgtagatggaggacggaaacggcgctgtgacataagcgggaggaggcgggctgaggcagcgctgtgacgtagcagatgaaagccgggcccgcgctgcactgaggtacttctctgagtgacaagcgggacaagtacgccgtgggcggggccggcgggtcgtgatgttagttcgcgctgtgtggaggcgggccggcgtggcgctgtgacgcagcgggagaagacgggctgggagggcgctgtgctgaacgcccctgcggtcgcgacaggccagcgcaggtggaggcggggctagcgaggcactgaggtaagtacttccctaaggggcggggaagaacgagtgagacatgggcggggcagtcgcctcatgacgtcagtctcgcgcgcgggcggaggtgggccggtgcggcgctgtcacgtaggttcagtgggcggaagaggtggccccggatgctgcggcgcccgctggccgggctggctgcggccgccctgggccgggccccaccggacggcatgtcgggccccaggcctgtggtgctgagcgggccttcgggagctgggaagagcaccctgctgaagaggctgctccaggagcacagcggcatctttggcttcagcgtgtcccataccacgaggaacccgaggcccggcgaggagaacggcaaagattactactttgtaaccagggaggtgatgcagcgtgacatagcagccggcgacttcatcgagcatgccgagttctcggggaacctgtatggcacgagcaaggtggcggtgcaggccgtgcaggccatgaaccgcatctgtgtgctggacgtggacctgcagggtgtgcggaacatcaaggccaccgatctgcggcccatctacatctctgtgcagccgccttcactgcacgtgctggagcagcggctgcggcagcgcaacactgaaaccgaggagagcctggtgaagcggctggctgctgcccaggccgacatggagagcagaaatcaagaaagctcaaaggaccggcgcctgaggcttgctgtctgttctcggcaccccgggcccatacaggaccagggcagcagcattgagccacccccttggcaggcgatacggcagctctgtgcccttggccagcatgtggagtggaggagatgctgcccctgtggttggaacatcctggggtgacccccgacccagcctcgctgggctgtcccctgtccctatctctcactctggacccagggctgacatcctaataaaataactgttggattagaaacaaaaaaancccacccccaaaaacac

SEQ ID NO: 68823 - DNA, 1714 bp, Homo sapiens
cacaaaaaagtttttaaattttttggtacagaaggggtttccctatgatccccaggctggtctccaattcctggcctcaagcggtcctcccggctcggactcccaaagagctgggatcacagacgtgaaccacgcgcccggccacattccccaattaatggtttttggagagtggccggtttggaacgggctagcggagtcgttcgttagttaggtccctgcagtgtagatggaggacggaaacggcgctgtgacataagcgggaggaggcgggctgaggcagcgctgtgacgtagcagatgaaagccgggcccgcgctgcactgaggtacttctctgagtgacaagcgggacaagtacgccgtgggcggggccggcgggtcgtgatgttagttcgcgctgtgtggaggcgggccggcgtggcgctgtgacgcagcgggagaagacgggctgggagggcgctgtgctgaacgcccctgcggtcgcgacaggccagcgcaggtggaggcggggctagcgaggcactgaggtaagtacttccctaaggggcggggaagaacgagtgagacatgggcggggcagtcgcctcatgacgtcagtctcgcgcgcgggcggaggtgggccggtgcggcgctgtcacgtaggttcagtgggcggaagaggtggccccggatgctgcggcgcccgctggccgggctggctgcggccgccctgggccgggccccaccggacggcttgctctgctctttacctggggttgctgtcgaggaccctgtgcaagactcggccggtttttctttctccctgatggacagacccaaacatagccgcgcagcatcgtgaagggctggggccttcactcctctgtggctctggaagagcccgatttcctcaggaggcatgtcgggccccaggcctgtggtgctgagcgggccttcgggagctgggaagagcaccctgctgaagaggctgctccaggagcacagcggcatctttggcttcagcgtgtcccataccacgaggaacccgaggcccggcgaggagaacggcaaagattactactttgtaaccagggaggtgatgcagcgtgacatagcagccggcgacttcatcgagcatgccgagttctcggggaacctgtatggcacgagcaaggtggcggtgcaggccgtgcaggccatgaaccgcatctgtgtgctggacgtggacctgcagggtgtgcggaacatcaaggccaccgatctgcggcccatctacatctctgtgcagccgccttcactgcacgtgctggagcagcggctgcggcagcgcaacactgaaaccgaggagagcctggtgaagcggctggctgctgcccaggccgacatggagagcacaggcctacgcagagctgaaggaggcgctctctgaggaaatcaagaaagctcaaaggaccggcgcctgaggcttgctgtctgttctcggcaccccgggcccatacaggaccagggcagcagcattgagccacccccttggcaggcgatacggcagctctgtgcccttggccagcatgtggagtggaggagatgctgcccctgtggttggaacatcctggggtgacccccgacccagcctcgctgggctgtcccctgtccctatctctcactctggacccagggctgacatcctaataaaataactgttggattagaaactccaaaaaaaatggaatgtgg

SEQ ID NO: 68824 - DNA, 1465 bp, Homo sapiens
cacaaaaaagtttttaaattttttggtacagaaggggtttccctatgatccccaggctggtctccaattcctggcctcaagcggtcctcccggctcggactcccaaagagctgggatcacagacgtgaaccacgcgcccggccacattccccaattaatggtttttggagagtggccggtttggaacgggctagcggagtcgttcgttagttaggtccctgcagtgtagatggaggacggaaacggcgctgtgacataagcgggaggaggcgggctgaggcagcgctgtgacgtagcagatgaaagccgggcccgcgctgcactgaggtacttctctgagtgacaagcgggacaagtacgccgtgggcggggccggcgggtcgtgatgttagttcgcgctgtgtggaggcgggccggcgtggcgctgtgacgcagcgggagaagacgggctgggagggcgctgtgctgaacgcccctgcggtcgcgacaggccagcgcaggtggaggcggggctagcgaggcactgaggtaagtacttccctaaggggcggggaagaacgagtgagacatgggcggggcagtcgcctcatgacgtcagtctcgcgcgcgggcggaggtgggccggtgcggcgctgtcacgtaggttcagtgggcggaagaggtggccccggatgctgcggcgcccgctggccgggctggctgcggccgccctgggccgggccccaccggacggcttgctctgctctttacctggggttgctgtcgaggaccctgtgcaagactcggccggtttttctttctccctgatggacagacccaaacatagccgcgcagcatcgtgaagggctggggccttcactcctctgtggctctggaagagcccgatttcctcaggaggcatgtcgggccccaggcctgtggtgctgagcgggccttcgggagctgggaagagcaccctgctgaagaggctgctccaggagcacagcggcatctttggcttcagcgtgtcccataccacgaggaacccgaggcccggcgaggagaacggcaaagattactactttgtaaccagggaggtgatgcagcgtgacatagcagccggcgacttcatcgagcatgccgagttctcggggaacctgtatggcacgagcaaggtggcggtgcaggccgtgcaggccatgaaccgcatctgtgtgctggacgtggacctgcagggtgtgcggaacatcaaggccaccgatctgcggcccatctacatctctgtgcagccgccttcactgcacgtgctggagcagcggctgcggcagcgcaacactgaaaccgaggagagcctggtgaagcggctggctgctgcccaggccgacatggagagcaaaatcagaagtcaaggacggggctgaggctgctgttgtctcggacccgggccataaaggaccggagagattggcaccctggagggatacgg

SEQ ID NO: 68825 - DNA, 1419 bp, Homo sapiens
cacaaaaaagtttttaaattttttggtacagaaggggtttccctatgatccccaggctggtctccaattcctggcctcaagcggtcctcccggctcggactcccaaagagctgggatcacagacgtgaaccacgcgcccggccacattccccaattaatggtttttggagagtggccggtttggaacgggctagcggagtcgttcgttagttaggtccctgcagtgtagatggaggacggaaacggcgctgtgacataagcgggaggaggcgggctgaggcagcgctgtgacgtagcagatgaaagccgggcccgcgctgcactgaggtacttctctgagtgacaagcgggacaagtacgccgtgggcggggccggcgggtcgtgatgttagttcgcgctgtgtggaggcgggccggcgtggcgctgtgacgcagcgggagaagacgggctgggagggcgctgtgctgaacgcccctgcggtcgcgacaggccagcgcaggtggaggcggggctagcgaggcactgaggtaagtacttccctaaggggcggggaagaacgagtgagacatgggcggggcagtcgcctcatgacgtcagtctcgcgcgcgggcggaggtgggccggtgcggcgctgtcacgtaggttcagtgggcggaagaggtggccccggatgctgcggcgcccgctggccgggctggctgcggccgccctgggccgggccccaccggacggcttgctctgctctttacctggggttgctgtcgaggaccctgtgcaagactcggccggtttttctttctccctgatggacagacccaaacatagccgcgcagcatcgtgaagggctggggccttcactcctctgtggctctggaagagcccgatttcctcaggaggcatgtcgggccccaggcctgtggtgctgagcgggccttcgggagctgggaagagcaccctgctgaagaggctgctccaggagcacagcggcatctttggcttcagcgtgtcccataccacgaggaacccgaggcccggcgaggagaacggcaaagattactactttgtaaccagggaggtgatgcagcgtgacatagcagccggcgacttcatcgagcatgccgagttctcggggaacctgtatggcacgagcaaggtggcggtgcaggccgtgcaggccatgaaccgcatctgtgtgctggacgtggacctgcagggtgtgcggaacatcaaggccaccgatctgcggcccatctacatctctgtgcagccgccttcactgcacgtgctggagcagcggctgcggcagcgcaacactgaaaccgaggagagcctggtgaagcggctggctgctgcccaggccgacatggagagcactacacgaattcccgagcacaccacgattaaagatcctgaagtca

SEQ ID NO: 68826 - DNA, 1568 bp, Homo sapiens
  misc_feature (1561)..(1561): n is a, c, g, or t
cacaaaaaagtttttaaattttttggtacagaaggggtttccctatgatccccaggctggtctccaattcctggcctcaagcggtcctcccggctcggactcccaaagagctgggatcacagacgtgaaccacgcgcccggccacattccccaattaatggtttttggagagtggccggtttggaacgggctagcggagtcgttcgttagttaggtccctgcagtgtagatggaggacggaaacggcgctgtgacataagcgggaggaggcgggctgaggcagcgctgtgacgtagcagatgaaagccgggcccgcgctgcactgaggtacttctctgagtgacaagcgggacaagtacgccgtgggcggggccggcgggtcgtgatgttagttcgcgctgtgtggaggcgggccggcgtggcgctgtgacgcagcgggagaagacgggctgggagggcgctgtgctgaacgcccctgcggtcgcgacaggccagcgcaggtggaggcggggctagcgaggcactgaggtaagtacttccctaaggggcggggaagaacgagtgagacatgggcggggcagtcgcctcatgacgtcagtctcgcgcgcgggcggaggtgggccggtgcggcgctgtcacgtaggttcagtgggcggaagaggtggccccggatgctgcggcgcccgctggccgggctggctgcggccgccctgggccgggccccaccggacggcttgctctgctctttacctggggttgctgtcgaggaccctgtgcaagactcggccggtttttctttctccctgatggacagacccaaacatagccgcgcagcatcgtgaagggctggggccttcactcctctgtggctctggaagagcccgatttcctcaggaggcatgtcgggccccaggcctgtggtgctgagcgggccttcgggagctgggaagagcaccctgctgaagaggctgctccaggagcacagcggcatctttggcttcagcgtgtcccataccacgaggaacccgaggcccggcgaggagaacggcaaagattactactttgtaaccagggaggtgatgcagcgtgacatagcagccggcgacttcatcgagcatgccgagttctcggggaacctgtatggcacgagcaaggtggcggtgcaggccgtgcaggccatgaaccgcatctgtgtgctggacgtggacctgcagggtgtgcggaacatcaaggccaccgatctgcggcccatctacatctctgtgcagccgccttcactgcacgtgctggagcagcggctgcggcagcgcaacactgaaaccgaggagagcctggtgaagcgcattgagccacccccttggcaggcgatacggcagctctgtgcccttggccagcatgtggagtggaggagatgctgcccctgtggttggaacatcctggggtgacccccgacccagcctcgctgggctgtcccctgtccctatctctcactctggacccagggctgacatcctaataaaataactgttggattagaaacaaaaaaaaaaaaaaaaaaagngggggcg

SEQ ID NO: 68827 - DNA, 3011 bp, Homo sapiens
  misc_feature (3004)..(3004): n is a, c, g, or t
cacaaaaaagtttttaaattttttggtacagaaggggtttccctatgatccccaggctggtctccaattcctggcctcaagcggtcctcccggctcggactcccaaagagctgggatcacagacgtgaaccacgcgcccggccacattccccaattaatggtttttggagagtggccggtttggaacgggctagcggagtcgttcgttagttaggtccctgcagtgtagatggaggacggaaacggcgctgtgacataagcgggaggaggcgggctgaggcagcgctgtgacgtagcagatgaaagccgggcccgcgctgcactgaggtacttctctgagtgacaagcgggacaagtacgccgtgggcggggccggcgggtcgtgatgttagttcgcgctgtgtggaggcgggccggcgtggcgctgtgacgcagcgggagaagacgggctgggagggcgctgtgctgaacgcccctgcggtcgcgacaggccagcgcaggtggaggcggggctagcgaggcactgaggtaagtacttccctaaggggcggggaagaacgagtgagacatgggcggggcagtcgcctcatgacgtcagtctcgcgcgcgggcggaggtgggccggtgcggcgctgtcacgtaggttcagtgggcggaagaggtggccccggatgctgcggcgcccgctggccgggctggctgcggccgccctgggccgggccccaccggacggtgagtacgacaagcgcgatcgcgagggtgactcgggtcgaggcggcagcggtccctgcgctttgcggtcgcccagtccacgccgcctccggatctcctcctagccgagacgccctgtgccgcattcaactgtgggccctgagaacgggggagctctggagggcggacgggctggcaacgcagcggagcccgggtcccggagggcggggcgctcctcaggagctgggcaggccggcagttatcgcagtgtcgagctgctccccgggcgtataggagcgctcggtgtcttcccgacacctgggcgcgccgccaaagagagcagctgggagtccctaccgctggcccggcgcggtgtgcgctccggttcccacctcaccctgcaagccttggggtcctgggcggatggagccggctattccggggctcccaggattctgcctactccgcggcacggcgcagagacggggacttggggaaacagcaggccttcccgacgcatgggtgtggcatttggggttcggattctccaaagccagagtccgggttggggttcttgaagctgccctgctgccattcttgagcgtcgccttagaagtatgccccagtaaggactggtgtgggaagcaggtgcctcaaagttgattttgaccctgcgtgtggtgggcctcggtttcgtctttgcatgaaagaggtcggtcctgaggccccgggctgggtcctgctctgctgtctttgggctcatggccccttcctgtctcaggcttgctctgctctttacctggggttgctgtcgaggaccctgtgcaagactcggccggtttttctttctccctgatggacagacccaaacatagccgcgcagcatcgtgaagggctggggccttcactcctctgtggctctggaagagcccgatttcctcaggaggtaaaggaatgttcctgtcccccccggggaaagaaagtgaaaatgaaagcgccctggctgctcctggtgtggtcccatttaaaacgaggttgctgaaggccaggatgcgtgctacccggatgtgtgcccagaaaccctgcagccaagagcagccgcctggaccaccagcctccccttcatccacctggcccagcccagagcccaggcccacgtctggtggtttgtgtcttacgagaggccaggcgggggctgaattctctcggttctcagaaggtcaagccctctgttagcatctcctcgaacagtgggccgggggcaaggtggtgactctgttcagtccttaggatggctggaagccagaaggaggagattatgccgccacagcagggagtgcctttccaggaaagcggctgctggggcagcatgggagcccagtccagggagcgttctggcagagaccattccggaacatggatctgcgccggcggctcccaggagaccttccatctcggagctcctgtggagaccacgtgcctggcaggcatgtcgggccccaggcctgtggtgctgagcgggccttcgggagctgggaagagcaccctgctgaagaggctgctccaggagcacagcggcatctttggcttcagcgtgtcccgtgagtccagggctctcgtggagggataccacgaggaacccgaggcccggcgaggagaacggcaaagattactactttgtaaccagggaggtgatgcagcgtgacatagcagccggcgacttcatcgagcatgccgagttctcggggaacctgtatggcacgagcaaggtggcggtgcaggccgtgcaggccatgaaccgcatctgtgtgctggacgtggacctgcagggtgtgcggaacatcaaggccaccgatctgcggcccatctacatctctgtgcagccgccttcactgcacgtgctggagcagcggctgcggcagcgcaacactgaaaccgaggagagcctggtgaagcggctggctgctgcccaggccgacatggagagcagaaatcaagaaagctcaaaggaccggcgcctgaggcttgctgtctgttctcggcaccccgggcccatacaggaccagggcagcagcattgagccacccccttggcaggcgatacggcagctctgtgcccttggccagcatgtggagtggaggagatgctgcccctgtggttggaacatcctggggtgacccccgacccagcctcgctgggctgtcccctgtccctatctctcactctggacccagggctgacatcctaataaaataactgttggattagaaacaaaaaaaaaaaaaaaaaaagngggggcg

SEQ ID NO: 68828 - DNA, 1708 bp, Homo sapiens
  misc_feature (1701)..(1701): n is a, c, g, or t
cacaaaaaagtttttaaattttttggtacagaaggggtttccctatgatccccaggctggtctccaattcctggcctcaagcggtcctcccggctcggactcccaaagagctgggatcacagacgtgaaccacgcgcccggccacattccccaattaatggtttttggagagtggccggtttggaacgggctagcggagtcgttcgttagttaggtccctgcagtgtagatggaggacggaaacggcgctgtgacataagcgggaggaggcgggctgaggcagcgctgtgacgtagcagatgaaagccgggcccgcgctgcactgaggtacttctctgagtgacaagcgggacaagtacgccgtgggcggggccggcgggtcgtgatgttagttcgcgctgtgtggaggcgggccggcgtggcgctgtgacgcagcgggagaagacgggctgggagggcgctgtgctgaacgcccctgcggtcgcgacaggccagcgcaggtggaggcggggctagcgaggcactgaggtaagtacttccctaaggggcggggaagaacgagtgagacatgggcggggcagtcgcctcatgacgtcagtctcgcgcgcgggcggaggtgggccggtgcggcgctgtcacgtaggttcagtgggcggaagaggtggccccggatgctgcggcgcccgctggccgggctggctgcggccgccctgggccgggccccaccggacgcctctcttctcacccccaggcatgtcgggccccaggcctgtggtgctgagcgggccttcgggagctgggaagagcaccctgctgaagaggctgctccaggagcacagcggcatctttggcttcagcgtgtcccataccacgaggaacccgaggcccggcgaggagaacggcaaagattactactttgtaaccagggaggtgatgcagcgtgacatagcagccggcgacttcatcgagcatgccgagttctcggggaacctgtatggcacgagcaaggtggcggtgcaggccgtgcaggccatgaaccgcatctgtgtgctggacgtggacctgcagggtgtgcggaacatcaaggccaccgatctgcggcccatctacatctctgtgcagccgccttcactgcacgtgctggagcagcggctgcggcagcgcaacactgaaaccgaggagagcctggtgaagcggctggctgctgcccaggccgacatggagagcagcaaggagcccggcctgtttgatgtggtcatcattaacgacagcctggaccaggcctacgcagagctgaaggaggcgctctctgaggtgggcccatccttgtgcctacctgggcaaggcccaaggggaggcctgggggccaggcctttgttgtccatgaggccactgaggaaatcaagaaagctcaaaggaccggcgcctgaggcttgctgtctgttctcggcaccccgggcccatacaggaccagggcagcagcattgagccacccccttggcaggcgatacggcagctctgtgcccttggccagcatgtggagtggaggagatgctgcccctgtggttggaacatcctggggtgacccccgacccagcctcgctgggctgtcccctgtccctatctctcactctggacccagggctgacatcctaataaaataactgttggattagaaacaaaaaaaaaaaaaaaaaaagngggggcg

SEQ ID NO: 68829 - DNA, 3208 bp, Homo sapiens
cacaaaaaagtttttaaattttttggtacagaaggggtttccctatgatccccaggctggtctccaattcctggcctcaagcggtcctcccggctcggactcccaaagagctgggatcacagacgtgaaccacgcgcccggccacattccccaattaatggtttttggagagtggccggtttggaacgggctagcggagtcgttcgttagttaggtccctgcagtgtagatggaggacggaaacggcgctgtgacataagcgggaggaggcgggctgaggcagcgctgtgacgtagcagatgaaagccgggcccgcgctgcactgaggtacttctctgagtgacaagcgggacaagtacgccgtgggcggggccggcgggtcgtgatgttagttcgcgctgtgtggaggcgggccggcgtggcgctgtgacgcagcgggagaagacgggctgggagggcgctgtgctgaacgcccctgcggtcgcgacaggccagcgcaggtggaggcggggctagcgaggcactgaggtaagtacttccctaaggggcggggaagaacgagtgagacatgggcggggcagtcgcctcatgacgtcagtctcgcgcgcgggcggaggtgggccggtgcggcgctgtcacgtaggttcagtgggcggaagaggtggccccggatgctgcggcgcccgctggccgggctggctgcggccgccctgggccgggccccaccggacggtgagtacgacaagcgcgatcgcgagggtgactcgggtcgaggcggcagcggtccctgcgctttgcggtcgcccagtccacgccgcctccggatctcctcctagccgagacgccctgtgccgcattcaactgtgggccctgagaacgggggagctctggagggcggacgggctggcaacgcagcggagcccgggtcccggagggcggggcgctcctcaggagctgggcaggccggcagttatcgcagtgtcgagctgctccccgggcgtataggagcgctcggtgtcttcccgacacctgggcgcgccgccaaagagagcagctgggagtccctaccgctggcccggcgcggtgtgcgctccggttcccacctcaccctgcaagccttggggtcctgggcggatggagccggctattccggggctcccaggattctgcctactccgcggcacggcgcagagacggggacttggggaaacagcaggccttcccgacgcatgggtgtggcatttggggttcggattctccaaagccagagtccgggttggggttcttgaagctgccctgctgccattcttgagcgtcgccttagaagtatgccccagtaaggactggtgtgggaagcaggtgcctcaaagttgattttgaccctgcgtgtggtgggcctcggtttcgtctttgcatgaaagaggtcggtcctgaggccccgggctgggtcctgctctgctgtctttgggctcatggccccttcctgtctcaggcttgctctgctctttacctggggttgctgtcgaggaccctgtgcaagactcggccggtttttctttctccctgatggacagacccaaacatagccgcgcagcatcgtgaagggctggggccttcactcctctgtggctctggaagagcccgatttcctcaggaggtaaaggaatgttcctgtcccccccggggaaagaaagtgaaaatgaaagcgccctggctgctcctggtgtggtcccatttaaaacgaggttgctgaaggccaggatgcgtgctacccggatgtgtgcccagaaaccctgcagccaagagcagccgcctggaccaccagcctccccttcatccacctggcccagcccagagcccaggcccacgtctggtggtttgtgtcttacgagaggccaggcgggggctgaattctctcggttctcagaaggtcaagccctctgttagcatctcctcgaacagtgggccgggggcaaggtggtgactctgttcagtccttaggatggctggaagccagaaggaggagattatgccgccacagcagggagtgcctttccaggaaagcggctgctggggcagcatgggagcccagtccagggagcgttctggcagagaccattccggaacatggatctgcgccggcggctcccaggagaccttccatctcggagctcctgtggagaccacgtgcctggcaggcatgtcgggccccaggcctgtggtgctgagcgggccttcgggagctgggaagagcaccctgctgaagaggctgctccaggagcacagcggcatctttggcttcagcgtgtcccgtgagtccagggctctcgtggaggggtgcgtagacctcaaggctgctgagtagtcctagcaccgtgagcaggccaggagcccaaacccaacaggcacacccaccctgcagactgtccgaactcttgcacactcccccccacacagaacctgaggttatcacactcctgctgtcctgcgtgcctgtgtctcccttccctgggtctgttgagtactgataactgggccacagtgtttctttctgggagaaccctcgccttgtaggctcctgcgccttcccagtggtgtgcttcactggctgcctgcatcctggggctcaagtgctgtcgggactgcaagggaaacgctgggtggggcattgggctccgagcagcccccgatgggtgacaggtctctctgctagataccacgaggaacccgaggcccggcgaggagaacggcaaaggtgagtggggtggggccctatggctggagcacccccagtgtgggcagggctgctgggccctgcagctgtgttggctgtgctgcccgtctcctgcccccatcaatccctaatctgtgagatgggtccttgcctccaagggccggtgaactcaatcagggtgtcagcgccacagcgtggtgtcgccttccttgggtacagtgtgagaggccggccaaggcctggggctgtcttcctcccaccttggaggcggccacagtgctgctgtccccagccctgtcctggactcggcacttatcagcacttttgagctgtcttctggagtcctggtaaaaagggctactctgcctgcctgattcaagacaagggacccccttcccaacagcacccccgccccttgccgtgcaacccagtggtctccagtcaccccaccacatcgtcccctctgtaacctga

SEQ ID NO: 68830 - DNA, 2266 bp, Homo sapiens
cacaaaaaagtttttaaattttttggtacagaaggggtttccctatgatccccaggctggtctccaattcctggcctcaagcggtcctcccggctcggactcccaaagagctgggatcacagacgtgaaccacgcgcccggccacattccccaattaatggtttttggagagtggccggtttggaacgggctagcggagtcgttcgttagttaggtccctgcagtgtagatggaggacggaaacggcgctgtgacataagcgggaggaggcgggctgaggcagcgctgtgacgtagcagatgaaagccgggcccgcgctgcactgaggtacttctctgagtgacaagcgggacaagtacgccgtgggcggggccggcgggtcgtgatgttagttcgcgctgtgtggaggcgggccggcgtggcgctgtgacgcagcgggagaagacgggctgggagggcgctgtgctgaacgcccctgcggtcgcgacaggccagcgcaggtggaggcggggctagcgaggcactgaggtaagtacttccctaaggggcggggaagaacgagtgagacatgggcggggcagtcgcctcatgacgtcagtctcgcgcgcgggcggaggtgggccggtgcggcgctgtcacgtaggttcagtgggcggaagaggtggccccggatgctgcggcgcccgctggccgggctggctgcggccgccctgggccgggccccaccggacggtgagtacgacaagcgcgatcgcgagggtgactcgggtcgaggcggcagcggtccctgcgctttgcggtcgcccagtccacgccgcctccggatctcctcctagccgagacgccctgtgccgcattcaactgtgggccctgagaacgggggagctctggagggcggacgggctggcaacgcagcggagcccgggtcccggagggcggggcgctcctcaggagctgggcaggccggcagttatcgcagtgtcgagctgctccccgggcgtataggagcgctcggtgtcttcccgacacctgggcgcgccgccaaagagagcagctgggagtccctaccgctggcccggcgcggtgtgcgctccggttcccacctcaccctgcaagccttggggtcctgggcggatggagccggctattccggggctcccaggattctgcctactccgcggcacggcgcagagacggggacttggggaaacagcaggccttcccgacgcatgggtgtggcatttggggttcggattctccaaagccagagtccgggttggggttcttgaagctgccctgctgccattcttgagcgtcgccttagaagtatgccccagtaaggactggtgtgggaagcaggtgcctcaaagttgattttgaccctgcgtgtggtgggcctcggtttcgtctttgcatgaaagaggtcggtcctgaggccccgggctgggtcctgctctgctgtctttgggctcatggccccttcctgtctcaggcttgctctgctctttacctggggttgctgtcgaggaccctgtgcaagactcggccggtttttctttctccctgatggacagacccaaacatagccgcgcagcatcgtgaagggctggggccttcactcctctgtggctctggaagagcccgatttcctcaggaggcatgtcgggccccaggcctgtggtgctgagcgggccttcgggagctgggaagagcaccctgctgaagaggctgctccaggagcacagcggcatctttggcttcagcgtgtcccataccacgaggaacccgaggcccggcgaggagaacggcaaaggtgagtggggtggggccctatggctggagcacccccagtgtgggcagggctgctgggccctgcagctgtgttggctgtgctgcccgtctcctgcccccatcaatccctaatctgtgagatgggtccttgcctccaagggccggtgaactcaatcagggtgtcagcgccacagcgtggtgtcgccttccttgggtacagtgtgagaggccggccaaggcctggggctgtcttcctcccaccttggaggcggccacagtgctgctgtccccagccctgtcctggactcggcacttatcagcacttttgagctgtcttctggagtcctggtaaaaagggctactctgcctgcctgattcaagacaagggacccccttcccaacagcacccccgccccttgccgtgcaacccagtggtctccagtcaccccaccacatcgtcccctctgtaacctga

SEQ ID NO: 68831 - DNA, 1599 bp, Homo sapiens
cacaaaaaagtttttaaattttttggtacagaaggggtttccctatgatccccaggctggtctccaattcctggcctcaagcggtcctcccggctcggactcccaaagagctgggatcacagacgtgaaccacgcgcccggccacattccccaattaatggtttttggagagtggccggtttggaacgggctagcggagtcgttcgttagttaggtccctgcagtgtagatggaggacggaaacggcgctgtgacataagcgggaggaggcgggctgaggcagcgctgtgacgtagcagatgaaagccgggcccgcgctgcactgaggtacttctctgagtgacaagcgggacaagtacgccgtgggcggggccggcgggtcgtgatgttagttcgcgctgtgtggaggcgggccggcgtggcgctgtgacgcagcgggagaagacgggctgggagggcgctgtgctgaacgcccctgcggtcgcgacaggccagcgcaggtggaggcggggctagcgaggcactgaggtaagtacttccctaaggggcggggaagaacgagtgagacatgggcggggcagtcgcctcatgacgtcagtctcgcgcgcgggcggaggtgggccggtgcggcgctgtcacgtaggttcagtgggcggaagaggtggccccggatgctgcggcgcccgctggccgggctggctgcggccgccctgggccgggccccaccggacggcatgtcgggccccaggcctgtggtgctgagcgggccttcgggagctgggaagagcaccctgctgaagaggctgctccaggagcacagcggcatctttggcttcagcgtgtcccataccacgaggaacccgaggcccggcgaggagaacggcaaagattactactttgtaaccagggaggtgatgcagcgtgacatagcagccggcgacttcatcgagcatgccgagttctcggggaacctgtatggcacgagcaaggtggcggtgcaggccgtgcaggccatgaaccgcatctgtgtgctggacgtggacctgcagggtgtgcggaacatcaaggccaccgatctgcggcccatctacatctctgtgcagccgccttcactgcacgtgctggagcagcggctgcggcagcgcaacactgaaaccgaggagagcctggtgaagcggctggctgctgcccaggccgacatggagagcagcaaggagcccggcctgtttgatgtggtcatcattaacgacagcctggaccaggcctacgcagagctgaaggaggcgctctctgaggaaatcaagaaagctcaaaggaccggcgcctgaggcttgctgtctgttctcggcaccccgggcccatacaggaccagggcagcagcattgagccacccccttggcaggcgatacggcagctctgtgcccttggccagcatgtggagtggaggagatgctgcccctgtggttggaacatcctggggtgacccccgacccagcctcgctgggctgtcccctgtccctatctctcactctggacccagggctgacatcctaataaaataactgttggattagaaactccaaaaaaaatggaatgtgg

SEQ ID NO: 68832 - DNA, 1606 bp, Homo sapiens
  misc_feature (1599)..(1599): n is a, c, g, or t
cacaaaaaagtttttaaattttttggtacagaaggggtttccctatgatccccaggctggtctccaattcctggcctcaagcggtcctcccggctcggactcccaaagagctgggatcacagacgtgaaccacgcgcccggccacattccccaattaatggtttttggagagtggccggtttggaacgggctagcggagtcgttcgttagttaggtccctgcagtgtagatggaggacggaaacggcgctgtgacataagcgggaggaggcgggctgaggcagcgctgtgacgtagcagatgaaagccgggcccgcgctgcactgaggtacttctctgagtgacaagcgggacaagtacgccgtgggcggggccggcgggtcgtgatgttagttcgcgctgtgtggaggcgggccggcgtggcgctgtgacgcagcgggagaagacgggctgggagggcgctgtgctgaacgcccctgcggtcgcgacaggccagcgcaggtggaggcggggctagcgaggcactgaggtaagtacttccctaaggggcggggaagaacgagtgagacatgggcggggcagtcgcctcatgacgtcagtctcgcgcgcgggcggaggtgggccggtgcggcgctgtcacgtaggttcagtgggcggaagaggtggccccggatgctgcggcgcccgctggccgggctggctgcggccgccctgggccgggccccaccggacggcatgtcgggccccaggcctgtggtgctgagcgggccttcgggagctgggaagagcaccctgctgaagaggctgctccaggagcacagcggcatctttggcttcagcgtgtcccataccacgaggaacccgaggcccggcgaggagaacggcaaagattactactttgtaaccagggaggtgatgcagcgtgacatagcagccggcgacttcatcgagcatgccgagttctcggggaacctgtatggcacgagcaaggtggcggtgcaggccgtgcaggccatgaaccgcatctgtgtgctggacgtggacctgcagggtgtgcggaacatcaaggccaccgatctgcggcccatctacatctctgtgcagccgccttcactgcacgtgctggagcagcggctgcggcagcgcaacactgaaaccgaggagagcctggtgaagcggctggctgctgcccaggccgacatggagagcagcaaggagcccggcctgtttgatgtggtcatcattaacgacagcctggaccaggcctacgcagagctgaaggaggcgctctctgaggaaatcaagaaagctcaaaggaccggcgcctgaggcttgctgtctgttctcggcaccccgggcccatacaggaccagggcagcagcattgagccacccccttggcaggcgatacggcagctctgtgcccttggccagcatgtggagtggaggagatgctgcccctgtggttggaacatcctggggtgacccccgacccagcctcgctgggctgtcccctgtccctatctctcactctggacccagggctgacatcctaataaaataactgttggattagaaacaaaaaaaaaaaaaaaaaaagngggggcg

SEQ ID NO: 68833 - DNA, 1540 bp, Homo sapiens
cacaaaaaagtttttaaattttttggtacagaaggggtttccctatgatccccaggctggtctccaattcctggcctcaagcggtcctcccggctcggactcccaaagagctgggatcacagacgtgaaccacgcgcccggccacattccccaattaatggtttttggagagtggccggtttggaacgggctagcggagtcgttcgttagttaggtccctgcagtgtagatggaggacggaaacggcgctgtgacataagcgggaggaggcgggctgaggcagcgctgtgacgtagcagatgaaagccgggcccgcgctgcactgaggtacttctctgagtgacaagcgggacaagtacgccgtgggcggggccggcgggtcgtgatgttagttcgcgctgtgtggaggcgggccggcgtggcgctgtgacgcagcgggagaagacgggctgggagggcgctgtgctgaacgcccctgcggtcgcgacaggccagcgcaggtggaggcggggctagcgaggcactgaggtaagtacttccctaaggggcggggaagaacgagtgagacatgggcggggcagtcgcctcatgacgtcagtctcgcgcgcgggcggaggtgggccggtgcggcgctgtcacgtaggttcagtgggcggaagaggtggccccggatgctgcggcgcccgctggccgggctggctgcggccgccctgggccgggccccaccggacggcatgtcgggccccaggcctgtggtgctgagcgggccttcgggagctgggaagagcaccctgctgaagaggctgctccaggagcacagcggcatctttggcttcagcgtgtcccataccacgaggaacccgaggcccggcgaggagaacggcaaagattactactttgtaaccagggaggtgatgcagcgtgacatagcagccggcgacttcatcgagcatgccgagttctcggggaacctgtatggcacgagcaaggtggcggtgcaggccgtgcaggccatgaaccgcatctgtgtgctggacgtggacctgcagggtgtgcggaacatcaaggccaccgatctgcggcccatctacatctctgtgcagccgccttcactgcacgtgctggagcagcggctgcggcagcgcaacactgaaaccgaggagagcctggtgaagcggctggctgctgcccaggccgacatggagagcagaaatcaagaaagctcaaaggaccggcgcctgaggcttgctgtctgttctcggcaccccgggcccatacaggaccagggcagcagcattgagccacccccttggcaggcgatacggcagctctgtgcccttggccagcatgtggagtggaggagatgctgcccctgtggttggaacatcctggggtgacccccgacccagcctcgctgggctgtcccctgtccctatctctcactctggacccagggctgacatcctaataaaataactgttggattagaaaccacacacacaaaaaagagacacaacaaccaacatacagaaacaaacaa

SEQ ID NO: 68834 - DNA, 427 bp, Homo sapiens
tcaccaccaactcccaactccccactggaacccagcagtctcgtatctccatcagtgaggacagtgtgagaaatggtgtctggctcaggcacttggcagcacttgaggggtcctcagatgtctcctgcccagcaaggatctgactaaagcagtcgtgggtgtgggaggggcctgcaggcatgcctgggttgggggcagctggccctgggcaccctggtgcaggtccagtctgccctctggatggcccctcctcttccccagattaattactactttgtaaccagggaggtgatgcagcgtgacatagcagccggcgacttcatcgagcatgccgagttctcggggaacctgtatggcacgaggtgggccatgcgtgggtgtgggtgggctcccagggttgctgttggcaacagggatccaggtagtg

SEQ ID NO: 68835 - DNA, 1764 bp, Homo sapiens
cacaaaaaagtttttaaattttttggtacagaaggggtttccctatgatccccaggctggtctccaattcctggcctcaagcggtcctcccggctcggactcccaaagagctgggatcacagacgtgaaccacgcgcccggccacattccccaattaatggtttttggagagtggccggtttggaacgggctagcggagtcgttcgttagttaggtccctgcagtgtagatggaggacggaaacggcgctgtgacataagcgggaggaggcgggctgaggcagcgctgtgacgtagcagatgaaagccgggcccgcgctgcactgaggtacttctctgagtgacaagcgggacaagtacgccgtgggcggggccggcgggtcgtgatgttagttcgcgctgtgtggaggcgggccggcgtggcgctgtgacgcagcgggagaagacgggctgggagggcgctgtgctgaacgcccctgcggtcgcgacaggccagcgcaggtggaggcggggctagcgaggcactgaggtaagtacttccctaaggggcggggaagaacgagtgagacatgggcggggcagtcgcctcatgacgtcagtctcgcgcgcgggcggaggtgggccggtgcggcgctgtcacgtaggttcagtgggcggaagaggtggccccggatgctgcggcgcccgctggccgggctggctgcggccgccctgggccgggccccaccggacggcttgctctgctctttacctggggttgctgtcgaggaccctgtgcaagactcggccggtttttctttctccctgatggacagacccaaacatagccgcgcagcatcgtgaagggctggggccttcactcctctgtggctctggaagagcccgatttcctcaggaggcatgtcgggccccaggcctgtggtgctgagcgggccttcgggagctgggaagagcaccctgctgaagaggctgctccaggagcacagcggcatctttggcttcagcgtgtcccataccacgaggaacccgaggcccggcgaggagaacggcaaagattactactttgtaaccagggaggtgatgcagcgtgacatagcagccggcgacttcatcgagcatgccgagttctcggggaacctgtatggcacgagcaaggtggcggtgcaggccgtgcaggccatgaaccgcatctgtgtgctggacgtggacctgcagggtgtgcggaacatcaaggccaccgatctgcggcccatctacatctctgtgcagccgccttcactgcacgtgctggagcagcggctgcggcagcgcaacactgaaaccgaggagagcctggtgaagcggctggctgctgcccaggccgacatggagagcagcaaggagcccggcctgtttgatgtggtcatcattaacgacagcctggaccaggcctacgcagagctgaaggaggcgctctctgaggaaatcaagaaagctcaaaggaccggcgcctgaggcttgctgtctgttctcggcaccccgggcccatacaggaccagggcagcagcattgagccacccccttggcaggcgatacggcagctctgtgcccttggccagcatgtggagtggaggagatgctgcccctgtggttggaacatcctggggtgacccccgacccagcctcgctgggctgtcccctgtccctatctctcactctggacccagggctgacatcctaataaaataactgttggattagaaactccaaaaaaaatggaatgtgg

SEQ ID NO: 68836 - DNA, 1068 bp, Homo sapiens
ggctaagtgggtaacagcccagcatcagggtcactgtggcaacagcaggctctaggggaatcctgtggttatgtagagactccatgtcctggtgtgatgagcaggatcagagtgactctgggaggacaggggtggggacccagagttagcagtggggatggagcagtagaaggaatcactgtttctcctaggagtctgaaggcctcgctgctttctgtgatggctttgcagtaagtgccgcctggcctgcatgcattggctaacaggctgcagaatggcaggaaggactcgctagagattgtcatggccagagatcataggtcacttcaggtagcaagacccctggcaaactgggcacttggcctatgtactgatttgtgggatggtggcaggggtgtggggtccttcaccctgcctgaattctctttggcttctgtgctctgtatgctgctgtccccaagagctctttcttattatggcagggagtggggattggtcctactttctttctctggaaaggaaagcctccaagactccatgtgcttgggcagcttgagaaggcgttcagcaccacgcctagcaggcagaccttgaagcctcacctttagtctatctgcagaggtattcagttcctggcacaggggactaggggcatgtagagtatatgaggaggcagtatggctgtgcaggagccttcatttcagcttcaattaatagggaagaatttatgatagctctatagatgctgaaaaggtatttcgtaagatttaaaatccatcccttattaaaactcttagtaaattaagtctggaaagaaacaccctaatctagataaaggtctgtttcagaaaccaacagtgatggcattctaaagagtcagacgccacaggcattcccattaaagtcagaaactagccaagggcaagctattattcagcagtgtcccggcactactaacccctgcaacaagccagatgaggaacataaggaagaattataattgtcattatttgtagacaataaaactgcctacctgtaaaacctaagaatcaaaaaaacctgttaaga

SEQ ID NO: 68837 - DNA, 995 bp, Homo sapiens
ggctaagtgggtaacagcccagcatcagggtcactgtggcaacagcaggctctaggggaatcctgtggttatgtagagactccatgtcctggtgtgatgagcaggatcagagtgactctgggaggacaggggtggggacccagagttagcagtggggatggagcagtagaaggaatcactgtttctcctaggagtctgaaggcctcgctgctttctgtgatggctttgcagtaagtgccgcctggcctgcatgcattggctaacaggctgcagaatggcaggaaggactcgctagagattgtcatggccagagatcataggtcacttcaggtagcaagacccctggcaaactgggcacttggcctatgtactgatttgtgggatggtggcaggggtgtggggtccttcaccctgcctgaattctctttggcttctgtgctctgtatgctgctgtccccaagagctctttcttattatggcagggagtggggattggtcctactttctttctctggaaaggaaagcctccaagactccatgtgcttgggcagcttgagaaggcgttcagcaccacgcctagcaggcagaccttgaagcctcacctttagtctatctgcagaggtattcagttcctggcacaggggactaggggcatgtagagtatatgaggaggcagtatggctgtgcaggagccttcatttcagcttcaattaatagggaagaatttatgatagctctatagatgctgaaaaggtatttcgtaagatttaaaatccatcccttattaaaactcttagtaaattaagtctggaaagaaacaccctaatctagataaaggtctgtttcagaaaccaacagtgatggcattctaaagagtcagacgccacaggcattcccattaaagtcagaaactagccaagggcaagctattattcagcagtgtcccggcactactaaccccttgtccagagcttgagatccggtagagtcgaccg

SEQ ID NO: 68838 - DNA, 1008 bp, Homo sapiens
ggctaagtgggtaacagcccagcatcagggtcactgtggcaacagcaggctctaggggaatcctgtggttatgtagagactccatgtcctggtgtgatgagcaggatcagagtgactctgggaggacaggggtggggacccagagttagcagtggggatggagcagtagaaggaatcactgtttctcctaggagtctgaaggcctcgctgctttctgtgatggctttgcagtaagtgccgcctggcctgcatgcattggctaacaggctgcagaatggcaggaaggactcgctagagattgtcatggccagagatcataggtcacttcaggtagcaagacccctggcaaactgggcacttggcctatgtactgatttgtgggatggtggcaggggtgtggggtccttcaccctgcctgaattctctttggcttctgtgctctgtatgctgctgtccccaagagctctttcttattatggcagggagtggggattggtcctactttctttctctggaaaggaaagcctccaagactccatgtgcttgggcagcttgagaaggcgttcagcaccacgcctagcaggcagaccttgaagcctcacctttagtctatctgcagaggtattcagttcctggcacaggggactaggggcatgtagagtatatgaggaggcagtatggctgtgcaggagccttcatttcagcttcaattaatagggaagaatttatgatagctctatagatgctgaaaaggtatttcgtaagatttaaaatccatcccttattaaaactcttagtaaattaagtctggaaagaaacaccctaatctagataaaggtctgtttcagaaactagccaagggcaagctattattcagcagtgtcccggcactactaacccctgcaacaagccagatgaggaacataaggaagaattataattgtcattatttgtagacaataaaactgcctacctgtaaaacctaagaatcaaaaaaacctgttaaga

SEQ ID NO: 68839 - DNA, 2769 bp, Homo sapiens
cagttcacctggcagatgctcactgtgtcggaggagctgccgtttgacaacgtggatggtggtgtgtggaggcaaggcttcgacatctcctacgacccgcacgactgggatgctgaagacctgcaggtgtttgtggtgccccactctcacaatgacccaggctggatcaagacctttgacaagtactacacagagcagacccaacacatcctcaatagcatggtgtctaagctgcaggaggacccccggcggcgcttcctctgggcagaggtctccttcttcgccaagtggtgggacaacatcaatgtccaaaagagagcggcagtccgaaggctggtgggaaacgggcagctggagattgcgacaggaggctgggtgatgccagatgaggccaattcccactactttgcattgattgaccagctcatcgaaggacaccagtggctggagagaaatcttggtgcaaccccccgctctggctgggcagtggacccctttggatacagctccaccatgccttacctgctgcgccgtgccaacctcaccagcatgctgattcagagagtgcactatgccatcaagaagcactttgctgccacccacagcctagagttcatgtggaggcagacatgggccctaggtccagttacagcctcgcggtctatcagggctgcctttagcctgaacagatccttgcccccctggcgtccagaggctgcctgctggtggtgaccacgtggtgtgtctcctgcagactcggactccagcacagacatcttctgtcacatgatgcccttctacagctatgacgtcccccatacctgtggcccagatcccaagatctgctgccaatttgatttcaaacgcctgcctggtgggcgcatcaactgcccttggaaggtgccaccccgggccatcacagaggccaacgtggcagagagggcagccctgcttctggaccaataccggaagaagtcccggctgttccgaagcaacgtcctcctggtgcctcttggagatgacttccgatatgacaagccccaggagtgggatgcccagttcttcaactaccaacggctctttgacttcttcaacagcaggcctaacctccatgtgcaggcccagtttggcactctttctgactattttgatgccctgtacaagaggacaggggtggagccaggggcccggcctccagggtttcctgtgctgagcggggatttcttctcctatgcggaccgggaggatcattactggacaggctattacacttcccggcccttctacaagagcttagaccgagtcctggaagcccacctgcggggggcagaggttctgtacagcctggctgcagctcacgctcgccgctctggtctggctggccggtacccactgtctgatttcaccctcctgacggaagctcggcgcacattggggctcttccagcatcacgatgccatcactggcacggccaaggaggctgtggtggtggactatggggtcaggcttctgcgctcccttgtcaacctgaagcaggtcatcattcatgcagcccactatctggtgctgggggacaaggagacctaccactttgaccctgaggcgcccttcctccaagtggatgacactcgcttaagtcacgacgccctcccagagcgcacggtgatccagctggattcctcgcccaggtttgtggtcctattcaacccactggaacaggagcgattcagcatggtgtccctgctggtcaactctccccgcgtgcgtgtcctttcggaggagggtcagcccctggccgtgcagatcagcgcacactggagctctgccaccgaggcggtccctgacgtctaccaggtgtctgtgcctgtccgcctgccagccctgggcctgggcgtgctgcagctacagctgggcctggatgggcaccgcacgctgccctcctctgtgcgcatctacctgcacggccggcagctgtccgtcagcaggcacgaagcgtttcctctccgtgtcattgactctggcaccagcgacttcgccctcagcaaccgctacatgcaggtctggttctcaggccttactgggctcctcaagagcatccgaagggtggatgaggagcacgagcagcaggtggacatgcaggtccttgtctatggcacccgtacgtccaaagacaagagtggagcctacctcttcctgcccgatggcgaggccaagccctacgtccccaaggagccccccgtgctgcgtgtcactgaaggccctttcttctcagaggtggttgcgtactatgagcacattcaccaggcggtccggctttacaatctgccaggggtggaggggctgtctctggacatatcatccctggtggacatccgggactacgtcaacaaggaccttcatttcagcttcaattaatagggaagaatttatgatagctctatagatgctgaaaaggtatttcgtaagatttaaaatccatcccttattaaaactcttagtaaattaagtctggaaagaaacaccctaatctagataaaggtctgtttcagaaaccaacagtgatggcattctaaagagtcagacgccacaggcattcccattaaagtcagaaactagccaagggcaagctattattcagcagtgtcccggcactactaacccctgcaacaagccagatgaggaacataaggaagaattataattgtcattatttgtagacaataaaactgcctacctgtaaaacctaagaatcaaaaaaacctgttaaga

SEQ ID NO: 68840 - DNA, 2649 bp, Homo sapiens
cagttcacctggcagatgctcactgtgtcggaggagctgccgtttgacaacgtggatggtggtgtgtggaggcaaggcttcgacatctcctacgacccgcacgactgggatgctgaagacctgcaggtgtttgtggtgccccactctcacaatgacccaggctggatcaagacctttgacaagtactacacagagcagacccaacacatcctcaatagcatggtgtctaagctgcaggaggacccccggcggcgcttcctctgggcagaggtctccttcttcgccaagtggtgggacaacatcaatgtccaaaagagagcggcagtccgaaggctggtgggaaacgggcagctggagattgcgacaggaggctgggtgatgccagatgaggccaattcccactactttgcattgattgaccagctcatcgaaggacaccagtggctggagagaaatcttggtgcaaccccccgctctggctgggcagtggacccctttggatacagctccaccatgccttacctgctgcgccgtgccaacctcaccagcatgctgattcagagagtgcactatgccatcaagaagcactttgctgccacccacagcctagagttcatgtggaggcagacatgggactcggactccagcacagacatcttctgtcacatgatgcccttctacagctatgacgtcccccatacctgtggcccagatcccaagatctgctgccaatttgatttcaaacgcctgcctggtgggcgcatcaactgcccttggaaggtgccaccccgggccatcacagaggccaacgtggcagagagggcagccctgcttctggaccaataccggaagaagtcccggctgttccgaagcaacgtcctcctggtgcctcttggagatgacttccgatatgacaagccccaggagtgggatgcccagttcttcaactaccaacggctctttgacttcttcaacagcaggcctaacctccatgtgcaggcccagtttggcactctttctgactattttgatgccctgtacaagaggacaggggtggagccaggggcccggcctccagggtttcctgtgctgagcggggatttcttctcctatgcggaccgggaggatcattactggacaggctattacacttcccggcccttctacaagagcttagaccgagtcctggaagcccacctgcggggggcagaggttctgtacagcctggctgcagctcacgctcgccgctctggtctggctggccggtacccactgtctgatttcaccctcctgacggaagctcggcgcacattggggctcttccagcatcacgatgccatcactggcacggccaaggaggctgtggtggtggactatggggtcaggcttctgcgctcccttgtcaacctgaagcaggtcatcattcatgcagcccactatctggtgctgggggacaaggagacctaccactttgaccctgaggcgcccttcctccaagtggatgacactcgcttaagtcacgacgccctcccagagcgcacggtgatccagctggattcctcgcccaggtttgtggtcctattcaacccactggaacaggagcgattcagcatggtgtccctgctggtcaactctccccgcgtgcgtgtcctttcggaggagggtcagcccctggccgtgcagatcagcgcacactggagctctgccaccgaggcggtccctgacgtctaccaggtgtctgtgcctgtccgcctgccagccctgggcctgggcgtgctgcagctacagctgggcctggatgggcaccgcacgctgccctcctctgtgcgcatctacctgcacggccggcagctgtccgtcagcaggcacgaagcgtttcctctccgtgtcattgactctggcaccagcgacttcgccctcagcaaccgctacatgcaggtctggttctcaggccttactgggctcctcaagagcatccgaagggtggatgaggagcacgagcagcaggtggacatgcaggtccttgtctatggcacccgtacgtccaaagacaagagtggagcctacctcttcctgcccgatggcgaggccaagccctacgtccccaaggagccccccgtgctgcgtgtcactgaaggccctttcttctcagaggtggttgcgtactatgagcacattcaccaggcggtccggctttacaatctgccaggggtggaggggctgtctctggacatatcatccctggtggacatccgggactacgtcaacaaggaccttcatttcagcttcaattaatagggaagaatttatgatagctctatagatgctgaaaaggtatttcgtaagatttaaaatccatcccttattaaaactcttagtaaattaagtctggaaagaaacaccctaatctagataaaggtctgtttcagaaaccaacagtgatggcattctaaagagtcagacgccacaggcattcccattaaagtcagaaactagccaagggcaagctattattcagcagtgtcccggcactactaacccctgcaacaagccagatgaggaacataaggaagaattataattgtcattatttgtagacaataaaactgcctacctgtaaaacctaagaatcaaaaaaacctgttaaga

SEQ ID NO: 68841 - DNA, 3444 bp, Homo sapiens
cagttcacctggcagatgctcactgtgtcggaggagctgccgtttgacaacgtggatggtggtgtgtggaggcaaggcttcgacatctcctacgacccgcacgactgggatgctgaagacctgcaggtgtttgtggtgccccactctcacaatgacccaggctggatcaagacctttgacaagtactacacagagcagacccaacacatcctcaatagcatggtgtctaagctgcaggaggacccccggcggcgcttcctctgggcagaggtctccttcttcgccaagtggtgggacaacatcaatgtccaaaagagagcggcagtccgaaggctggtgggaaacgggcagctggagattgcgacaggaggctgggtgatgccagatgaggccaattcccactactttgcattgattgaccagctcatcgaaggacaccagtggctggagagaaatcttggtgcaaccccccgctctggctgggcagtggacccctttggatacagctccaccatgccttacctgctgcgccgtgccaacctcaccagcatgctgattcagagagtgcactatgccatcaagaagcactttgctgccacccacagcctagagttcatgtggaggcagacatgggccctaggtccagttacagcctcgcggtctatcagggctgcctttagcctgaacagatccttgcccccctggcgtccagaggctgcctgctggtggtgaccacgtggtgtgtctcctgcagactcggactccagcacagacatcttctgtcacatgatgcccttctacagctatgacgtcccccatacctgtggcccagatcccaagatctgctgccaatttgatttcaaacgcctgcctggtgggcgcatcaactgcccttggaaggtgccaccccgggccatcacagaggccaacgtggcagagagggcagccctgcttctggaccaataccggaagaagtcccggctgttccgaagcaacgtcctcctggtgcctcttggagatgacttccgatatgacaagccccaggagtgggatgcccagttcttcaactaccaacggctctttgacttcttcaacagcaggcctaacctccatgtgcaggcccagtttggcactctttctgactattttgatgccctgtacaagaggacaggggtggagccaggggcccggcctccagggtttcctgtgctgagcggggatttcttctcctatgcggaccgggaggatcattactggacaggctattacacttcccggcccttctacaagagcttagaccgagtcctggaagcccacctgcggggggcagaggttctgtacagcctggctgcagctcacgctcgccgctctggtctggctggccggtacccactgtctgatttcaccctcctgacggaagctcggcgcacattggggctcttccagcatcacgatgccatcactggcacggccaaggaggctgtggtggtggactatggggtcaggcttctgcgctcccttgtcaacctgaagcaggtcatcattcatgcagcccactatctggtgctgggggacaaggagacctaccactttgaccctgaggcgcccttcctccaagtggatgacactcgcttaagtcacgacgccctcccagagcgcacggtgatccagctggattcctcgcccaggtttgtggtcctattcaacccactggaacaggagcgattcagcatggtgtccctgctggtcaactctccccgcgtgcgtgtcctttcggaggagggtcagcccctggccgtgcagatcagcgcacactggagctctgccaccgaggcggtccctgacgtctaccaggtgtctgtgcctgtccgcctgccagccctgggcctgggcgtgctgcagctacagctgggcctggatgggcaccgcacgctgccctcctctgtgcgcatctacctgcacggccggcagctgtccgtcagcaggcacgaagcgtttcctctccgtgtcattgactctggcaccagcgacttcgccctcagcaaccgctacatgcaggtctggttctcaggccttactgggctcctcaagagcatccgaagggtggatgaggagcacgagcagcaggtggacatgcaggtccttgtctatggcacccgtacgtccaaagacaagagtggagcctacctcttcctgcccgatggcgaggccaagccctacgtccccaaggagccccccgtgctgcgtgtcactgaaggccctttcttctcagaggtggttgcgtactatgagcacattcaccaggcggtccggctttacaatctgccaggggtggaggggctgtctctggacatatcatccctggtggacatccgggactacgtcaacaaggagctggccctgcacatccatacagacatcgacagccagggtatcttcttcacagacctcaatggctttcaggtgcagccccgacggtatctgaagaagctccccctccaggccaacttctaccccatgccagtcatggcctatatccaggacgcacagaagcgcctcacgctgcacactgcccaggccctgggtgtctctagcctcaaagatggccagctggaggtgatcttggaccggcggctgatgcaggatgacaaccggggcctaggccaagggctcaaggacaacaagagaacctgcaaccgtttccgcctcctgctagagcggcgaaccgtgggcagtgaggtccaagatagccactctaccagctacccatccctcctcagccacctgacctccatgtacctgaacgccccggcgctcgctctgcctgtagccaggatgcagctcccaggccctggtctgcgctcatttcatcctctggcttcctcactgccctgtgacttccacctgctcaacctacgtacgctccaggctgaggaggacaccctaccctcggcggagaccgcactcatcttacaccgcaagggttttgactgcggcctggaggccaagaacttgggcttcaactgcaccacaagccaaggcaaggtagccctgggcagccttttccatggcctggatgtggtattccttcagccaacctccttgacgttactgtaccctctggcctccccgtccaacagcactgacgtctatttggagcccatggagattgctacctttcgcctccgcttgggttagggcttcttgtggcctgaagagaaagttcattcacagagactgcctcttaacatgaagatcattggacaagccacacgggtatcccatcccgatctgcctcccagaactgtgacacactgggctctgccctcattttctgtttattgctgctgctgtgttttcggcgcaacccacaaacccagtgatgggtaaatagggcagacgccagtgagatcagggtaaggctcccgggggatctctagatca

SEQ ID NO: 68842 - DNA, 3859 bp, Homo sapiens
cagttcacctggcagatgctcactgtgtcggaggagctgccgtttgacaacgtggatggtggtgtgtggaggcaaggcttcgacatctcctacgacccgcacgactgggatgctgaagacctgcaggtgtttgtggtgccccactctcacaatgacccaggctggatcaagacctttgacaagtactacacagagcagacccaacacatcctcaatagcatggtgtctaagctgcaggaggacccccggcggcgcttcctctgggcagaggtctccttcttcgccaagtggtgggacaacatcaatgtccaaaagagagcggcagtccgaaggctggtgggaaacgggcagctggagattgcgacaggaggctgggtgatgccagatgaggccaattcccactactttgcattgattgaccagctcatcgaaggacaccagtggctggagagaaatcttggtgcaaccccccgctctggctgggcagtggacccctttggatacagctccaccatgccttacctgctgcgccgtgccaacctcaccagcatgctgattcagagagtgcactatgccatcaagaagcactttgctgccacccacagcctagagttcatgtggaggcagacatgggccctaggtccagttacagcctcgcggtctatcagggctgcctttagcctgaacagatccttgcccccctggcgtccagaggctgcctgctggtggtgaccacgtggtgtgtctcctgcagactcggactccagcacagacatcttctgtcacatgatgcccttctacagctatgacgtcccccatacctgtggcccagatcccaagatctgctgccaatttgatttcaaacgcctgcctggtgggcgcatcaactgcccttggaaggtgccaccccgggccatcacagaggccaacgtggcagagagggcagccctgcttctggaccaataccggaagaagtcccggctgttccgaagcaacgtcctcctggtgcctcttggagatgacttccgatatgacaagccccaggagtgggatgcccagttcttcaactaccaacggctctttgacttcttcaacagcaggcctaacctccatgtgcaggcccagtttggcactctttctgactattttgatgccctgtacaagaggacaggggtggagccaggggcccggcctccagggtttcctgtgctgagcggggatttcttctcctatgcggaccgggaggatcattactggacaggctattacacttcccggcccttctacaagagcttagaccgagtcctggaagcccacctgcggggggcagaggttctgtacagcctggctgcagctcacgctcgccgctctggtctggctggccggtacccactgtctgatttcaccctcctgacggaagctcggcgcacattggggctcttccagcatcacgatgccatcactggcacggccaaggaggctgtggtggtggactatggggtcaggcttctgcgctcccttgtcaacctgaagcaggtcatcattcatgcagcccactatctggtgctgggggacaaggagacctaccactttgaccctgaggcgcccttcctccaagtggatgacactcgcttaagtcacgacgccctcccagagcgcacggtgatccagctggattcctcgcccaggtttgtggtcctattcaacccactggaacaggagcgattcagcatggtgtccctgctggtcaactctccccgcgtgcgtgtcctttcggaggagggtcagcccctggccgtgcagatcagcgcacactggagctctgccaccgaggcggtccctgacgtctaccaggtgtctgtgcctgtccgcctgccagccctgggcctgggcgtgctgcagctacagctgggcctggatgggcaccgcacgctgccctcctctgtgcgcatctacctgcacggccggcagctgtccgtcagcaggcacgaagcgtttcctctccgtgtcattgactctggcaccagcgacttcgccctcagcaaccgctacatgcaggtctggttctcaggccttactgggctcctcaagagcatccgaagggtggatgaggagcacgagcagcaggtggacatgcaggtccttgtctatggcacccgtacgtccaaagacaagagtggagcctacctcttcctgcccgatggcgaggccaagccctacgtccccaaggagccccccgtgctgcgtgtcactgaaggccctttcttctcagaggtggttgcgtactatgagcacattcaccaggcggtccggctttacaatctgccaggggtggaggggctgtctctggacatatcatccctggtggacatccgggactacgtcaacaaggagctggccctgcacatccatacagacatcgacagccagggtatcttcttcacagacctcaatggctttcaggtgcagccccgacggtatctgaagaagctccccctccaggccaacttctaccccatgccagtcatggcctatatccaggacgcacagaagcgcctcacgctgcacactgcccaggccctgggtgtctctagcctcaaagatggccagctggaggtgatcttggaccggcggctgatgcaggatgacaaccggggcctaggccaagggctcaaggacaacaagagaacctgcaaccgtttccgcctcctgctagagcggcgaaccgtgggcagtgagcctgactttttctccaaactggcagccatgtttaggggcttgatctttcacagcagcaggagcggtaaccgagaggtccaagatagccactctaccagctacccatccctcctcagccacctgacctccatgtacctgaacgccccggcgctcgctctgcctgtagccaggatgcagctcccaggccctggtctgcgctcatttcatcctctggcttcctcactgccctgtgacttccacctgctcaacctacgtacgctccaggctgaggtgagtgtccctcagcgtgacatgctgagagcagagttctgatggtgtccctccctgctcagctccttccttagcctccaggatgaggtccagaccccttagcaggtattcggctccaaacctccaggaccaggttttggcctttccttacccacacgcctccctgtgccagcactgcctctgggcagaggcgctgctgcatctccgatctctgaaagccctgcgcccacttccctgggcactgtctgtcatccaggaggacaccctaccctcggcggagaccgcactcatcttacaccgcaagggttttgactgcggcctggaggccaagaacttgggcttcaactgcaccacaagccaaggcaaggtagccctgggcagccttttccatggcctggatgtggtattccttcagccaacctccttgacgttactgtaccctctggcctccccgtccaacagcactgacgtctatttggagcccatggagattgctacctttcgcctccgcttgggttagggcttcttgtggcctgaagagaaagttcattcacagagactgcctcttaacatgaagatcattggacaagccacacgggtatcccatcccgatctgcctcccagaactgtgacacactgggctctgccctcattttctgtttattgctgctgctgtgttttcggcgcaacccacaaacccagtgatgggtaaatagggcagacgccagtgagatcagggagagaaggcccttggtcagagtgggcagtgccaggctctgctttgggttgtgagtggacacccaactgggcacaggctcaggcacccatcctttttccaaacagggatata

SEQ ID NO: 68843 - DNA, 3546 bp, Homo sapiens
cagttcacctggcagatgctcactgtgtcggaggagctgccgtttgacaacgtggatggtggtgtgtggaggcaaggcttcgacatctcctacgacccgcacgactgggatgctgaagacctgcaggtgtttgtggtgccccactctcacaatgacccaggctggatcaagacctttgacaagtactacacagagcagacccaacacatcctcaatagcatggtgtctaagctgcaggaggacccccggcggcgcttcctctgggcagaggtctccttcttcgccaagtggtgggacaacatcaatgtccaaaagagagcggcagtccgaaggctggtgggaaacgggcagctggagattgcgacaggaggctgggtgatgccagatgaggccaattcccactactttgcattgattgaccagctcatcgaaggacaccagtggctggagagaaatcttggtgcaaccccccgctctggctgggcagtggacccctttggatacagctccaccatgccttacctgctgcgccgtgccaacctcaccagcatgctgattcagagagtgcactatgccatcaagaagcactttgctgccacccacagcctagagttcatgtggaggcagacatgggccctaggtccagttacagcctcgcggtctatcagggctgcctttagcctgaacagatccttgcccccctggcgtccagaggctgcctgctggtggtgaccacgtggtgtgtctcctgcagactcggactccagcacagacatcttctgtcacatgatgcccttctacagctatgacgtcccccatacctgtggcccagatcccaagatctgctgccaatttgatttcaaacgcctgcctggtgggcgcatcaactgcccttggaaggtgccaccccgggccatcacagaggccaacgtggcagagagggcagccctgcttctggaccaataccggaagaagtcccggctgttccgaagcaacgtcctcctggtgcctcttggagatgacttccgatatgacaagccccaggagtgggatgcccagttcttcaactaccaacggctctttgacttcttcaacagcaggcctaacctccatgtgcaggcccagtttggcactctttctgactattttgatgccctgtacaagaggacaggggtggagccaggggcccggcctccagggtttcctgtgctgagcggggatttcttctcctatgcggaccgggaggatcattactggacaggctattacacttcccggcccttctacaagagcttagaccgagtcctggaagcccacctgcggggggcagaggttctgtacagcctggctgcagctcacgctcgccgctctggtctggctggccggtacccactgtctgatttcaccctcctgacggaagctcggcgcacattggggctcttccagcatcacgatgccatcactggcacggccaaggaggctgtggtggtggactatggggtcaggcttctgcgctcccttgtcaacctgaagcaggtcatcattcatgcagcccactatctggtgctgggggacaaggagacctaccactttgaccctgaggcgcccttcctccaagtggatgacactcgcttaagtcacgacgccctcccagagcgcacggtgatccagctggattcctcgcccagcccaccttctacgcacaggtttgtggtcctattcaacccactggaacaggagcgattcagcatggtgtccctgctggtcaactctccccgcgtgcgtgtcctttcggaggagggtcagcccctggccgtgcagatcagcgcacactggagctctgccaccgaggcggtccctgacgtctaccaggtgtctgtgcctgtccgcctgccagccctgggcctgggcgtgctgcagctacagctgggcctggatgggcaccgcacgctgccctcctctgtgcgcatctacctgcacggccggcagctgtccgtcagcaggcacgaagcgtttcctctccgtgtcattgactctggcaccagcgacttcgccctcagcaaccgctacatgcaggtctggttctcaggccttactgggctcctcaagagcatccgaagggtggatgaggagcacgagcagcaggtggacatgcaggtccttgtctatggcacccgtacgtccaaagacaagagtggagcctacctcttcctgcccgatggcgaggccaagccctacgtccccaaggagccccccgtgctgcgtgtcactgaaggccctttcttctcagaggtggttgcgtactatgagcacattcaccaggcggtccggctttacaatctgccaggggtggaggggctgtctctggacatatcatccctggtggacatccgggactacgtcaacaaggagctggccctgcacatccatacagacatcgacagccagggtatcttcttcacagacctcaatggctttcaggtgcagccccgacggtatctgaagaagctccccctccaggccaacttctaccccatgccagtcatggcctatatccaggacgcacagaagcgcctcacgctgcacactgcccaggccctgggtgtctctagcctcaaagatggccagctggaggtgatcttggaccggcggctgatgcaggatgacaaccggggcctaggccaagggctcaaggacaacaagagaacctgcaaccgtttccgcctcctgctagagcggcgaaccgtgggcagtgaggtccaagatagccactctaccagctacccatccctcctcagccacctgacctccatgtacctgaacgccccggcgctcgctctgcctgtagccaggatgcagctcccaggccctggtctgcgctcatttcatcctctggcttcctcactgccctgtgacttccacctgctcaacctacgtacgctccaggctgaggaggacaccctaccctcggcggagaccgcactcatcttacaccgcaagggttttgactgcggcctggaggccaagaacttgggcttcaactgcaccacaagccaaggcaaggtagccctgggcagccttttccatggcctggatgtggtattccttcagccaacctccttgacgttactgtaccctctggcctccccgtccaacagcactgacgtctatttggagcccatggagattgctacctttcgcctccgcttgggttagggcttcttgtggcctgaagagaaagttcattcacagagactgcctcttaacatgaagatcattggacaagccacacgggtatcccatcccgatctgcctcccagaactgtgacacactgggctctgccctcattttctgtttattgctgctgctgtgttttcggcgcaacccacaaacccagtgatgggtaaatagggcagacgccagtgagatcagggagagaaggcccttggtcagagtgggcagtgccaggctctgctttgggttgtgagtggacacccaactgggcacaggctcaggcacccatcctttttccaaacagggatata

SEQ ID NO: 68844 - DNA, 1376 bp, Homo sapiens
  misc_feature (47)..(47): n is a, c, g, or t
cacggggcgaaggccctaaccctgctattcctagctcacgcagtagnggctgcagggccaagccctacgtccccaaggagccccccgtgctgcgtgtcactgaaggccctttcttctcagaggtggttgcgtactatgagcacattcaccaggcggtccggctttacaatctgccaggggtggaggggctgtctctggacatatcatccctggtggacatccgggactacgtcaacaaggagctggccctgcacatccatacagacatcgacagccagggtatcttcttcacagacctcaatggctttcaggtgcagccccgacggtatctgaagaagctccccctccaggccaacttctaccccatgccagtcatggcctatatccaggacgcacagaagcgcctcacgctgcacactgcccaggccctgggtgtctctagcctcaaagatggccagctggaggtgatcttggaccggcggctgatgcaggatgacaaccggggcctaggccaagggctcaaggacaacaagagaacctgcaaccgtttccgcctcctgctagagcggcgaaccgtgggcagtgaggtccaagatagccactctaccagctacccatccctcctcagccacctgacctccatgtacctgaacgccccggcgctcgctctgcctgtagccaggatgcagctcccaggccctggtctgcgctcatttcatcctctggcttcctcactgccctgtgacttccacctgctcaacctacgtacgctccaggctgaggaggacaccctaccctcggcggagaccgcactcatcttacaccgcaagggttttgactgcggcctggaggccaagaacttgggcttcaactgcaccacaagccaaggcaaggtagccctgggcagccttttccatggcctggatgtggtattccttcagccaacctccttgacgttactgtaccctctggcctccccgtccaacagcactgacgtctatttggagcccatggagattgctacctttcgcctccgcttgggttagggcttcttgtggcctgaagagaaagttcattcacagagactgcctcttaacatgaagatcattggacaagccacacgggtatcccatcccgatctgcctcccagaactgtgacacactgggctctgccctcattttctgtttattgctgctgctgtgttttcggcgcaacccacaaacccagtgatgggtaaatagggcagacgccagtgagatcagggagagaaggcccttggtcagagtgggcagtgccaggctctgctttgggttgtgagtggacacccaactgggcacaggctcaggcacccatcctttttccaaacagggatata

SEQ ID NO: 68845 - DNA, 1556 bp, Homo sapiens
cagttcacctggcagatgctcactgtgtcggaggagctgccgtttgacaacgtggatggtggtgtgtggaggcaaggcttcgacatctcctacgacccgcacgactgggatgctgaagacctgcaggtgtttgtggtgccccactctcacaatgacccaggctggatcaagacctttgacaagtactacacagagcagacccaacacatcctcaatagcatggtgtctaagctgcaggaggacccccggcggcgcttcctctgggcagaggtctccttcttcgccaagtggtgggacaacatcaatgtccaaaagagagcggcagtccgaaggctggtgggaaacgggcagctggagattgcgacaggaggctgggtgatgccagatgaggccaattcccactactttgcattgattgaccagctcatcgaaggacaccagtggctggagagaaatcttggtgcaaccccccgctctggctgggcagtggacccctttggatacagctccaccatgccttacctgctgcgccgtgccaacctcaccagcatgctgattcagagagtgcactatgccatcaagaagcactttgctgccacccacagcctagagttcatgtggaggcagacatgggccctaggtccagttacagcctcgcggtctatcagggctgcctttagcctgaacagatccttgcccccctggcgtccagaggctgcctgctggtggtgaccacgtggtgtgtctcctgcagactcggactccagcacagacatcttctgtcacatgatgcccttctacagctatgacgtcccccatacctgtggcccagatcccaagatctgctgccaatttgatttcaaacgcctgcctggtgggcgcatcaactgcccttggaaggtgccaccccgggccatcacagaggccaacgtggcagagagggcagccctgcttctggaccaataccggaagaagtcccggctgttccgaagcaacgtcctcctggtgcctcttggagatgacttccgatatgacaagccccaggagtgggatgcccagttcttcaactaccaacggctctttgacttcttcaacagcaggcctaacctccatgtgcaggcccagtttggcactctttctgactattttgatgccctgtacaagaggacaggggtggagccaggggcccggcctccagggtttcctgtgctgagcggggatttcttctcctatgcggaccgggaggatcattactggacaggctattacacttcccggcccttctacaagagcttagaccgagtcctggaagcccacctgcggggggcagaggttctgtacagcctggctgcagctcacgctcgccgctctggtctggctggccggtacccactgtctgatttcaccctcctgacggaagctcggcgcacattggggctcttccagcatcacgatgccatcactggcacggccaaggaggctgtggtggtggactatggggtcaggcttctgcgctcccttgtcaacctgagcagaggagacctgagcaagccagg

SEQ ID NO: 68846 - DNA, 882 bp, Homo sapiens
gcattctctaagcctgtgctccaaccccgctcatctcatggctttctttgccccaccagcctgactttttctccaaactggcagccatgtttaggggcttgatctttcacagcagcaggagcggtaaccgagagccacctgacctccatgtacctgaacgccccggcgctcgctctgcctgtagccaggatgcagctcccaggccctggtctgcgctcatttcatcctctggcttcctcactgccctgtgacttccacctgctcaacctacgtacgctccaggctgaggaggacaccctaccctcggcggagaccgcactcatcttacaccgcaagggttttgactgcggcctggaggccaagaacttgggcttcaactgcaccacaagccaaggcaaggtagccctgggcagccttttccatggcctggatgtggtattccttcagccaacctccttgacgttactgtaccctctggcctccccgtccaacagcactgacgtctatttggagcccatggagattgctacctttcgcctccgcttgggttagggcttcttgtggcctgaagagaaagttcattcacagagactgcctcttaacatgaagatcattggacaagccacacgggtatcccatcccgatctgcctcccagaactgtgacacactgggctctgccctcattttctgtttattgctgctgctgtgttttcggcgcaacccacaaacccagtgatgggtaaatagggcagacgccagtgagatcagggagagaaggcccttggtcagagtgggcagtgccaggctctgctttgggttgtgagtggacacccaactgggcacaggctcaggcacccatcctttttccaaacagggatata

SEQ ID NO: 68847 - DNA, 479 bp, Homo sapiens
ccgcttgggcccacatggtgcccgggtgcccttgatctgctggccttgcccccacaggtgcagccccgacggtatctgaagaagctccccctccaggccaacttctaccccatgccagtcatggcctatatccaggacgcacagaagcgcctcacgctgcacactgcccaggccctgggtgtctctagcctcaaagatggtgagtagggcccaggagttctgcagagggtatcagacaaaaagaagcccgtccccaccctcaagggctccccgctctgttggcctcccttgcctctttctggactgcatcacctccatgcttggagagggggcaagccattcagagctcttggcacaggaggcaggcatctgctgtccccatcccctggtggaggcagcagtgtaggcaactgggtggagtgtcctactggatcccctgaagaaccgtcagggttacaactcttggggccaaagaaagg

SEQ ID NO: 68848 - DNA, 362 bp, Homo sapiens
gcagacagcttccctatggtcatcttctctccttccctctcctgcgccacccacaggcttctgcgctcccttgtcaacctgaagcaggtcatcattcatgcagcccactatctggtgctgggggacaaggagacctaccactttgaccctgaggcgcccttcctccaagtggtgagcccctcctgggtctgcatggggaccctctggtgtgtgcaggtcccatcccaagagctgctggatgggggtgccgcttctctttttccttccccatccggatgagttctgtgcccagtgcagccgctggtccacacctgggacaggtggggtgggaggaggctgagcccatgatggttcttcccttc

SEQ ID NO: 68849 - DNA, 3528 bp, Homo sapiens
cagttcacctggcagatgctcactgtgtcggaggagctgccgtttgacaacgtggatggtggtgtgtggaggcaaggcttcgacatctcctacgacccgcacgactgggatgctgaagacctgcaggtgtttgtggtgccccactctcacaatgacccaggctggatcaagacctttgacaagtactacacagagcagacccaacacatcctcaatagcatggtgtctaagctgcaggaggacccccggcggcgcttcctctgggcagaggtctccttcttcgccaagtggtgggacaacatcaatgtccaaaagagagcggcagtccgaaggctggtgggaaacgggcagctggagattgcgacaggaggctgggtgatgccagatgaggccaattcccactactttgcattgattgaccagctcatcgaaggacaccagtggctggagagaaatcttggtgcaaccccccgctctggctgggcagtggacccctttggatacagctccaccatgccttacctgctgcgccgtgccaacctcaccagcatgctgattcagagagtgcactatgccatcaagaagcactttgctgccacccacagcctagagttcatgtggaggcagacatgggccctaggtccagttacagcctcgcggtctatcagggctgcctttagcctgaacagatccttgcccccctggcgtccagaggctgcctgctggtggtgaccacgtggtgtgtctcctgcagactcggactccagcacagacatcttctgtcacatgatgcccttctacagctatgacgtcccccatacctgtggcccagatcccaagatctgctgccaatttgatttcaaacgcctgcctggtgggcgcatcaactgcccttggaaggtgccaccccgggccatcacagaggccaacgtggcagagagggcagccctgcttctggaccaataccggaagaagtcccggctgttccgaagcaacgtcctcctggtgcctcttggagatgacttccgatatgacaagccccaggagtgggatgcccagttcttcaactaccaacggctctttgacttcttcaacagcaggcctaacctccatgtgcaggcccagtttggcactctttctgactattttgatgccctgtacaagaggacaggggtggagccaggggcccggcctccagggtttcctgtgctgagcggggatttcttctcctatgcggaccgggaggatcattactggacaggctattacacttcccggcccttctacaagagcttagaccgagtcctggaagcccacctgcggggggcagaggttctgtacagcctggctgcagctcacgctcgccgctctggtctggctggccggtacccactgtctgatttcaccctcctgacggaagctcggcgcacattggggctcttccagcatcacgatgccatcactggcacggccaaggaggctgtggtggtggactatggggtcaggcttctgcgctcccttgtcaacctgaagcaggtcatcattcatgcagcccactatctggtgctgggggacaaggagacctaccactttgaccctgaggcgcccttcctccaagtggatgacactcgcttaagtcacgacgccctcccagagcgcacggtgatccagctggattcctcgcccaggtttgtggtcctattcaacccactggaacaggagcgattcagcatggtgtccctgctggtcaactctccccgcgtgcgtgtcctttcggaggagggtcagcccctggccgtgcagatcagcgcacactggagctctgccaccgaggcggtccctgacgtctaccaggtgtctgtgcctgtccgcctgccagccctgggcctgggcgtgctgcagctacagctgggcctggatgggcaccgcacgctgccctcctctgtgcgcatctacctgcacggccggcagctgtccgtcagcaggcacgaagcgtttcctctccgtgtcattgactctggcaccagcgacttcgccctcagcaaccgctacatgcaggtctggttctcaggccttactgggctcctcaagagcatccgaagggtggatgaggagcacgagcagcaggtggacatgcaggtccttgtctatggcacccgtacgtccaaagacaagagtggagcctacctcttcctgcccgatggcgaggccaagccctacgtccccaaggagccccccgtgctgcgtgtcactgaaggccctttcttctcagaggtggttgcgtactatgagcacattcaccaggcggtccggctttacaatctgccaggggtggaggggctgtctctggacatatcatccctggtggacatccgggactacgtcaacaaggagctggccctgcacatccatacagacatcgacagccagggtatcttcttcacagacctcaatggctttcaggtgcagccccgacggtatctgaagaagctccccctccaggccaacttctaccccatgccagtcatggcctatatccaggacgcacagaagcgcctcacgctgcacactgcccaggccctgggtgtctctagcctcaaagatggccagctggaggtgatcttggaccggcggctgatgcaggatgacaaccggggcctaggccaagggctcaaggacaacaagagaacctgcaaccgtttccgcctcctgctagagcggcgaaccgtgggcagtgaggtccaagatagccactctaccagctacccatccctcctcagccacctgacctccatgtacctgaacgccccggcgctcgctctgcctgtagccaggatgcagctcccaggccctggtctgcgctcatttcatcctctggcttcctcactgccctgtgacttccacctgctcaacctacgtacgctccaggctgaggaggacaccctaccctcggcggagaccgcactcatcttacaccgcaagggttttgactgcggcctggaggccaagaacttgggcttcaactgcaccacaagccaaggcaaggtagccctgggcagccttttccatggcctggatgtggtattccttcagccaacctccttgacgttactgtaccctctggcctccccgtccaacagcactgacgtctatttggagcccatggagattgctacctttcgcctccgcttgggttagggcttcttgtggcctgaagagaaagttcattcacagagactgcctcttaacatgaagatcattggacaagccacacgggtatcccatcccgatctgcctcccagaactgtgacacactgggctctgccctcattttctgtttattgctgctgctgtgttttcggcgcaacccacaaacccagtgatgggtaaatagggcagacgccagtgagatcagggagagaaggcccttggtcagagtgggcagtgccaggctctgctttgggttgtgagtggacacccaactgggcacaggctcaggcacccatcctttttccaaacagggatata

SEQ ID NO: 68850 - DNA, 2290 bp, Homo sapiens
tgcgaagaaatggtcgcaccctctggttaggggagggccatattgacctctggcctctacagggcctgctgtcccaagggcttcagcgtgccctgtgtgcccgtcccctgaggagcccctcatgtctttctccctggcctacacactctctccagccctaggtccagttacagcctcgcggtctatcagggctgcctttagcctgaacagatccttgcccccctggcgtccagaggctgcctgctggtggtgaccacgtggtgtgtctcctgcagactcggactccagcacagacatcttctgtcacatgatgcccttctacagctatgacgtcccccatacctgtggcccagatcccaagatctgctgccaatttgatttcaaacgcctgcctggtgggcgcatcaactgcccttggaaggtgccaccccgggccatcacagaggccaacgtggcagagagggcagccctgcttctggaccaataccggaagaagtcccggctgttccgaagcaacgtcctcctggtgcctcttggagatgacttccgatatgacaagccccaggagtgggatgcccagttcttcaactaccaacggctctttgacttcttcaacagcaggcctaacctccatgtgcaggcccagtttggcactctttctgactattttgatgccctgtacaagaggacaggggtggagccaggggcccggcctccagggtttcctgtgctgagcggggatttcttctcctatgcggaccgggaggatcattactggacaggctattacacttcccggcccttctacaagagcttagaccgagtcctggaagcccacctgcggggggcagaggttctgtacagcctggctgcagctcacgctcgccgctctggtctggctggccggtacccactgtctgatttcaccctcctgacggaagctcggcgcacattggggctcttccagcatcacgatgccatcactggcacggccaaggaggctgtggtggtggactatggggtcaggcttctgcgctcccttgtcaacctgaagcaggtcatcattcatgcagcccactatctggtgctgggggacaaggagacctaccactttgaccctgaggcgcccttcctccaagtggatgacactcgcttaagtcacgacgccctcccagagcgcacggtgatccagctggattcctcgcccaggtttgtggtcctattcaacccactggaacaggagcgattcagcatggtgtccctgctggtcaactctccccgcgtgcgtgtcctttcggaggagggtcagcccctggccgtgcagatcagcgcacactggagctctgccaccgaggcggtccctgacgtctaccaggtgtctgtgcctgtccgcctgccagccctgggcctgggcgtgctgcagctacagctgggcctggatgggcaccgcacgctgccctcctctgtgcgcatctacctgcacggccggcagctgtccgtcagcaggcacgaagcgtttcctctccgtgtcattgactctggcaccagcgacttcgccctcagcaaccgctacatgcaggtctggttctcaggccttactgggctcctcaagagcatccgaagggtggatgaggagcacgagcagcaggtggacatgcaggtccttgtctatggcacccgtacgtccaaagacaagagtggagcctacctcttcctgcccgatggcgaggccaagccctacgtccccaaggagccccccgtgctgcgtgtcactgaaggccctttcttctcagaggtggttgcgtactatgagcacattcaccaggcggtccggctttacaatctgccaggggtggaggggctgtctctggacatatcatccctggtggacatccgggactacgtcaacaaggaccttcatttcagcttcaattaatagggaagaatttatgatagctctatagatgctgaaaaggtatttcgtaagatttaaaatccatcccttattaaaactcttagtaaattaagtctggaaagaaacaccctaatctagataaaggtctgtttcagaaaccaacagtgatggcattctaaagagtcagacgccacaggcattcccattaaagtcagaaactagccaagggcaagctattattcagcagtgtcccggcactactaacccctgcaacaagccagatgaggaacataaggaagaattataattgtcattatttgtagacaataaaactgcctacctgtaaaacctaagaatcaaaaaaacctgttaaga

SEQ ID NO: 68851 - DNA, 1318 bp, Homo sapiens
ggaggctgactagaggacccattaggcgcgtctgcgtgtcactgaaggccctttcttctcagaggtggttgcgtactatgagcacattcaccaggcggtccggctttacaatctgccaggggtggaggggctgtctctggacatatcatccctggtggacatccgggactacgtcaacaaggagctggccctgcacatccatacagacatcgacagccagggtatcttcttcacagacctcaatggctttcaggtgcagccccgacggtatctgaagaagctccccctccaggccaacttctaccccatgccagtcatggcctatatccaggacgcacagaagcgcctcacgctgcacactgcccaggccctgggtgtctctagcctcaaagatggccagctggaggtgatcttggaccggcggctgatgcaggatgacaaccggggcctaggccaagggctcaaggacaacaagagaacctgcaaccgtttccgcctcctgctagagcggcgaaccgtgggcagtgaggtccaagatagccactctaccagctacccatccctcctcagccacctgacctccatgtacctgaacgccccggcgctcgctctgcctgtagccaggatgcagctcccaggccctggtctgcgctcatttcatcctctggcttcctcactgccctgtgacttccacctgctcaacctacgtacgctccaggctgaggaggacaccctaccctcggcggagaccgcactcatcttacaccgcaagggttttgactgcggcctggaggccaagaacttgggcttcaactgcaccacaagccaaggcaaggtagccctgggcagccttttccatggcctggatgtggtattccttcagccaacctccttgacgttactgtaccctctggcctccccgtccaacagcactgacgtctatttggagcccatggagattgctacctttcgcctccgcttgggttagggcttcttgtggcctgaagagaaagttcattcacagagactgcctcttaacatgaagatcattggacaagccacacgggtatcccatcccgatctgcctcccagaactgtgacacactgggctctgccctcattttctgtttattgctgctgctgtgttttcggcgcaacccacaaacccagtgatgggtaaatagggcagacgccagtgagatcagggagagaaggcccttggtcagagtgggcagtgccaggctctgctttgggttgtgagtggacacccaactgggcacaggctcaggcacccatcctttttccaaacagggatata

SEQ ID NO: 68852 - DNA, 1211 bp, Homo sapiens
ggcgggccagcactcactgtttgcttccccaggccagctggaggtgatcttggaccggcggctgatgcaggatgacaaccggggcctaggccaagggctcaaggacaacaagagaacctgcaaccgtttccgcctcctgctagagcggcgaaccgtgggcagtgaggtccaagatagccactctaccagctacccatccctcctcagccacctgacctccatgtacctgaacgccccggcgctcgctctgcctgtagccaggatgcagctcccaggccctggtctgcgctcatttcatcctctggcttcctcactgccctgtgacttccacctgctcaacctacgtacgctccaggctgaggtgagtgtccctcagcgtgacatgctgagagcagagttctgatggtgtccctccctgctcagctccttccttagcctccaggatgaggtccagaccccttagcaggtattcggctccaaacctccaggaccaggttttggcctttccttacccacacgcctccctgtgccagcactgcctctgggcagaggcgctgctgcatctccgatctctgaaagccctgcgcccacttccctgggcactgtctgtcatccaggaggacaccctaccctcggcggagaccgcactcatcttacaccgcaagggttttgactgcggcctggaggccaagaacttgggcttcaactgcaccacaagccaaggcaaggtagccctgggcagccttttccatggcctggatgtggtattccttcagccaacctccttgacgttactgtaccctctggcctccccgtccaacagcactgacgtctatttggagcccatggagattgctacctttcgcctccgcttgggttagggcttcttgtggcctgaagagaaagttcattcacagagactgcctcttaacatgaagatcattggacaagccacacgggtatcccatcccgatctgcctcccagaactgtgacacactgggctctgccctcattttctgtttattgctgctgctgtgttttcggcgcaacccacaaacccagtgatgggtaaatagggcagacgccagtgagatcagggagagaaggcccttggtcagagtgggcagtgccaggctctgctttgggttgtgagtggacacccaactgggcacaggctcaggcacccatcctttttccaaacagggatata

SEQ ID NO: 68853 - DNA, 845 bp, Homo sapiens
cagttcacctggcagatgctcactgtgtcggaggagctgccgtttgacaacgtggatggtggtgtgtggaggcaaggcttcgacatctcctacgacccgcacgactgggatgctgaagacctgcaggtgtttgtggtgccccactctcacaatgacccaggctggatcaagacctttgacaagtactacacagagcagacccaacacatcctcaatagcatggtgtctaagctgcaggaggacccccggcggcgcttcctctgggcagaggtctccttcttcgccaagtggtgggacaacatcaatgtccaaaagagagcggcagtccgaaggctggtgggaaacgggcagctggagattgcgacaggaggctgggtgatgccagatgaggccaattcccactactttgcattgattgaccagctcatcgaaggacaccagtggctggagagaaatcttggtgcaaccccccgctctggctgggcagtggacccctttggatacagctccaccatgccttacctgctgcgccgtgccaacctcaccagcatgctgattcagagagtgcactatgccatcaagaagcactttgctgccacccacagcctagagttcatgtggaggcagacatgggactcggactccagcacagacatcttctgtcacatgatgcccttctacagctatgacgtcccccatacctgtggcccagatcccaagatctgctgccaatttgatttcaaacgcctgcctggtgggcgcatcaactgcccttggaaggtgccaccccgggccatcacagaggccaacgtggcagagaggtatctgcttccagccctttcact

SEQ ID NO: 68854 - DNA, 199 bp, Homo sapiens
ctggagaaaggcagctcctacttgtcagttaaacaaaagaataatccacagccccctttccagtgtgtactttcactgtcatccaacagcccattaccatgtcacagcacagcgtacccttccataggtcactttgtttaaaatgacatggataatgcacatgtcagcaagctgacagtcctggccgtccttcagagat

SEQ ID NO: 68855 - DNA, 635 bp, Homo sapiens
aataaaggccagaacgttgtcctaaatgaatcctttgccttactttaggaccttccttccctctcaaattcaggcataatgtaatatagttgaaagggggaagcggcggcaggcgccatgtccggccgcgaaggtggcaagaagaagccactgaaacagcccaagaagcaggccaaggagatggacgaggaagataaggctttcaagcagaaacaaaaagaggagcagaagaaactcgaggagctaaaagcgaaggccgcggggaaggggcccttggccacaggtggaattaagaaatctggcaaaaagtaagctgttccttgtgcctgaggagatggtgaccctttatttcatctgtatttaaacctctctattccctgccataacatcttttgccacgtatagctggaattaagtgttgtcttggagctgttgtacatttaagaataaacttttgtaaaaaaagaaaaatcttacagtggctcatcatctctttagttgttttcactaagtcattcctaccataactgtgaatttaaagtaaaaccagctcagaatcttgccagagtctgttctttggtccttgttctaccctaaactttgtatcacctgaaattaaaccaactcatttgaaa

SEQ ID NO: 68856 - DNA, 547 bp, Homo sapiens
cgcggccgccgacacggcgcgagaagacgacagaagggggcgaaggtggcaagaagaagccactgaaacagcccaagaagcaggccaaggagatggacgaggaagataaggctttcaagcagaaacaaaaagaggagcagaagaaactcgaggagctaaaagcgaaggccgcggggaaggggcccttggccacaggtggaattaagaaatctggcaaaaagtaagctgttccttgtgcctgaggagatggtgaccctttatttcatctgtatttaaacctctctattccctgccataacatcttttgccacgtatagctggaattaagtgttgtcttggagctgttgtacatttaagaataaacttttgtaaaaaaagaaaaatcttacagtggctcatcatctctttagttgttttcactaagtcattcctaccataactgtgaatttaaagtaaaaccagctcagaatcttgccagagtctgttctttggtccttgttctaccctaaactttgtatcacctgaaattaaaccaactcatttgaaa

SEQ ID NO: 68857 - DNA, 904 bp, Homo sapiens
gtggggcagaagcagctttccggtggcagggtctggggaagcggcggcaggcgccatgtccggccgcgaaggtggcaagaagaagccactgaaacagcccaagaagcaggccaaggagatggacgaggaagataaggctttcaagcagaaacaaaaagaggagcagaagaaactcgaggagctaaaagcgaaggccgcggggaaggggcccttggccacaggtggaattaagaaatctggcaaaaagtaagctgttccttgtgcctgaggagatggtgaccctttatttcatctgtatttaaacctctctattccctgccataacatcttttgccacgtatagctggaattaagtgttgtcttggagctgttgtacatttaagaataaacttttgtaaaaaaagaaaaatcttacagtggctcatcatctctttagttgttttcactaagtcattcctaccataactgtgaatttaaagtaaaaccagctcagaatcttgccagagtctgttctttggtccttgttctaccctaaactttgtatcacctgaaattaaaccaactcatttgaaaaaaaaaaaaaaaagttggggggcgcctgagccagaaaaagttttaaacccatcgctgggccgcggcggccagtatgattagtggaaaattggcataaggggtcccaaggaaaccgggctcagacatgggcgggttcccccataaaaacgcgcggcccgcctctggaacaaccagagggcgcgggcatccggctcacacggcgccgggccgtacccccccgcgggagtaaccaaaagacgatcacacagagaagacgaaaaagcaaaaacgacaagcaaggaagacagtaaacgaaaagtaacacagagcgcgacaaacaaacagcatagtg

SEQ ID NO: 68858 - DNA, 649 bp, Homo sapiens
  misc_feature (530)..(530): n is a, c, g, or t
  misc_feature (538)..(538): n is a, c, g, or t
  misc_feature (540)..(540): n is a, c, g, or t
  misc_feature (544)..(544): n is a, c, g, or t
  misc_feature (552)..(552): n is a, c, g, or t
  misc_feature (554)..(554): n is a, c, g, or t
  misc_feature (556)..(557): n is a, c, g, or t
  misc_feature (564)..(565): n is a, c, g, or t
  misc_feature (583)..(583): n is a, c, g, or t
  misc_feature (585)..(585): n is a, c, g, or t
  misc_feature (589)..(589): n is a, c, g, or t
  misc_feature (596)..(596): n is a, c, g, or t
  misc_feature (598)..(598): n is a, c, g, or t
  misc_feature (604)..(604): n is a, c, g, or t
  misc_feature (607)..(607): n is a, c, g, or t
gtggggcagaagcagctttccggtggcagggtctggggaagcggcggcaggcgccatgtccggccgcgaaggtggcaagaagaagccactgaaacagcccaagaagcaggccaaggagatggacgaggaagataaggctttcaagcagaaacaaaaagaggagcagaagaaactcgaggagctaaaagcgaaggccgcggggaaggggcccttggccacaggtggaattaagaaatctggcaaaaagtaagctgttccttgtgcctgaggagatggtgaccctttatttcatctgtatttaaacctctctattccctgccataacatcttttgccacgtatagctggaattaagtgttgtcttggagctgttgtacatttaagaataaacttttgtaaaaaaaaaaaaaaaaaaaaaaaaaaaaaaaaaaaaaaaaaaaaaaaaagaaaaaaagaaaccccacttatataaaatatataacaaaaaaaaaattgtaccccctttgccccatgtgttttaaatttgggaangtttttcntngggnccaatttngngnnaatttgnnaaatgcccttaagggggngngttnaaaatanangggccnggnttttaccggggaattggccctggggttacccattcggctttt

SEQ ID NO: 68859 - DNA, 693 bp, Homo sapiens
gtggggcagaagcagctttccggtggcagggtctggggaagcggcggcaggcgccatgtccggccgcgaaggtaagtgttccggaaccgtgaggactgcggggacggcggggtggggaccgggcggcaggggcaggccgaacgtgctcgtgtcgcccacaggtggcaagaagaagccactgaaacagcccaagaagcaggccaaggagatggacgaggaagataaggctttcaagcagaaacaaaaagaggagcagaagaaactcgaggagctaaaagcgaaggccgcggggaaggggcccttggccacaggtggaattaagaaatctggcaaaaagtaagctgttccttgtgcctgaggagatggtgaccctttatttcatctgtatttaaacctctctattccctgccataacatcttttgccacgtatagctggaattaagtgttgtcttggagctgttgtacatttaagaataaacttttgtaaaaaaagaaaaatcttacagtggctcatcatctctttagttgttttcactaagtcattcctaccataactgtgaatttaaagtaaaaccagctcagaatcttgccagagtctgttctttggtccttgttctaccctaaactttgtatcacctgaaattaaaccaactcatttgaaacacaacacacacaaaaaactctccagcgct

SEQ ID NO: 68860 - DNA, 703 bp, Homo sapiens
gtggggcagaagcagctttccggtggcagggtctggggaagcggcggcaggcgccatgtccggccgcgaaggtggcaagaagaagccactgaaacagcccaagaagcaggccaaggagatggacgaggaagataaggctttcaagcagaaacaaaaagaggagcagaagaaactcgaggagctaaaagcgaaggccgcggggaaggggcccttggccacaggtggaattaagaaatctggcaaaaagtaagctgttccttgtgcctgaggagatggtgaccctttatttcatctgtatttaaacctctctattccctgccataacatcttttgccacgtatagctggaattaagtgttgtcttggagctgttgtacatttaagaataaacttttgtaaaaaaatgacactcccccaccgatactccccacccacacgtaaccccacgctccatcctccaaaaccccgcttgcccaccccacctcacaccacaactctcaaacagtgccgctcccttggccacaacccttggaacccttcccaccctttatgcccgttcgccaatttcattacattggccactcggcctattagaggcggcttaccaactgccgcccgctccaacccatctgcctttgctaacaactctgctttccccaactttactccctccgacacaccccccctttctccgtgctttcgct

SEQ ID NO: 68861 - DNA, 451 bp, Homo sapiens
gtggggcagaagcagctttccggtggcagggtctggggaagcggcggcaggcgccatgtccggccgcgaaggtggcaagaagaagccactgaaacagcccaagaagcaggccaaggagatggacgaggaagataaggctttcaagcagaaacaaaaagaggagcagaagaaactcgaggagctaaaagcgaaggccgcggggaaggggcccttggccacaggtggaattaagaaatctggcaaaaagtaagctgttccttgtgcctgaggagatggtgaccctttatttcatctgtatttaaacctctctattccctgccataacatcttttgccacgtatagctggaattaagtgttgtcttggagctgttgtacatttaagaataaacttttgtaaaaaaagatgggacataatattttgcgtgtggtaaaaaaaaaactcggagagtg

SEQ ID NO: 68862 - DNA, 450 bp, Homo sapiens
cgatgtggaagacagctacgggcagcagtggacctatgagcagaagaaactcgaggagctaaaagcgaaggccgcggggaaggggcccttggccacaggtggaattaagaaatctggcaaaaagtaagctgttccttgtgcctgaggagatggtgaccctttatttcatctgtatttaaacctctctattccctgccataacatcttttgccacgtatagctggaattaagtgttgtcttggagctgttgtacatttaagaataaacttttgtaaaaaaagaaaaatcttacagtggctcatcatctctttagttgttttcactaagtcattcctaccataactgtgaatttaaagtaaaaccagctcagaatcttgccagagtctgttctttggtccttgttctaccctaaactttgtatcacctgaaattaaaccaactcatttgaaa

SEQ ID NO: 68863 - DNA, 372 bp, Homo sapiens
aggatccccaactacgcagctatccaaggagatggacgaggaagataaggctttcaagcagaaacaaaaagaggagcagaagaaactcgaggagctaaaagcgaaggccgcggggaaggggcccttggccacaggtggaattaagaaatctggcaaaaagtaagctgttccttgtgcctgaggagatggtgaccctttatttcatctgtatttaaacctctctattccctgccataacatcttttgccacgtatagctggaattaagtgttgtcttggagctgttgtacatttaagaataaacttttgtaaaaaaaccgcacactacctcccctcagactccccttgcgggccgcctcgtcccgtcgcccct

SEQ ID NO: 68864 - DNA, 842 bp, Homo sapiens
ttcacccgcctctgcctcccagagtgctcggattacaagcgtgagccacagcacctggccaactttttttttttttttcgtactgcttatattatctctaatatatgcttttttgctttctgagtctttttacttctgggtatgcctagactaaaagataaagtccaggctcttcagtgtgctgttgctccatatgcttttctaactgaatcctccaccttttttacatcttttatgtaggagaaattcattacatttcaaaatatttttcaggcccagcagttctagtactttatgtgcatcataagcattattttacattgatccaactagtgattatttcctccacagttgtttatgcccccatttgagcactgtgagccatgctaggcatgatggagacaaggatggtgggagtgtcatctagggcttcccaagacctctctcccagtgggtttgatccattattgtttacctacccagcactgagatttctagctcttgagattccttttcagaatggtgtaaggggccaggcacagaatgggctgaccataatccaagtgctttgggaggcctaagcaggaggattatttaagactaggagttccatcatcaaagggagaccctgtctacagaaaaaatttaaaattagctgggcgtggtggtggtggcggcccgtttcctgtaatcccagctatttaaaaggctgaggcagcctcgcttaagcccaggagttcaaggtaagaggattatttgagcacgggagttcaggctgtagtgagctgggattgcgccactgtattccagcctgggagatagaatgagaccctatctcaaaa

SEQ ID NO: 68865 - DNA, 188 bp, Homo sapiens
acaaaaattagccgggtatgcgtgcatgcgcctgtaatcccagctatttaaaaggctgaggcagcctcgcttaagcccaggagttcaaggtaagaggattatttgagcacgggagttcaggctgtagtgagctgggattgcgccactgtattccagcctgggagatagaatgagaccctatctcaaaa

SEQ ID NO: 68866 - DNA, 606 bp, Homo sapiens
ttccgaattttaatacgacctcacctatagggaaatttttgcccctcgaggccccaagaattccggccaccgaagggcggcaggcgccatgtccggccgcgaaggtggcaagaagaagccactgaaacagcccaagaagcaggccaaggagatggacgaggaagataaggctttcaagcagaaacaaaaagaggagcagaagaaactcgaggagctaaaagcgaaggccgcggggaaggggcccttggccacaggtggaattaagaaatctggcaaaaagtaagctgttccttgtgcctgaggagatggtgaccctttatttcatctgtatttaaacctctctattccctgccataacatcttttgccacgtatagctggaattaagtgttgtcttggagctgttgtacatttaagaataaacttttgtaaaaaaagaaaaatcttacagtggctcatcatctctttagttgttttcactaagtcattcctaccataactgtgaatttaaagtaaaaccagctcagaatcttgccagagtctgttctttggtccttgttctaccctaaactttgtatcacctgaaattaaaccaactcatttgaaa

SEQ ID NO: 68867 - DNA, 657 bp, Homo sapiens
  misc_feature (6)..(6): n is a, c, g, or t
  misc_feature (26)..(26): n is a, c, g, or t
  misc_feature (103)..(103): n is a, c, g, or t
  misc_feature (114)..(114): n is a, c, g, or t
  misc_feature (116)..(116): n is a, c, g, or t
  misc_feature (126)..(126): n is a, c, g, or t
aaacgncggccgaaccgatccatttngggcgattggttaccggccccccctcgagtcgacgtttcgattaagctgatttcgattcccgccccgtcgatacggntgcagaagacncngagggggaanggcggcaggcgccatgtccggccgcgaaggtggcaagaagaagccactgaaacagcccaagaagcaggccaaggagatggacgaggaagataaggctttcaagcagaaacaaaaagaggagcagaagaaactcgaggagctaaaagcgaaggccgcggggaaggggcccttggccacaggtggaattaagaaatctggcaaaaagtaagctgttccttgtgcctgaggagatggtgaccctttatttcatctgtatttaaacctctctattccctgccataacatcttttgccacgtatagctggaattaagtgttgtcttggagctgttgtacatttaagaataaacttttgtaaaaaaagaaaaatcttacagtggctcatcatctctttagttgttttcactaagtcattcctaccataactgtgaatttaaagtaaaaccagctcagaatcttgccagagtctgttctttggtccttgttctaccctaaactttgtatcacctgaaattaaaccaactcatttgaaa

SEQ ID NO: 68868 - DNA, 665 bp, Homo sapiens
aataaaggccagaacgttgtcctaaatgaatcctttgccttactttaggaccttccttccctctcaaattcaggcataatgtaatatagttgaaagggggaagcggcggcaggcgccatgtccggccgcgaaggtggcaagaagaagccactgaaacagcccaagaagcaggccaaggagatggacgaggaagataaggctttcaagcagaaacaaaaagaggagcagaagaaactcgaggagctaaaagcgaaggccgcggggaaggggcccttggccacaggtggaattaagaaatctggcaaaaagtaagctgttccttgtgcctgaggagatggtgaccctttatttcatctgtatttaaacctctctattccctgccataacatcttttgccacgtatagctggaattaagtgttgtcttggagctgttgtacatttaagaataaacttttgtaaaaaaagaaaaatcttacagtggctcatcatctctttagttgttttcactaagtcattcctaccataactgtgaatttaaagtaaaaccagctcagaatcttgccagagtctgttctttggtccttgttctaccctaaactttgtatcacctgaaattaaaccaactcatttgaaacacaacacacacaaaaaactctccagcgct

SEQ ID NO: 68869 - DNA, 901 bp, Homo sapiens
atcctccagaaccatccttgggaaactgtaggggcagtaagggagcgctatagtaatgtctgccagatttagtaaaagaatttaacaagtatgatacagatgggtcaaaatggattaaccagtatactggaatcaatgctatctcaagaaagagttttctatcgatgttggtatgagagattttgggaccgaaatcttttttcatccagagtttgctaatccagactttacacaacctatctcagaagttgtagatgaagtaattcagaattgtcctattgatgtcagacgtcctctctacaagaatattgtcctctctggaggttcaaccatgttcagggactttggacgtcgcttgcaaagagatttgaaaagaactgtagatgtccggccgcgaaggtggcaagaagaagccactgaaacagcccaagaagcaggccaaggagatggacgaggaagataaggctttcaagcagaaacaaaaagaggagcagaagaaactcgaggagctaaaagcgaaggccgcggggaaggggcccttggccacaggtggaattaagaaatctggcaaaaagtaagctgttccttgtgcctgaggagatggtgaccctttatttcatctgtatttaaacctctctattccctgccataacatcttttgccacgtatagctggaattaagtgttgtcttggagctgttgtacatttaagaataaacttttgtaaaaaaagaaaaatcttacagtggctcatcatctctttagttgttttcactaagtcattcctaccataactgtgaatttaaagtaaaaccagctcagaatcttgccagagtctgttctttggtccttgttctaccctaaactttgtatcacctgaaattaaaccaactcatttgaaa

SEQ ID NO: 68870 - DNA, 783 bp, Homo sapiens
aataaaggccagaacgttgtcctaaatgaatcctttgccttactttaggaccttccttccctctcaaattcaggcataatgtaatatagttgaaagggggaagcggcggcaggcgccatgtccggccgcgaaggtggcaagaagaagccactgaaacagcccaagaagcaggccaaggagatggacgaggaagataaggctttcaagcagaaacaaaaagaggagcagaagaaactcgaggagctaaaagcgaaggccgcggggaaggggcccttggccacaggtggaattaagaaatctggcaaaaagtaagctgttccttgtgcctgaggagatggtgaccctttatttcatctgtatttaaacctctctattccctgccataacatcttttgccacgtatagctggaattaagtgttgtcttggagctgttgtacatttaagaataaacttttgtaaaaaaaaaaaaaaaaaaaaaaaaaaaaaaaaaaaaaaaaaacaaaaaaaaaaaaaaaaaaaaaaaaaaaaaaaaaaaaaaaaaaaaaaaaaaaataaaaatatatatattatattaaatttaaatttgaaaattatttattaaaataataatatttataataatatttaataatatttattatatattaatagtttaattatgtgggaaaataaatttaattatgtgcaatatattcttttgggggtagtttaaatatttgggggtgggttctacacagtgtacttggtatcggttgtactcactcataatcgccttgtctttc

SEQ ID NO: 68871 - DNA, 502 bp, Homo sapiens
aataaaggccagaacgttgtcctaaatgaatcctttgccttactttaggaccttccttccctctcaaattcaggcataatgtaatatagttgaaagggggaagcggcggcaggcgccatgtccggccgcgaaggtggcaagaagaagccactgaaacagcccaagaagcaggccaaggagatggacgaggaagataaggctttcaagcagaaacaaaaagaggagcagaagaaactcgaggagctaaaagcgaaggccgcggggaaggggcccttggccacaggtggaattaagaaatctggcaaaaagtaagctgttccttgtgcctgaggagatggtgaccctttatttcatctgtatttaaacctctctattccctgccataacatcttttgccacgtatagctggaattaagtgttgtcttggagctgttgtacatttaagaataaacttttgtaaaaaaaccaaactaaaaatgcctagaaaactaaaaatccttgt

SEQ ID NO: 68872 - DNA, 486 bp, Homo sapiens
aggatccccaactacgcagctatccaaggagatggacgaggaagataaggctttcaagcagaaacaaaaagaggagcagaagaaactcgaggagctaaaagcgaaggccgcggggaaggggcccttggccacaggtggaattaagaaatctggcaaaaagtaagctgttccttgtgcctgaggagatggtgaccctttatttcatctgtatttaaacctctctattccctgccataacatcttttgccacgtatagctggaattaagtgttgtcttggagctgttgtacatttaagaataaacttttgtaaaaaaagaaaaatcttacagtggctcatcatctctttagttgttttcactaagtcattcctaccataactgtgaatttaaagtaaaaccagctcagaatcttgccagagtctgttctttggtccttgttctaccctaaactttgtatcacctgaaattaaaccaactcatttgaaa

SEQ ID NO: 68873 - DNA, 466 bp, Homo sapiens
aagatatcaaaacatttttagaagataaggctttcaagcagaaacaaaaagaggagcagaagaaactcgaggagctaaaagcgaaggccgcggggaaggggcccttggccacaggtggaattaagaaatctggcaaaaagtaagctgttccttgtgcctgaggagatggtgaccctttatttcatctgtatttaaacctctctattccctgccataacatcttttgccacgtatagctggaattaagtgttgtcttggagctgttgtacatttaagaataaacttttgtaaaaaaagaaaaatcttacagtggctcatcatctctttagttgttttcactaagtcattcctaccataactgtgaatttaaagtaaaaccagctcagaatcttgccagagtctgttctttggtccttgttctaccctaaactttgtatcacctgaaattaaaccaactcatttgaaa

SEQ ID NO: 68874 - DNA, 755 bp, Homo sapiens
  misc_feature (13)..(14): n is a, c, g, or t
ctttcggcacagnncgcggtcaccatgtccggccgcgaaggtggcaagaagaagccactgaaacagcccaagaagcaggccaaggagatggacgaggtgagggcgggcgcggaggcactggcgggtgcgggggcgctgggagacaggcctgagttgaacacgctctgcctctccccaggaagataaggctttcaagcagaaacaaaaagaggagcagaagaaactcgaggagctaaaagcgaaggccgcggggaaggggcccttgggtaagtgggggccgaatggagctcaagctggccaaacgctatgagcacctattgggatgagggcgcgggcatgtctttttcctgcctcctgaactgcgaggtctcgttttccgacgtccgctgcagcgaatggtctctagccagtctaggatttgcagcggcagtaagggccgggagctggaaacgaggtctcctgcctcccaggcagtctgggcttccattccttaggaagagctgcagaaacggaaacagtgaaatgtatttacctcagacgcagattcacagttaagtttctcaaagtctgacgtcgtccgcaatcttttgccccaaattcgtatttcactgccttctagtgtttgaaccttacttgacttagaagtttttttgttttgttttgttttgtttgagacagagtctcactctgtctcccagctgggattgcgccactgtattccagcctgggagatagaatgagaccctatctcaaaa

SEQ ID NO: 68875 - DNA, 520 bp, Homo sapiens
gtactctagagaatctttaaaggcagtccgggtaagtgggggccgaatggagctcaagctggccaaacgctatgagcacctattgggatgagggcgcgggcatgtctttttcctgcctcctgaactgcgaggtctcgttttccgacgtccgctgcagcgaatggtctctagccagtctaggatttgcagcggcagtaagggccgggagctggaaacgaggtctcctgcctcccaggcagtctgggcttccattccttaggaagagctgcagaaacggaaacagtgaaatgtatttacctcagacgcagattcacagttaagtttctcaaagtctgacgtcgtccgcaatcttttgccccaaattcgtatttcactgccttctagtgtttgaaccttacttgacttagaagtttttttgttttgttttgttttgtttgagacagagtctcactctgtctcccagctgggattgcgccactgtattccagcctgggagatagaatgagaccctatctcaaaa

SEQ ID NO: 68876 - DNA, 380 bp, Homo sapiens
gagaatttgcttcataccttggaggcagaggtttgcatgtaggccgagatcgttgtcccttcactgcatccttgggcgacaagagcacagattccatctccgttaaaaaaaataaaaggacttctttttctgtaaaatgggttgatatggcactgaggattaaataacccaatctgtgaagtatacggaagtgtagatctagaccagtgcacagccagccactgcttgtactccatctcatcctcattttacctttacctagaacagacagtatcagtgaagctgctatccatgcttgtgttaaagtgaatgcccaatacaaaagccaggctttactaaggtccacagcaggcccgtggggcttctaccgtaagaactat

SEQ ID NO: 68877 - DNA, 542 bp, Homo sapiens
  misc_feature (13)..(14): n is a, c, g, or t
ctttcggcacagnncgcggtcaccatgtccggccgcgaaggtggcaagaagaagccactgaaacagcccaagaagcaggccaaggagatggacgaggaagataaggctttcaagcagaaacaaaaagaggagcagaagaaactcgaggagctaaaagcgaaggccgcggggaaggggcccttggccacaggtggaattaagaaatctggcaaaaagtaagctgttccttgtgcctgaggagatggtgaccctttatttcatctgtatttaaacctctctattccctgccataacatcttttgccacgtatagctggaattaagtgttgtcttggagctgttgtacatttaagaataaacttttgtaaaaaaagaaaaatcttacagtggctcatcatctctttagttgttttcactaagtcattcctaccataactgtgaatttaaagtaaaaccagctcagaatcttgccagagtctgttctttggtccttgttctaccctaaactttgtatcacctgaaattaaaccaactcatttgaaa

SEQ ID NO: 68878 - DNA, 573 bp, Homo sapiens
gtggggcagaagcagctttccggtggcagggtctggggaagcggcggcaggcgccatgtccggccgcgaaggtggcaagaagaagccactgaaacagcccaagaagcaggccaaggagatggacgaggaagataaggctttcaagcagaaacaaaaagaggagcagaagaaactcgaggagctaaaagcgaaggccgcggggaaggggcccttggccacaggtggaattaagaaatctggcaaaaagtaagctgttccttgtgcctgaggagatggtgaccctttatttcatctgtatttaaacctctctattccctgccataacatcttttgccacgtatagctggaattaagtgttgtcttggagctgttgtacatttaagaataaacttttgtaaaaaaagaaaaatcttacagtggctcatcatctctttagttgttttcactaagtcattcctaccataactgtgaatttaaagtaaaaccagctcagaatcttgccagagtctgttctttggtccttgttctaccctaaactttgtatcacctgaaattaaaccaactcatttgaaa

SEQ ID NO: 68879 - DNA, 744 bp, Homo sapiens
  misc_feature (13)..(14): n is a, c, g, or t
ctttcggcacagnncgcggtcaccatgtccggccgcgaaggtggcaagaagaagccactgaaacagcccaagaagcaggccaaggagatggacgaggaagataaggctttcaagcagaaacaaaaagaggagcagaagaaactcgaggagctaaaagcgaaggccgcggggaaggggcccttggccacaggtggaattaagaaatctggcaaaaagtaagctgttccttgtgcctgaggagatggtgaccctttatttcatctgtatttaaacctctctattccctgccataacatcttttgccacgtatagctggaattaagtgttgtcttggagctgttgtacatttaagaataaacttttgtaaaaaaagaaaaatcttacagtggctcatcatctctttagttgttttcactaagtcattcctaccataactgtgaatttaaagtaaaaccagctcagaatcttgccagagtctgttctttggtccttgttctaccctaaactttgtatcacctgaaattaaaccaactcatttgaaaatctcacttattaaattccctacaaaaactggtccgcccccttggccctaagtactctagacttttaaaagattatctgtccgccctcaatccgagcctacttggacattcctccctatagggaccgtataccaataactttctgttggaaaccaacatcgtagttcgaacaactgtgatatacccccttacacgaattaaa

SEQ ID NO: 68880 - DNA, 754 bp, Homo sapiens
ttccgaattttaatacgacctcacctatagggaaatttttgcccctcgaggccccaagaattccggccaccgaagggcggcaggcgccatgtccggccgcgaaggtggcaagaagaagccactgaaacagcccaagaagcaggccaaggagatggacgaggaagataaggctttcaagcagaaacaaaaagaggagcagaagaaactcgaggagctaaaagcgaaggccgcggggaaggggcccttggccacaggtggaattaagaaatctggcaaaaagtaagctgttccttgtgcctgaggagatggtgaccctttatttcatctgtatttaaacctctctattccctgccataacatcttttgccacgtatagctggaattaagtgttgtcttggagctgttgtacatttaagaataaacttttgtaaaaaaaaaaaaaaaaaaaaaaaaaaaaaaaaaaaaaaaaaacaaaaaaaaaaaaaaaaaaaaaaaaaaaaaaaaaaaaaaaaaaaaaaaaaaaataaaaatatatatattatattaaatttaaatttgaaaattatttattaaaataataatatttataataatatttaataatatttattatatattaatagtttaattatgtgggaaaataaatttaattatgtgcaatatattcttttgggggtagtttaaatatttgggggtgggttctacacagtgtacttggtatcggttgtactcactcataatcgccttgtctttc

SEQ ID NO: 68881 - DNA, 761 bp, Homo sapiens
gtggggcagaagcagctttccggtggcagggtctggggaagcggcggcaggcgccatgtccggccgcgaaggtggcaagaagaagccactgaaacagcccaagaagcaggccaaggagatggacgaggaagataaggctttcaagcagaaacaaaaagaggagcagaagaaactcgaggagctaaaagcgaaggccgcggggaaggggcccttggccacaggtggaattaagaaatctggcaaaaagtaagctgttccttgtgcctgaggagatggtgaccctttatttcatctgtatttaaacctctctattccctgccataacatcttttgccacgtatagctggaattaagtgttgtcttggagctgttgtacatttaagaataaacttttgtaaaaaaacttttgtttatttattataattaagtcttgtattcatatactttcctatgtttctctctcttacattttcttctctatctttatattctctatacttctatatctttgttacctcttttgcactttaatctaactcgctatcttctacaccctcctctactactctccttcctatcattgtccctatttcccttattctccactgtcttctttcttctttttaatggtttgtattttccctactttctttctttcatcttatatctttgctctacttctttcgtctttctcatcattctgtcgttctcctctctacgtgctctctattctctacattcctctttctctttctctcccc

SEQ ID NO: 68882 - DNA, 459 bp, Homo sapiens
gtggggcagaagcagctttccggtggcagggtctggggaagcggcggcaggcgccatgtccggccgcgaaggtggcaagaagaagccactgaaacagcccaagaagcaggccaaggagatggacgaggaagataaggctttcaagcagaaacaaaaagaggagcagaagaaactcgaggagctaaaagcgaaggccgcggggaaggggcccttggccacaggtggaattaagaaatctggcaaaaagtaagctgttccttgtgcctgaggagatggtgaccctttatttcatctgtatttaaacctctctattccctgccataacatcttttgccacgtatagctggaattaagtgttgtcttggagctgttgtacatttaagaataaacttttgtaaaaaaattctacttattaattcatatttctctattctttttattcctcatcttaaaaaaaaa

SEQ ID NO: 68883 - DNA, 987 bp, Homo sapiens
  misc_feature (732)..(732): n is a, c, g, or t
  misc_feature (740)..(740): n is a, c, g, or t
  misc_feature (742)..(742): n is a, c, g, or t
  misc_feature (746)..(746): n is a, c, g, or t
  misc_feature (754)..(754): n is a, c, g, or t
  misc_feature (756)..(756): n is a, c, g, or t
  misc_feature (758)..(759): n is a, c, g, or t
  misc_feature (766)..(767): n is a, c, g, or t
  misc_feature (785)..(785): n is a, c, g, or t
  misc_feature (787)..(787): n is a, c, g, or t
  misc_feature (791)..(791): n is a, c, g, or t
  misc_feature (798)..(798): n is a, c, g, or t
  misc_feature (800)..(800): n is a, c, g, or t
  misc_feature (806)..(806): n is a, c, g, or t
  misc_feature (809)..(809): n is a, c, g, or t
atcctccagaaccatccttgggaaactgtaggggcagtaagggagcgctatagtaatgtctgccagatttagtaaaagaatttaacaagtatgatacagatgggtcaaaatggattaaccagtatactggaatcaatgctatctcaagaaagagttttctatcgatgttggtatgagagattttgggaccgaaatcttttttcatccagagtttgctaatccagactttacacaacctatctcagaagttgtagatgaagtaattcagaattgtcctattgatgtcagacgtcctctctacaagaatattgtcctctctggaggttcaaccatgttcagggactttggacgtcgcttgcaaagagatttgaaaagaactgtagatgtccggccgcgaaggtggcaagaagaagccactgaaacagcccaagaagcaggccaaggagatggacgaggaagataaggctttcaagcagaaacaaaaagaggagcagaagaaactcgaggagctaaaagcgaaggccgcggggaaggggcccttggccacaggtggaattaagaaatctggcaaaaagtaagctgttccttgtgcctgaggagatggtgaccctttatttcatctgtatttaaacctctctattccctgccataacatcttttgccacgtatagctggaattaagtgttgtcttggagctgttgtacatttaagaataaacttttgtaaaaaaangtttttcntngggnccaatttngngnnaatttgnnaaatgcccttaagggggngngttnaaaatanangggccnggnttttaaacagggggagtggggaaaccctggggggtcccaatataaaggtgtggggaaaaacccccttttcacagggggggaataaaaaaaaaggggcccacaatcgccttttcaaaaaaattggcccccttttggggagaggaaattatgcgcctttttttttttcccggttttttgt

SEQ ID NO: 68884 - DNA, 562 bp, Homo sapiens
gcccaagctgtcagcactccttgggggaagcggcggcaggcgccatgtccggccgcgaaggtggcaagaagaagccactgaaacagcccaagaagcaggccaaggagatggacgaggaagataaggctttcaagcagaaacaaaaagaggagcagaagaaactcgaggagctaaaagcgaaggccgcggggaaggggcccttggccacaggtggaattaagaaatctggcaaaaagtaagctgttccttgtgcctgaggagatggtgaccctttatttcatctgtatttaaacctctctattccctgccataacatcttttgccacgtatagctggaattaagtgttgtcttggagctgttgtacatttaagaataaacttttgtaaaaaaagaaaaatcttacagtggctcatcatctctttagttgttttcactaagtcattcctaccataactgtgaatttaaagtaaaaccagctcagaatcttgccagagtctgttctttggtccttgttctaccctaaactttgtatcacctgaaattaaaccaactcatttgaaa

SEQ ID NO: 68885 - DNA, 663 bp, Homo sapiens
gtggggcagaagcagctttccggtggcagggtctggggaagcggcggcaggcgccatgtccggccgcgaaggtaagtgttccggaaccgtgaggactgcggggacggcggggtggggaccgggcggcaggggcaggccgaacgtgctcgtgtcgcccacaggtggcaagaagaagccactgaaacagcccaagaagcaggccaaggagatggacgaggaagataaggctttcaagcagaaacaaaaagaggagcagaagaaactcgaggagctaaaagcgaaggccgcggggaaggggcccttggccacaggtggaattaagaaatctggcaaaaagtaagctgttccttgtgcctgaggagatggtgaccctttatttcatctgtatttaaacctctctattccctgccataacatcttttgccacgtatagctggaattaagtgttgtcttggagctgttgtacatttaagaataaacttttgtaaaaaaagaaaaatcttacagtggctcatcatctctttagttgttttcactaagtcattcctaccataactgtgaatttaaagtaaaaccagctcagaatcttgccagagtctgttctttggtccttgttctaccctaaactttgtatcacctgaaattaaaccaactcatttgaaa

SEQ ID NO: 68886 - DNA, 745 bp, Homo sapiens
gtggggcagaagcagctttccggtggcagggtctggggaagcggcggcaggcgccatgtccggccgcgaaggtaagtgttccggaaccgtgaggactgcggggacggcggggtggggaccgggcggcaggggcaggccgaacgtgctcgtgtcgcccacaggtggcaagaagaagccactgaaacagcccaagaagcaggccaaggagatggacgaggtgagggcgggcgcggaggcactggcgggtgcgggggcgctgggagacaggcctgagttgaacacgctctgcctctccccaggaagataaggctttcaagcagaaacaaaaagaggagcagaagaaactcgaggagctaaaagcgaaggccgcggggaaggggcccttggccacaggtggaattaagaaatctggcaaaaagtaagctgttccttgtgcctgaggagatggtgaccctttatttcatctgtatttaaacctctctattccctgccataacatcttttgccacgtatagctggaattaagtgttgtcttggagctgttgtacatttaagaataaacttttgtaaaaaaagaaaaatcttacagtggctcatcatctctttagttgttttcactaagtcattcctaccataactgtgaatttaaagtaaaaccagctcagaatcttgccagagtctgttctttggtccttgttctaccctaaactttgtatcacctgaaattaaaccaactcatttgaaa

SEQ ID NO: 68887 - DNA, 475 bp, Homo sapiens
tagaggatcccatctcaggccaggacgaggaagataaggctttcaagcagaaacaaaaagaggagcagaagaaactcgaggagctaaaagcgaaggccgcggggaaggggcccttggccacaggtggaattaagaaatctggcaaaaagtaagctgttccttgtgcctgaggagatggtgaccctttatttcatctgtatttaaacctctctattccctgccataacatcttttgccacgtatagctggaattaagtgttgtcttggagctgttgtacatttaagaataaacttttgtaaaaaaagaaaaatcttacagtggctcatcatctctttagttgttttcactaagtcattcctaccataactgtgaatttaaagtaaaaccagctcagaatcttgccagagtctgttctttggtccttgttctaccctaaactttgtatcacctgaaattaaaccaactcatttgaaa

SEQ ID NO: 68888 - DNA, 704 bp, Homo sapiens
gtggggcagaagcagctttccggtggcagggtctggggaagcggcggcaggcgccatgtccggccgcgaaggtggcaagaagaagccactgaaacagcccaagaagcaggccaaggagatggacgaggaagataaggctttcaagcagaaacaaaaagaggagcagaagaaactcgaggagctaaaagcgaaggccgcggggaaggggcccttgggtaagtgggggccgaatggagctcaagctggccaaacgctatgagcacctattgggatgagggcgcgggcatgtctttttcctgcctcctgaactgcgaggtctcgttttccgacgtccgctgcagcgaatggtctctagccagtctaggatttgcagcggcagtaagggccgggagctggaaacgaggtctcctgcctcccaggcagtctgggcttccattccttaggaagagctgcagaaacggaaacagtgaaatgtatttacctcagacgcagattcacagttaagtttctcaaagtctgacgtcgtccgcaatcttttgccccaaattcgtatttcactgccttctagtgtttgaaccttacttgacttagaagtttttttgttttgttttgttttgtttgagacagagtctcactctgtctcccagctgggattgcgccactgtattccagcctgggagatagaatgagaccctatctcaaaa

SEQ ID NO: 68889 - DNA, 666 bp, Homo sapiens
  misc_feature (469)..(469): n is a, c, g, or t
  misc_feature (481)..(481): n is a, c, g, or t
  misc_feature (484)..(484): n is a, c, g, or t
  misc_feature (487)..(487): n is a, c, g, or t
  misc_feature (489)..(489): n is a, c, g, or t
  misc_feature (491)..(491): n is a, c, g, or t
  misc_feature (495)..(495): n is a, c, g, or t
  misc_feature (497)..(499): n is a, c, g, or t
  misc_feature (506)..(507): n is a, c, g, or t
  misc_feature (512)..(512): n is a, c, g, or t
  misc_feature (515)..(515): n is a, c, g, or t
  misc_feature (518)..(518): n is a, c, g, or t
  misc_feature (521)..(522): n is a, c, g, or t
  misc_feature (524)..(524): n is a, c, g, or t
  misc_feature (527)..(527): n is a, c, g, or t
  misc_feature (529)..(529): n is a, c, g, or t
  misc_feature (532)..(532): n is a, c, g, or t
  misc_feature (534)..(535): n is a, c, g, or t
  misc_feature (540)..(540): n is a, c, g, or t
  misc_feature (543)..(543): n is a, c, g, or t
  misc_feature (545)..(546): n is a, c, g, or t
  misc_feature (552)..(552): n is a, c, g, or t
  misc_feature (558)..(558): n is a, c, g, or t
  misc_feature (567)..(567): n is a, c, g, or t
  misc_feature (572)..(572): n is a, c, g, or t
  misc_feature (581)..(581): n is a, c, g, or t
  misc_feature (587)..(587): n is a, c, g, or t
  misc_feature (602)..(602): n is a, c, g, or t
  misc_feature (628)..(628): n is a, c, g, or t
  misc_feature (633)..(633): n is a, c, g, or t
  misc_feature (635)..(635): n is a, c, g, or t
  misc_feature (637)..(637): n is a, c, g, or t
  misc_feature (651)..(652): n is a, c, g, or t
  misc_feature (655)..(655): n is a, c, g, or t
  misc_feature (658)..(658): n is a, c, g, or t
aataaaggccagaacgttgtcctaaatgaatcctttgccttactttaggaccttccttccctctcaaattcaggcataatgtaatatagttgaaagggggaagcggcggcaggcgccatgtccggccgcgaaggtggcaagaagaagccactgaaacagcccaagaagcaggccaaggagatggacgaggaagataaggctttcaagcagaaacaaaaagaggagcagaagaaactcgaggagctaaaagcgaaggccgcggggaaggggcccttggccacaggtggaattaagaaatctggcaaaaagtaagctgttccttgtgcctgaggagatggtgaccctttatttcatctgtatttaaacctctctattccctgccataacatcttttgccacgtatagctggaattaagtgttgtcttggagctgttgtacatttaagaataaacttttgtaaaaaaagaanaaaaatgcttgnctnggngnanaagnannnaatggtnnaaaanggntanagnnantgnangtntnngggcngcntnnacccantgaatnttgatttgncaagntaaacatgnggcccnaatagggcttcctgnccaattgccctatagggggccgaatnacaanancntggccccgggttannaantgnagactggt

SEQ ID NO: 68890 - DNA, 988 bp, Homo sapiens
aataaaggccagaacgttgtcctaaatgaatcctttgccttactttaggaccttccttccctctcaaattcaggcataatgtaatatagttgaaagggggaagcggcggcaggcgccatgtccggccgcgaaggtggcaagaagaagccactgaaacagcccaagaagcaggccaaggagatggacgaggaagataaggctttcaagcagaaacaaaaagaggagcagaagaaactcgaggagctaaaagcgaaggccgcggggaaggggcccttggccacaggtggaattaagaaatctggcaaaaagtaagctgttccttgtgcctgaggagatggtgaccctttatttcatctgtatttaaacctctctattccctgccataacatcttttgccacgtatagctggaattaagtgttgtcttggagctgttgtacatttaagaataaacttttgtaaaaaaagaaaaatcttacagtggctcatcatctctttagttgttttcactaagtcattcctaccataactgtgaatttaaagtaaaaccagctcagaatcttgccagagtctgttctttggtccttgttctaccctaaactttgtatcacctgaaattaaaccaactcatttgaaaaaaaaaaaaaaaaaaaaaaaaaaaaaaaaaaaaaacaaaaaaaagagaaaaaagaggagggagcgagcaaagagaatgaaaagaggaggaagaaggagaaatagtagaagtgttaataaaaaaaagagggggggacaataaatacaacgggggagagaaacaggcaacacacaatgagaaaggcgcgaagaagggagaaataaaaaaggggcgtaaagagtggagtggagaaaaaggagaaacgtgtggagacaaagtggggggggaaaatggacaaataagaaatagggtgaaatatactgggtatgtgacaaagagtaaggggaagaggtgcttattgggagaaaagaaaa

SEQ ID NO: 68891 - DNA, 5475 bp, Homo sapiens
gagagagaaggagaagataatatactgaaaagaagaggaggaggagagcgacgggacgggacgcgagcgggagcgcagccgccctctcggctccgcggcggcgcctcgcaagtccgggaggcgaggggggcccgaggggagacgccgtgacaactttcgtttccctctgagggaattgggaggtcggcggccccaaaagctttcagtccagtgtaaagctgttggagcgcgggagcaaaggtaaagaatgatgtaatgcgctggctgctccaaagcatcttttgttgtggaatggttattccagtcatctctttatgaatcaaatgtgaggggctgctttgtggacggagtcctttgcaagagcacatcaacgggaaagagaaagagacattcacttggagggctcttgctgaaaatgggtttaactctccttttgccagtcaccaccagcctgacctcatacacttttagtacaatggagtggctgagcctttgagcacaccaccattacatcatcgtggcaaattaaagaaggaggtgggaaaagaggacttattgttgtcatggcccatgagatgattggaactcaaattgttactgagaggttggtggctctgctggaaagtggaacggaaaaagtgctgctaattgatagccggccatttgtggaatacaatacatcccacattttggaagccattaatatcaactgctccaagcttatgaagcgaaggttgcaacaggacaaagtgttaattacagagctcatccagcattcagcgaaacataaggttgacattgattgcagtcagaaggttgtagtttacgatcaaagctcccaagatgttgcctctctctcttcagactgttttctcactgtacttctgggtaaactggagaagagcttcaactctgttcacctgcttgcaggtgggtttgctgagttctctcgttgtttccctggcctctgtgaaggaaaatccactctagtccctacctgcatttctcagccttgcttacctgttgccaacattgggccaacccgaattcttcccaatctttatcttggctgccagcgagatgtcctcaacaaggagctgatgcagcagaatgggattggttatgtgttaaatgccagcaatacctgtccaaagcctgactttatccccgagtctcatttcctgcgtgtgcctgtgaatgacagcttttgtgagaaaattttgccgtggttggacaaatcagtagatttcattgagaaagcaaaagcctccaatggatgtgttctagtgcactgtttagctgggatctcccgctccgccaccatcgctatcgcctacatcatgaagaggatggacatgtctttagatgaagcttacagatttgtgaaagaaaaaagacctactatatctccaaacttcaattttctgggccaactcctggactatgagaagaagattaagaaccagactggagcatcagggccaaagagcaaactcaagctgctgcacctggagaagccaaatgaacctgtccctgctgtctcagagggtggacagaaaagcgagacgcccctcagtccaccctgtgccgactctgctacctcagaggcagcaggacaaaggcccgtgcatcccgccagcgtgcccagcgtgcccagcgtgcagccgtcgctgttagaggacagcccgctggtacaggcgctcagtgggctgcacctgtccgcagacaggctggaagacagcaataagctcaagcgttccttctctctggatatcaaatcagtttcatattcagccagcatggcagcatccttacatggcttctcctcatcagaagatgctttggaatactacaaaccttccactactctggatgggaccaacaagctatgccagttctcccctgttcaggaactatcggagcagactcccgaaaccagtcctgataaggaggaagccagcatccccaagaagctgcagaccgccaggccttcagacagccagagcaagcgattgcattcggtcagaaccagcagcagtggcaccgcccagaggtcccttttatctccactgcatcgaagtgggagcgtggaggacaattaccacaccagcttccttttcggcctttccaccagccagcagcacctcacgaagtctgctggcctgggccttaagggctggcactcggatatcttggccccccagacctctaccccttccctgaccagcagctggtattttgccacagagtcctcacacttctactctgcctcagccatctacggaggcagtgccagttactctgcctacagctgcagccagctgcccacttgcggagaccaagtctattctgtgcgcaggcggcagaagccaagtgacagagctgactcgcggcggagctggcatgaagagagcccctttgaaaagcagtttaaacgcagaagctgccaaatggaatttggagagagcatcatgtcagagaacaggtcacgggaagagctggggaaagtgggcagtcagtctagcttttcgggcagcatggaaatcattgaggtctcctgagaagaaagacacttgtgacttctatagacaatttttttttcttgttcacaaaaaaattccctgtaaatctgaaatatatatatgtacatacatatatatttttggaaaatggagctatggtgtaaaagcaacaggtggatcaacccagttgttactctcttaacatctgcatttgagagatcagctaatacttctctcaacaaaaatggaagggcagatgctagaatcccccctagacggaggaaaaccattttattcagtgaattacacatcctcttgttcttaaaaaagcaagtgtctttggtgttggaggacaaaatcccctaccattttcacgttgtgctactaagagatctcaaatattagtctttgtccggacccttccatagtacaccttagcgctgagactgagccagcttgggggtcaggtaggtagaccctgttagggacagagcctagtggtaaatccaagagaaatgatcctatccaaagctgattcacaaacccacgctcacctgacagccgagggacacgagcatcactctgctggacggaccattaggggccttgccaaggtctaccttagagcaaacccagtacctcagacaggaaagtcggggctttgaccactaccatatctggtagcccattttctaggcattgtgaataggtaggtagctagtcacacttttcagaccaattcaaactgtctatgcacaaaattcccgtgggcctagatggagataatttttttttcttctcagctttatgaagagaagggaaactgtctaggattcagctgaaccaccaggaacctggcaacatcacgatttaagctaaggttgggaggctaacgagtctacctccctctttgtaaatcaaagaattgtttaaaatgggattgtcaatcctttaaataaagatgaacttggtttcaagccaaatgtgaatttatttgggttggtagcagagcagcagcaccttcaaattctcagccaaagcagatgtttttgccctttctgcttcactgcatggatacagttggtaaaatgtaataatatggcagaattttataggaaacttcctagggaggtaaattatgggaagattaagaaaggtacaaattgctgaggagaagcaggaaacctgtttccttagtggcttttatcccctcggcatgcgatggggctgatgtttctataattgcctcagactttcacatttactagtagggctgagagaggctttagtgaggaaggaatattcagaataaaacggttgagaaagctgagaagaccattgagttttgatcagttgtgaatagagtgcaaagccatggccaagctgtttttggaaacgctggccggcgtgtcttcagtggaaaaagcaaatcaaaatggagcgagagcaaaggggcgtcctcagtcctcaacctacaatcactgtatggaatcggtcctggcagctgaacataggaggtcactggaacaagtgatagtgcagattggctttcaaacatcctcctggcttgagttttatcagctacaatgtgggtcctcttttgaagccttaattcacaacagcagctttttgggggtggggctgggcgggtgttgtcattgttctttcccttcctgtaagtgtcgctagttgctgcctcgtatctcaggtttttctctgtttttgagaaatggacagttttttgaccaggatgtgacttcatgtttcctatggtgacttctaaaaccagcacagaatgatatgactcaacacagaccgacttggttatggggatgatgagccgcacagacctcactagttgtgcacaaataatgtgctatgatggggtgtaaagtgaaggcagaagagggtcagccgcattgttatgatactgggaaagtgctggtcaacgatttgagttagtttttagatatacattgaaatctttaatcagacattctcaagtttcacacagtagtttttgatgttatgtacacacacaccaaatgtgtaacagttcaccacttccagagtgtggtcatgcccaaaacatgtttaagaaaggaaagcagtagctccttgctaacgatgtttcaggaggtttgggggacttggttttaatgagcttctgtcatttagggcttctcttggccatggtcccccttccttctggaactgtgatgtagtcacatcctacagcctttagtgctggttcactagtgtcagataatcagttcttggaatcgagactgccgtggcgaaggggtggcctcggaggcaggctctggagctgcttggatgtctttaggtggggtggtggctggctctcttcagcatgtaattggggaaaccctcgcgtctactaggggtgatacagatggtgattttaaagagcaaaactagacttctatgtgagaagtgctggaaaatgatttaggacatgtgtaaagttagatggaaagactgtaaatgtttaatatgaatatagtgttcttttgaagtaaggccagctgttgaacggttaaactgtgcatttctcattttgatgtgtcatgtatgttaatgtatgaaatgattaaataaaatcaaaactggtacctgtttatacataaatacgagaaaagacctatctttgcagccataaactcggtgggaacaccaccactcaagttgccaaaggaggcagtggtgaaacctgtcctgttctcacttaaatgaggatttagctcaaaataaagtggtggtgtcatcaggtttattccgtgttctgtcattcacatggaacaccggatgattagctaacagtttagtgccagccttcattctttactgtgtacgttaaatgcacactacagtgaaaaagcctaagacacttggtaaatattttctagctgactgattccagaacacacaa

SEQ ID NO: 68892 - DNA, 5421 bp, Homo sapiens
gagagagaaggagaagataatatactgaaaagaagaggaggaggagagcgacgggacgggacgcgagcgggagcgcagccgccctctcggctccgcggcggcgcctcgcaagtccgggaggcgaggggggcccgaggggagacgccgtgacaactttcgtttccctctgagggaattgggaggtcggcggccccaaaagctttcagtccagtgtaaagctgttggagcgcgggagcaaaggtaaagaatgatgtaatgcgctggctgctccaaagcatcttttgttgtggaatggttattccagtcatctctttatgaatcaaatgtgaggggctgctttgtggacggagtcctttgcaagagcacatcaacgggaaagagaaagagacattcacttggagggctcttgctgaaaatgggtttaactctccttttgccagtcaccaccagcctgacctcatacacttttagtacaatggagtggctgagcctttgagcacaccaccattacatcatcgtggcaaattaaagaaggaggtgggaaaagaggacttattgttgtcatggcccatgagatgattggaactcaaattgttactgagaggttggtggctctgctggaaagtggaacggaaaaagtgctgctaattgatagccggccatttgtggaatacaatacatcccacattttggaagccattaatatcaactgctccaagcttatgaagcgaaggttgcaacaggacaaagtgttaattacagagctcatccagcattcagcgaaacataaggttgacattgattgcagtcagaaggttgtagtttacgatcaaagctcccaagatgttgcctctctctcttcagactgttttctcactgtacttctgggtaaactggagaagagcttcaactctgttcacctgcttgcaggtgggtttgctgagttctctcgttgtttccctggcctctgtgaaggaaaatccactctagtccctacctgcatttctcagccttgcttacctgttgccaacattgggccaacccgaattcttcccaatctttatcttggctgccagcgagatgtcctcaacaaggagctgatgcagcagaatgggattggttatgtgttaaatgccagcaatacctgtccaaagcctgactttatccccgagtctcatttcctgcgtgtgcctgtgaatgacagcttttgtgagaaaattttgccgtggttggacaaatcagtagatttcattgagaaagcaaaagcctccaatggatgtgttctagtgcactgtttagctgggatctcccgctccgccaccatcgctatcgcctacatcatgaagaggatggacatgtctttagatgaagcttacagatttgtgaaagaaaaaagacctactatatctccaaacttcaattttctgggccaactcctggactatgagaagaagattaagaaccagactggagcatcagggccaaagagcaaactcaagctgctgcacctggagaagccaaatgaacctgtccctgctgtctcagagggtggacagacaggacaaaggcccgtgcatcccgccagcgtgcccagcgtgcccagcgtgcagccgtcgctgttagaggacagcccgctggtacaggcgctcagtgggctgcacctgtccgcagacaggctggaagacagcaataagctcaagcgttccttctctctggatatcaaatcagtttcatattcagccagcatggcagcatccttacatggcttctcctcatcagaagatgctttggaatactacaaaccttccactactctggatgggaccaacaagctatgccagttctcccctgttcaggaactatcggagcagactcccgaaaccagtcctgataaggaggaagccagcatccccaagaagctgcagaccgccaggccttcagacagccagagcaagcgattgcattcggtcagaaccagcagcagtggcaccgcccagaggtcccttttatctccactgcatcgaagtgggagcgtggaggacaattaccacaccagcttccttttcggcctttccaccagccagcagcacctcacgaagtctgctggcctgggccttaagggctggcactcggatatcttggccccccagacctctaccccttccctgaccagcagctggtattttgccacagagtcctcacacttctactctgcctcagccatctacggaggcagtgccagttactctgcctacagctgcagccagctgcccacttgcggagaccaagtctattctgtgcgcaggcggcagaagccaagtgacagagctgactcgcggcggagctggcatgaagagagcccctttgaaaagcagtttaaacgcagaagctgccaaatggaatttggagagagcatcatgtcagagaacaggtcacgggaagagctggggaaagtgggcagtcagtctagcttttcgggcagcatggaaatcattgaggtctcctgagaagaaagacacttgtgacttctatagacaatttttttttcttgttcacaaaaaaattccctgtaaatctgaaatatatatatgtacatacatatatatttttggaaaatggagctatggtgtaaaagcaacaggtggatcaacccagttgttactctcttaacatctgcatttgagagatcagctaatacttctctcaacaaaaatggaagggcagatgctagaatcccccctagacggaggaaaaccattttattcagtgaattacacatcctcttgttcttaaaaaagcaagtgtctttggtgttggaggacaaaatcccctaccattttcacgttgtgctactaagagatctcaaatattagtctttgtccggacccttccatagtacaccttagcgctgagactgagccagcttgggggtcaggtaggtagaccctgttagggacagagcctagtggtaaatccaagagaaatgatcctatccaaagctgattcacaaacccacgctcacctgacagccgagggacacgagcatcactctgctggacggaccattaggggccttgccaaggtctaccttagagcaaacccagtacctcagacaggaaagtcggggctttgaccactaccatatctggtagcccattttctaggcattgtgaataggtaggtagctagtcacacttttcagaccaattcaaactgtctatgcacaaaattcccgtgggcctagatggagataatttttttttcttctcagctttatgaagagaagggaaactgtctaggattcagctgaaccaccaggaacctggcaacatcacgatttaagctaaggttgggaggctaacgagtctacctccctctttgtaaatcaaagaattgtttaaaatgggattgtcaatcctttaaataaagatgaacttggtttcaagccaaatgtgaatttatttgggttggtagcagagcagcagcaccttcaaattctcagccaaagcagatgtttttgccctttctgcttcactgcatggatacagttggtaaaatgtaataatatggcagaattttataggaaacttcctagggaggtaaattatgggaagattaagaaaggtacaaattgctgaggagaagcaggaaacctgtttccttagtggcttttatcccctcggcatgcgatggggctgatgtttctataattgcctcagactttcacatttactagtagggctgagagaggctttagtgaggaaggaatattcagaataaaacggttgagaaagctgagaagaccattgagttttgatcagttgtgaatagagtgcaaagccatggccaagctgtttttggaaacgctggccggcgtgtcttcagtggaaaaagcaaatcaaaatggagcgagagcaaaggggcgtcctcagtcctcaacctacaatcactgtatggaatcggtcctggcagctgaacataggaggtcactggaacaagtgatagtgcagattggctttcaaacatcctcctggcttgagttttatcagctacaatgtgggtcctcttttgaagccttaattcacaacagcagctttttgggggtggggctgggcgggtgttgtcattgttctttcccttcctgtaagtgtcgctagttgctgcctcgtatctcaggtttttctctgtttttgagaaatggacagttttttgaccaggatgtgacttcatgtttcctatggtgacttctaaaaccagcacagaatgatatgactcaacacagaccgacttggttatggggatgatgagccgcacagacctcactagttgtgcacaaataatgtgctatgatggggtgtaaagtgaaggcagaagagggtcagccgcattgttatgatactgggaaagtgctggtcaacgatttgagttagtttttagatatacattgaaatctttaatcagacattctcaagtttcacacagtagtttttgatgttatgtacacacacaccaaatgtgtaacagttcaccacttccagagtgtggtcatgcccaaaacatgtttaagaaaggaaagcagtagctccttgctaacgatgtttcaggaggtttgggggacttggttttaatgagcttctgtcatttagggcttctcttggccatggtcccccttccttctggaactgtgatgtagtcacatcctacagcctttagtgctggttcactagtgtcagataatcagttcttggaatcgagactgccgtggcgaaggggtggcctcggaggcaggctctggagctgcttggatgtctttaggtggggtggtggctggctctcttcagcatgtaattggggaaaccctcgcgtctactaggggtgatacagatggtgattttaaagagcaaaactagacttctatgtgagaagtgctggaaaatgatttaggacatgtgtaaagttagatggaaagactgtaaatgtttaatatgaatatagtgttcttttgaagtaaggccagctgttgaacggttaaactgtgcatttctcattttgatgtgtcatgtatgttaatgtatgaaatgattaaataaaatcaaaactggtacctgtttatacataaatacgagaaaagacctatctttgcagccataaactcggtgggaacaccaccactcaagttgccaaaggaggcagtggtgaaacctgtcctgttctcacttaaatgaggatttagctcaaaataaagtggtggtgtcatcaggtttattccgtgttctgtcattcacatggaacaccggatgattagctaacagtttagtgccagccttcattctttactgtgtacgttaaatgcacactacagtgaaaaagcctaagacacttggtaaatattttctagctgactgattccagaacacacaa

SEQ ID NO: 68893 - DNA, 3053 bp, Homo sapiens
  misc_feature (152)..(152): n is a, c, g, or t
  misc_feature (188)..(188): n is a, c, g, or t
cgaggcgatctagaggatcccttggtagtcacctttactaatatatttccattatatatgaaatgtgttcattattagaaacttggaagttacagaaatgtagaagagaaactcacccagtgttttcaccatccaaagagtgtgattgtccnagtgatgtgatggttcagtgatgtgatgtgttcacnaaaaaaattccctgtaaatctgaaatatatatatgtacatacatatatatttttggaaaatggagctatggtgtaaaagcaacaggtggatcaacccagttgttactctcttaacatctgcatttgagagatcagctaatacttctctcaacaaaaatggaagggcagatgctagaatcccccctagacggaggaaaaccattttattcagtgaattacacatcctcttgttcttaaaaaagcaagtgtctttggtgttggaggacaaaatcccctaccattttcacgttgtgctactaagagatctcaaatattagtctttgtccggacccttccatagtacaccttagcgctgagactgagccagcttgggggtcaggtaggtagaccctgttagggacagagcctagtggtaaatccaagagaaatgatcctatccaaagctgattcacaaacccacgctcacctgacagccgagggacacgagcatcactctgctggacggaccattaggggccttgccaaggtctaccttagagcaaacccagtacctcagacaggaaagtcggggctttgaccactaccatatctggtagcccattttctaggcattgtgaataggtaggtagctagtcacacttttcagaccaattcaaactgtctatgcacaaaattcccgtgggcctagatggagataatttttttttcttctcagctttatgaagagaagggaaactgtctaggattcagctgaaccaccaggaacctggcaacatcacgatttaagctaaggttgggaggctaacgagtctacctccctctttgtaaatcaaagaattgtttaaaatgggattgtcaatcctttaaataaagatgaacttggtttcaagccaaatgtgaatttatttgggttggtagcagagcagcagcaccttcaaattctcagccaaagcagatgtttttgccctttctgcttcactgcatggatacagttggtaaaatgtaataatatggcagaattttataggaaacttcctagggaggtaaattatgggaagattaagaaaggtacaaattgctgaggagaagcaggaaacctgtttccttagtggcttttatcccctcggcatgcgatggggctgatgtttctataattgcctcagactttcacatttactagtagggctgagagaggctttagtgaggaaggaatattcagaataaaacggttgagaaagctgagaagaccattgagttttgatcagttgtgaatagagtgcaaagccatggccaagctgtttttggaaacgctggccggcgtgtcttcagtggaaaaagcaaatcaaaatggagcgagagcaaaggggcgtcctcagtcctcaacctacaatcactgtatggaatcggtcctggcagctgaacataggaggtcactggaacaagtgatagtgcagattggctttcaaacatcctcctggcttgagttttatcagctacaatgtgggtcctcttttgaagccttaattcacaacagcagctttttgggggtggggctgggcgggtgttgtcattgttctttcccttcctgtaagtgtcgctagttgctgcctcgtatctcaggtttttctctgtttttgagaaatggacagttttttgaccaggatgtgacttcatgtttcctatggtgacttctaaaaccagcacagaatgatatgactcaacacagaccgacttggttatggggatgatgagccgcacagacctcactagttgtgcacaaataatgtgctatgatggggtgtaaagtgaaggcagaagagggtcagccgcattgttatgatactgggaaagtgctggtcaacgatttgagttagtttttagatatacattgaaatctttaatcagacattctcaagtttcacacagtagtttttgatgttatgtacacacacaccaaatgtgtaacagttcaccacttccagagtgtggtcatgcccaaaacatgtttaagaaaggaaagcagtagctccttgctaacgatgtttcaggaggtttgggggacttggttttaatgagcttctgtcatttagggcttctcttggccatggtcccccttccttctggaactgtgatgtagtcacatcctacagcctttagtgctggttcactagtgtcagataatcagttcttggaatcgagactgccgtggcgaaggggtggcctcggaggcaggctctggagctgcttggatgtctttaggtggggtggtggctggctctcttcagcatgtaattggggaaaccctcgcgtctactaggggtgatacagatggtgattttaaagagcaaaactagacttctatgtgagaagtgctggaaaatgatttaggacatgtgtaaagttagatggaaagactgtaaatgtttaatatgaatatagtgttcttttgaagtaaggccagctgttgaacggttaaactgtgcatttctcattttgatgtgtcatgtatgttaatgtatgaaatgattaaataaaatcaaaactggtacctgtttatacataaatacgagaaaagacctatctttgcagccataaactcggtgggaacaccaccactcaagttgccaaaggaggcagtggtgaaacctgtcctgttctcacttaaatgaggatttagctcaaaataaagtggtggtgtcatcaggtttattccgtgttctgtcattcacatggaacaccggatgattagctaacagtttagtgccagccttcattctttactgtgtacgttaaatgcacactacagtgaaaaagcctaagacacttggtaaatattttctagctgactgattccagaacacacaa

SEQ ID NO: 68894 - DNA, 4526 bp, Homo sapiens
gagagagaaggagaagataatatactgaaaagaagaggaggaggagagcgacgggacgggacgcgagcgggagcgcagccgccctctcggctccgcggcggcgcctcgcaagtccgggaggcgaggggggcccgaggggagacgccgtgacaactttcgtttccctctgagggaattgggaggtcggcggccccaaaagctttcagtccagtgtaaagctgttggagcgcgggagcaaaggtaaagaatgatgtaatgcgctggctgctccaaagcatcttttgttgtggaatggttattccagtcatctctttatgaatcaaatgtgaggggctgctttgtggacggagtcctttgcaagagcacatcaacgggaaagagaaagagacattcacttggagggctcttgctgaaaatgggtttaactctccttttgccagtcaccaccagcctgacctcatacacttttagtacaatggagtggctgagcctttgagcacaccaccattacatcatcgtggcaaattaaagaaggaggtgggaaaagaggacttattgttgtcatggcccatgagatgattggaactcaaattgttactgagaggttggtggctctgctggaaagtggaacggaaaaagtgctgctaattgatagccggccatttgtggaatacaatacatcccacattttggaagccattaatatcaactgctccaagcttatgaagcgaaggttgcaacaggacaaagtgttaattacagagctcatccagcattcagcgaaacataaggttgacattgattgcagtcagaaggttgtagtttacgatcaaagctcccaagatgttgcctctctctcttcagactgttttctcactgtacttctgggtaaactggagaagagcttcaactctgttcacctgcttgcaggagctgatgcagcagaatgggattggttatgtgttaaatgccagcaatacctgtccaaagcctgactttatccccgagtctcatttcctgcgtgtgcctgtgaatgacagcttttgtgagaaaattttgccgtggttggacaaatcagtagatttcattgagaaagcaaaagcctccaatggatgtgttctagtgcactgtttagctgggatctcccgctccgccaccatcgctatcgcctacatcatgaagaggatggacatgtctttagatgaagcttacagatttgtgaaagaaaaaagacctactatatctccaaacttcaattttctgggccaactcctggactatgagaagaagattaagaaccagactggagcatcagggccaaagagcaaactcaagctgctgcacctggagaagccaaatgaacctgtccctgctgtctcagagggtggacagaaaagcgagacgcccctcagtccaccctgtgccgactctgctacctcagaggcagcaggacaaaggcccgtgcatcccgccagcgtgcccagcgtgcccagcgtgcagccgtcgctgttagaggacagcccgctggtacaggcgctcagtgggctgcacctgtccgcagacaggctggaagacagcaataagctcaagcgttccttctctctggatatcaaatcagtttcatattcagccagcatggcagcatccttacatggcttctcctcatcagaagatgctttggaatactacaaaccttccactactctggatgggaccaacaagctatgccagttctcccctgttcaggaactatcggagcagactcccgaaaccagtcctgataaggaggaagccagcatccccaagaagctgcagaccgccaggccttcagacagccagagcaagcgattgcattcggtcagaaccagcagcagtggcaccgcccagaggtcccttttatctccactgcatcgaagtgggagcgtggaggacaattaccacaccagcttccttttcggcctttccaccagccagcagcacctcacgaagtctgctggcctgggccttaagggctggcactcggatatcttggccccccagacctctaccccttccctgaccagcagctggtattttgccacagagtcctcacacttctactctgcctcagccatctacggaggcagtgccagttactctgcctacagctgcagccagctgcccacttgcggagaccaagtctattctgtgcgcaggcggcagaagccaagtgacagagctgactcgcggcggagctggcatgaagagagcccctttgaaaagcagtttaaacgcagaagctgccaaatggaatttggagagagcatcatgtcagagaacaggtcacgggaagagctggggaaagtgggcagtcagtctagcttttcgggcagcatggaaatcattgaggtctcctgagaagaaagacacttgtgacttctatagacaatttttttttcttgttcacaaaaaaattccctgtaaatctgaaatatatatatgtacatacatatatatttttggaaaatggagctatggtgtaaaagcaacaggtggatcaacccagttgttactctcttaacatctgcatttgagagatcagctaatacttctctcaacaaaaatggaagggcagatgctagaatcccccctagacggaggaaaaccattttattcagtgaattacacatcctcttgttcttaaaaaagcaagtgtctttggtgttggaggacaaaatcccctaccattttcacgttgtgctactaagagatctcaaatattagtctttgtccggacccttccatagtacaccttagcgctgagactgagccagcttgggggtcaggtaggtagaccctgttagggacagagcctagtggtaaatccaagagaaatgatcctatccaaagctgattcacaaacccacgctcacctgacagccgagggacacgagcatcactctgctggacggaccattaggggccttgccaaggtctaccttagagcaaacccagtacctcagacaggaaagtcggggctttgaccactaccatatctggtagcccattttctaggcattgtgaataggtaggtagctagtcacacttttcagaccaattcaaactgtctatgcacaaaattcccgtgggcctagatggagataatttttttttcttctcagctttatgaagagaagggaaactgtctaggattcagctgaaccaccaggaacctggcaacatcacgatttaagctaaggttgggaggctaacgagtctacctccctctttgtaaatcaaagaattgtttaaaatgggattgtcaatcctttaaataaagatgaacttggtttcaagccaaatgtgaatttatttgggttggtagcagagcagcagcaccttcaaattctcagccaaagcagatgtttttgccctttctgcttcactgcatggatacagttggtaaaatgtaataatatggcagaattttataggaaacttcctagggaggtaaattatgggaagattaagaaaggtacaaattgctgaggagaagcaggaaacctgtttccttagtggcttttatcccctcggcatgcgatggggctgatgtttctataattgcctcagactttcacatttactagtagggctgagagaggctttagtgaggaaggaatattcagaataaaacggttgagaaagctgagaagaccattgagttttgatcagttgtgaatagagtgcaaagccatggccaagctgtttttggaaacgctggccggcgtgtcttcagtggaaaaagcaaatcaaaatggagcgagagcaaaggggcgtcctcagtcctcaacctacaatcactgtatggaatcggtcctggcagctgaacataggaggtcactggaacaagtgatagtgcagattggctttcaaacatcctcctggcttgagttttatcagctacaatgtgggtcctcttttgaagccttaattcacaacagcagctttttgggggtggggctgggcgggtgttgtcattgttctttcccttcctgtaagtgtcgctagttgctgcctcgtatctcaggtttttctctgtttttgagaaatggacagttttttgaccaggatgtgacttcatgtttcctatggtgacttctaaaaccagcacagaatgatatgactcaacacagaccgacttggttatggggatgatgagccgcacagacctcactagttgtgcacaaataatgtgctatgatggggtgtaaagtgaaggcagaagagggtcagccgcattgttatgatactgggaaagtgctggtcaacgatttgagttagtttttagatatacattgaaatctttaatcagacattctcaagtttcacacagtagtttttgatgttatgtacacacaccatctctaatatgacgcccagcacacaagtacagaggctggccaggcgaataaaaaggataagcaaggtaagcggtcacccctggggaacgaggcggccagcgatgggggggatggggtcataatagc

SEQ ID NO: 68895 - DNA, 4450 bp, Homo sapiens
gagagagaaggagaagataatatactgaaaagaagaggaggaggagagcgacgggacgggacgcgagcgggagcgcagccgccctctcggctccgcggcggcgcctcgcaagtccgggaggcgaggggggcccgaggggagacgccgtgacaactttcgtttccctctgagggaattgggaggtcggcggccccaaaagctttcagtccagtgtaaagctgttggagcgcgggagcaaaggtaaagaatgatgtaatgcgctggctgctccaaagcatcttttgttgtggaatggttattccagtcatctctttatgaatcaaatgtgaggggctgctttgtggacggagtcctttgcaagagcacatcaacgggaaagagaaagagacattcacttggagggctcttgctgaaaatgggtttaactctccttttgccagtcaccaccagcctgacctcatacacttttagtacaatggagtggctgagcctttgagcacaccaccattacatcatcgtggcaaattaaagaaggaggtgggaaaagaggacttattgttgtcatggcccatgagatgattggaactcaaattgttactgagaggttggtggctctgctggaaagtggaacggaaaaagtgctgctaattgatagccggccatttgtggaatacaatacatcccacattttggaagccattaatatcaactgctccaagcttatgaagcgaaggttgcaacaggacaaagtgttaattacagagctcatccagcattcagcgaaacataaggttgacattgattgcagtcagaaggttgtagtttacgatcaaagctcccaagatgttgcctctctctcttcagactgttttctcactgtacttctgggtaaactggagaagagcttcaactctgttcacctgcttgcaggagctgatgcagcagaatgggattggttatgtgttaaatgccagcaatacctgtccaaagcctgactttatccccgagtctcatttcctgcgtgtgcctgtgaatgacagcttttgtgagaaaattttgccgtggttggacaaatcagtagatttcattgagaaagcaaaagcctccaatggatgtgttctagtgcactgtttagctgggatctcccgctccgccaccatcgctatcgcctacatcatgaagaggatggacatgtctttagatgaagcttacagatttgtgaaagaaaaaagacctactatatctccaaacttcaattttctgggccaactcctggactatgagaagaagattaagaaccagactggagcatcagggccaaagagcaaactcaagctgctgcacctggagaagccaaatgaacctgtccctgctgtctcagagggtggacagaaaagcgagacgcccctcagtccaccctgtgccgactctgctacctcagaggcagcaggacaaaggcccgtgcatcccgccagcgtgcccagcgtgcccagcgtgcagccgtcgctgttagaggacagcccgctggtacaggcgctcagtgggctgcacctgtccgcagacaggctggaagacagcaataagctcaagcgttccttctctctggatatcaaatcagtttcatattcagccagcatggcagcatccttacatggcttctcctcatcagaagatgctttggaatactacaaaccttccactactctggatgggaccaacaagctatgccagttctcccctgttcaggaactatcggagcagactcccgaaaccagtcctgataaggaggaagccagcatccccaagaagctgcagaccgccaggccttcagacagccagagcaagcgattgcattcggtcagaaccagcagcagtggcaccgcccagaggtcccttttatctccactgcatcgaagtgggagcgtggaggacaattaccacaccagcttccttttcggcctttccaccagccagcagcacctcacgaagtctgctggcctgggccttaagggctggcactcggatatcttggccccccagacctctaccccttccctgaccagcagctggtattttgccacagagtcctcacacttctactctgcctcagccatctacggaggcagtgccagttactctgcctacagctgcagccagctgcccacttgcggagaccaagtctattctgtgcgcaggcggcagaagccaagtgacagagctgactcgcggcggagctggcatgaagagagcccctttgaaaagcagtttaaacgcagaagctgccaaatggaatttggagagagcatcatgtcagagaacaggtcacgggaagagctggggaaagtgggcagtcagtctagcttttcgggcagcatggaaatcattgaggtctcctgagaagaaagacacttgtgacttctatagacaatttttttttcttgttcacaaaaaaattccctgtaaatctgaaatatatatatgtacatacatatatatttttggaaaatggagctatggtgtaaaagcaacaggtggatcaacccagttgttactctcttaacatctgcatttgagagatcagctaatacttctctcaacaaaaatggaagggcagatgctagaatcccccctagacggaggaaaaccattttattcagtgaattacacatcctcttgttcttaaaaaagcaagtgtctttggtgttggaggacaaaatcccctaccattttcacgttgtgctactaagagatctcaaatattagtctttgtccggacccttccatagtacaccttagcgctgagactgagccagcttgggggtcaggtaggtagaccctgttagggacagagcctagtggtaaatccaagagaaatgatcctatccaaagctgattcacaaacccacgctcacctgacagccgagggacacgagcatcactctgctggacggaccattaggggccttgccaaggtctaccttagagcaaacccagtacctcagacaggaaagtcggggctttgaccactaccatatctggtagcccattttctaggcattgtgaataggtaggtagctagtcacacttttcagaccaattcaaactgtctatgcacaaaattcccgtgggcctagatggagataatttttttttcttctcagctttatgaagagaagggaaactgtctaggattcagctgaaccaccaggaacctggcaacatcacgatttaagctaaggttgggaggctaacgagtctacctccctctttgtaaatcaaagaattgtttaaaatgggattgtcaatcctttaaataaagatgaacttggtttcaagccaaatgtgaatttatttgggttggtagcagagcagcagcaccttcaaattctcagccaaagcagatgtttttgccctttctgcttcactgcatggatacagttggtaaaatgtaataatatggcagaattttataggaaacttcctagggaggtaaattatgggaagattaagaaaggtacaaattgctgaggagaagcaggaaacctgtttccttagtggcttttatcccctcggcatgcgatggggctgatgtttctataattgcctcagactttcacatttactagtagggctgagagaggctttagtgaggaaggaatattcagaataaaacggttgagaaagctgagaagaccattgagttttgatcagttgtgaatagagtgcaaagccatggccaagctgtttttggaaacgctggccggcgtgtcttcagtggaaaaagcaaatcaaaatggagcgagagcaaaggggcgtcctcagtcctcaacctacaatcactgtatggaatcggtcctggcagctgaacataggaggtcactggaacaagtgatagtgcagattggctttcaaacatcctcctggcttgagttttatcagctacaatgtgggtcctcttttgaagccttaattcacaacagcagctttttgggggtggggctgggcgggtgttgtcattgttctttcccttcctgtaagtgtcgctagttgctgcctcgtatctcaggtttttctcattttgatgtgtcatgtatgttaatgtatgaaatgattaaataaaatcaaaactggtacctgtttatacataaatacgagaaaagacctatctttgcagccataaactcggtgggaacaccaccactcaagttgccaaaggaggcagtggtgaaacctgtcctgttctcacttaaatgaggatttagctcaaaataaagtggtggtgtcatcaggtttattccgtgttctgtcattcacatggaacaccggatgattagctaacagtttagtgccagccttcattctttactgtgtacgttaaatgcacactacagtgaaaaagcctaagacacttggtaaatattttctagctgactgattccagaacacacaa

SEQ ID NO: 68896 - DNA, 1443 bp, Homo sapiens
gagagagaaggagaagataatatactgaaaagaagaggaggaggagagcgacgggacgggacgcgagcgggagcgcagccgccctctcggctccgcggcggcgcctcgcaagtccgggaggcgaggggggcccgaggggagacgccgtgacaactttcgtttccctctgagggaattgggaggtcggcggccccaaaagctttcagtccagtgtaaagctgttggagcgcgggagcaaaggtaaagaatgatgtaatgcgctggctgctccaaagcatcttttgttgtggaatggttattccagtcatctctttatgaatcaaatgtgaggggctgctttgtggacggagtcctttgcaagagcacatcaacgggaaagagaaagagacattcacttggagggctcttgctgaaaatgggtttaactctccttttgccagtcaccaccagcctgacctcatacacttttagtacaatggagtggctgagcctttgagcacaccaccattacatcatcgtggcaaattaaagaaggaggtgggaaaagaggacttattgttgtcatggcccatgagatgattggaactcaaattgttactgagaggttggtggctctgctggaaagtggaacggaaaaagtgctgctaattgatagccggccatttgtggaatacaatacatcccacattttggaagccattaatatcaactgctccaagcttatgaagcgaaggttgcaacaggacaaagtgttaattacagagctcatccagcattcagcgaaacataaggttgacattgattgcagtcagaaggttgtagtttacgatcaaagctcccaagatgttgcctgctctcttcagcatgtaattggggaaaccctcgcgtctactaggggtgatacagatggtgattttaaagagcaaaactagacttctatgtgagaagtgctggaaaatgatttaggacatgtgtaaagttagatggaaagactgtaaatgtttaatatgaatatagtgttcttttgaagtaaggccagctgttgaacggttaaactgtgcatttctcattttgatgtgtcatgtatgttaatgtatgaaatgattaaataaaatcaaaactggtacctgtttatacataaatacgagaaaagacctatctttgcagccataaactcggtgggaacaccaccactcaagttgccaaaggaggcagtggtgaaacctgtcctgttctcacttaaatgaggatttagctcaaaataaagtggtggtgtcatcaggtttattccgtgttctgtcattcacatggaacaccggatgattagctaacagtttagtgccagccttcattctttactgtgtacgttaaatgcacactacagtgaaaaagcctaagacacttggtaaatattttctagctgactgattccagaacacacaa

SEQ ID NO: 68897 - DNA, 3498 bp, Homo sapiens
gagagagaaggagaagataatatactgaaaagaagaggaggaggagagcgacgggacgggacgcgagcgggagcgcagccgccctctcggctccgcggcggcgcctcgcaagtccgggaggcgaggggggcccgaggggagacgccgtgacaactttcgtttccctctgagggaattgggaggtcggcggccccaaaagctttcagtccagtgtaaagctgttggagcgcgggagcaaaggtaaagaatgatgtaatgcgctggctgctccaaagcatcttttgttgtggaatggttattccagtcatctctttatgaatcaaatgtgaggggctgctttgtggacggagtcctttgcaagagcacatcaacgggaaagagaaagagacattcacttggagggctcttgctgaaaatgggtttaactctccttttgccagtcaccaccagcctgacctcatacacttttagtacaatggagtggctgagcctttgagcacaccaccattacatcatcgtggcaaattaaagaaggaggtgggaaaagaggacttattgttgtcatggcccatgagatgattggaactcaaattgttactgagaggttggtggctctgctggaaagtggaacggaaaaagtgctgctaattgatagccggccatttgtggaatacaatacatcccacattttggaagccattaatatcaactgctccaagcttatgaagcgaaggttgcaacaggacaaagtgttaattacagagctcatccagcattcagcgaaacataaggttgacattgattgcagtcagaaggttgtagtttacgatcaaagctcccaagatgttgcctctctctcttcagactgttttctcactgtacttctgggtaaactggagaagagcttcaactctgttcacctgcttgcaggtgggtttgctgagttctctcgttgtttccctggcctctgtgaaggaaaatccactctagtccctacctgcatttctcagccttgcttacctgttgccaacattgggccaacccgaattcttcccaatctttatcttggctgccagcgagatgtcctcaacaaggagctgatgcagcagaatgggattggttatgtgttaaatgccagcaatacctgtccaaagcctgactttatccccgagtctcatttcctgcgtgtgcctgtgaatgacagcttttgtgagaaaattttgccgtggttggacaaatcagtagatttcattgagaaagcaaaagcctccaatggatgtgttctagtgcactgtttagctgggatctcccgctccgccaccatcgctatcgcctacatcatgaagaggatggacatgtctttagatgaagcttacagatttgtgaaagaaaaaagacctactatatctccaaacttcaattttctgggccaactcctggactatgagaagaagattaagaaccagactggagcatcagggccaaagagcaaactcaagctgctgcacctggagaagccaaatgaacctgtccctgctgtctcagagggtggacagaaaagcgagacgcccctcagtccaccctgtgccgactctgctacctcagaggcagcaggacaaaggcccgtgcatcccgccagcgtgcccagcgtgcccagcgtgcagccgtcgctgttagaggacagcccgctggtacaggcgctcagtgggctgcacctgtccgcagacaggctggaagacagcaataagctcaagcgttccttctctctggatatcaaatcagtttcatattcagccagcatggcagcatccttacatggcttctcctcatcagaagatgctttggaatactacaaaccttccactactctggatgggaccaacaagctatgccagttctcccctgttcaggaactatcggagcagactcccgaaaccagtcctgataaggaggaagccagcatccccaagaagctgcagaccgccaggccttcagacagccagagcaagcgattgcattcggtcagaaccagcagcagtggcaccgcccagaggtcccttttatctccactgcatcgaagtgggagcgtggaggacaattaccacaccagcttccttttcggcctttccaccagccagcagcacctcacgaagtctgctggcctgggccttaagggctggcactcggatatcttggccccccagacctctaccccttccctgaccagcagctggtattttgccacagagtcctcacacttctactctgcctcagccatctacggaggcagtgccagttactctgcctacagctgcagccagctgcccacttgcggagaccaagtctattctgtgcgcaggcggcagaagccaagtgacagagctgactcgcggcggagctggcatgaagagagcccctttgaaaagcagtttaaacgcagaagctgccaaatggaatttggagagagcatcatgtcagagaacaggtcacgggaagagctggggaaagtgggcagtcagtctagcttttcgggcagcatggaaatcattgaggtctcctgagaagaaagacacttgtgacttctatagacaatttttttttcttgttcacaaaaaaattccctgtaaatctgaaatatatatatgtacatacatatatatttttggaaaatggagctatggtgtaaaagcaacaggtggatcaacccagttgttactctcttaacatctgcatttgagagatcagctaatacttctctcaacaaaaatggaagggcagatgctagaatcccccctagacggaggaaaaccattttattcagtgaattacacatcctcttgttcttaaaaaagcaagtgtctttggtgttggaggacaaaatcccctaccattttcacgttgtgctactaagagatctcaaatattagtctttgtccggacccttccatagtacaccttagcgctgagactgagccagcttgggggtcaggtaggtagaccctgttagggacagagcctagtggtaaatccaagagaaatgatcctatccaaagctgattcacaaacccacgctcacctgacagccgagggacacgagcatcactctgctggacggaccattaggggccttgccaaggtctaccttagagcaaacccagtacctcagacaggaaagtcggggctttgaccactaccatatctggtagcccattttctaggcattgtgaataggtaggtagctagtcacacttttcagaccaattcaaactgtctatgcacaaaattcccgtgggcctagatggagataatttttttttcttctcagctttatgaagagaagggaaactgtctaggattcagctgaaccaccaggaacctggcaacatcacgatttaagctaaggttgggaggctaacgagtctacctccctctttgtaaatcaaagaattgtttaaaatgggattgtcaatcctttaaataaagatgaacttggtttca

SEQ ID NO: 68898 - DNA, 5311 bp, Homo sapiens
gagagagaaggagaagataatatactgaaaagaagaggaggaggagagcgacgggacgggacgcgagcgggagcgcagccgccctctcggctccgcggcggcgcctcgcaagtccgggaggcgaggggggcccgaggggagacgccgtgacaactttcgtttccctctgagggaattgggaggtcggcggccccaaaagctttcagtccagtgtaaagctgttggagcgcgggagcaaaggtaaagaatgatgtaatgcgctggctgctccaaagcatcttttgttgtggaatggttattccagtcatctctttatgaatcaaatgtgaggggctgctttgtggacggagtcctttgcaagagcacatcaacgggaaagagaaagagacattcacttggagggctcttgctgaaaatgggtttaactctccttttgccagtcaccaccagcctgacctcatacacttttagtacaatggagtggctgagcctttgagcacaccaccattacatcatcgtggcaaattaaagaaggaggtgggaaaagaggacttattgttgtcatggcccatgagatgattggaactcaaattgttactgagaggttggtggctctgctggaaagtggaacggaaaaagtgctgctaattgatagccggccatttgtggaatacaatacatcccacattttggaagccattaatatcaactgctccaagcttatgaagcgaaggttgcaacaggacaaagtgttaattacagagctcatccagcattcagcgaaacataaggttgacattgattgcagtcagaaggttgtagtttacgatcaaagctcccaagatgttgcctctctctcttcagactgttttctcactgtacttctgggtaaactggagaagagcttcaactctgttcacctgcttgcaggagctgatgcagcagaatgggattggttatgtgttaaatgccagcaatacctgtccaaagcctgactttatccccgagtctcatttcctgcgtgtgcctgtgaatgacagcttttgtgagaaaattttgccgtggttggacaaatcagtagatttcattgagaaagcaaaagcctccaatggatgtgttctagtgcactgtttagctgggatctcccgctccgccaccatcgctatcgcctacatcatgaagaggatggacatgtctttagatgaagcttacagatttgtgaaagaaaaaagacctactatatctccaaacttcaattttctgggccaactcctggactatgagaagaagattaagaaccagactggagcatcagggccaaagagcaaactcaagctgctgcacctggagaagccaaatgaacctgtccctgctgtctcagagggtggacagaaaagcgagacgcccctcagtccaccctgtgccgactctgctacctcagaggcagcaggacaaaggcccgtgcatcccgccagcgtgcccagcgtgcccagcgtgcagccgtcgctgttagaggacagcccgctggtacaggcgctcagtgggctgcacctgtccgcagacaggctggaagacagcaataagctcaagcgttccttctctctggatatcaaatcagtttcatattcagccagcatggcagcatccttacatggcttctcctcatcagaagatgctttggaatactacaaaccttccactactctggatgggaccaacaagctatgccagttctcccctgttcaggaactatcggagcagactcccgaaaccagtcctgataaggaggaagccagcatccccaagaagctgcagaccgccaggccttcagacagccagagcaagcgattgcattcggtcagaaccagcagcagtggcaccgcccagaggtcccttttatctccactgcatcgaagtgggagcgtggaggacaattaccacaccagcttccttttcggcctttccaccagccagcagcacctcacgaagtctgctggcctgggccttaagggctggcactcggatatcttggccccccagacctctaccccttccctgaccagcagctggtattttgccacagagtcctcacacttctactctgcctcagccatctacggaggcagtgccagttactctgcctacagctgcagccagctgcccacttgcggagaccaagtctattctgtgcgcaggcggcagaagccaagtgacagagctgactcgcggcggagctggcatgaagagagcccctttgaaaagcagtttaaacgcagaagctgccaaatggaatttggagagagcatcatgtcagagaacaggtcacgggaagagctggggaaagtgggcagtcagtctagcttttcgggcagcatggaaatcattgaggtctcctgagaagaaagacacttgtgacttctatagacaatttttttttcttgttcacaaaaaaattccctgtaaatctgaaatatatatatgtacatacatatatatttttggaaaatggagctatggtgtaaaagcaacaggtggatcaacccagttgttactctcttaacatctgcatttgagagatcagctaatacttctctcaacaaaaatggaagggcagatgctagaatcccccctagacggaggaaaaccattttattcagtgaattacacatcctcttgttcttaaaaaagcaagtgtctttggtgttggaggacaaaatcccctaccattttcacgttgtgctactaagagatctcaaatattagtctttgtccggacccttccatagtacaccttagcgctgagactgagccagcttgggggtcaggtaggtagaccctgttagggacagagcctagtggtaaatccaagagaaatgatcctatccaaagctgattcacaaacccacgctcacctgacagccgagggacacgagcatcactctgctggacggaccattaggggccttgccaaggtctaccttagagcaaacccagtacctcagacaggaaagtcggggctttgaccactaccatatctggtagcccattttctaggcattgtgaataggtaggtagctagtcacacttttcagaccaattcaaactgtctatgcacaaaattcccgtgggcctagatggagataatttttttttcttctcagctttatgaagagaagggaaactgtctaggattcagctgaaccaccaggaacctggcaacatcacgatttaagctaaggttgggaggctaacgagtctacctccctctttgtaaatcaaagaattgtttaaaatgggattgtcaatcctttaaataaagatgaacttggtttcaagccaaatgtgaatttatttgggttggtagcagagcagcagcaccttcaaattctcagccaaagcagatgtttttgccctttctgcttcactgcatggatacagttggtaaaatgtaataatatggcagaattttataggaaacttcctagggaggtaaattatgggaagattaagaaaggtacaaattgctgaggagaagcaggaaacctgtttccttagtggcttttatcccctcggcatgcgatggggctgatgtttctataattgcctcagactttcacatttactagtagggctgagagaggctttagtgaggaaggaatattcagaataaaacggttgagaaagctgagaagaccattgagttttgatcagttgtgaatagagtgcaaagccatggccaagctgtttttggaaacgctggccggcgtgtcttcagtggaaaaagcaaatcaaaatggagcgagagcaaaggggcgtcctcagtcctcaacctacaatcactgtatggaatcggtcctggcagctgaacataggaggtcactggaacaagtgatagtgcagattggctttcaaacatcctcctggcttgagttttatcagctacaatgtgggtcctcttttgaagccttaattcacaacagcagctttttgggggtggggctgggcgggtgttgtcattgttctttcccttcctgtaagtgtcgctagttgctgcctcgtatctcaggtttttctctgtttttgagaaatggacagttttttgaccaggatgtgacttcatgtttcctatggtgacttctaaaaccagcacagaatgatatgactcaacacagaccgacttggttatggggatgatgagccgcacagacctcactagttgtgcacaaataatgtgctatgatggggtgtaaagtgaaggcagaagagggtcagccgcattgttatgatactgggaaagtgctggtcaacgatttgagttagtttttagatatacattgaaatctttaatcagacattctcaagtttcacacagtagtttttgatgttatgtacacacacaccaaatgtgtaacagttcaccacttccagagtgtggtcatgcccaaaacatgtttaagaaaggaaagcagtagctccttgctaacgatgtttcaggaggtttgggggacttggttttaatgagcttctgtcatttagggcttctcttggccatggtcccccttccttctggaactgtgatgtagtcacatcctacagcctttagtgctggttcactagtgtcagataatcagttcttggaatcgagactgccgtggcgaaggggtggcctcggaggcaggctctggagctgcttggatgtctttaggtggggtggtggctggctctcttcagcatgtaattggggaaaccctcgcgtctactaggggtgatacagatggtgattttaaagagcaaaactagacttctatgtgagaagtgctggaaaatgatttaggacatgtgtaaagttagatggaaagactgtaaatgtttaatatgaatatagtgttcttttgaagtaaggccagctgttgaacggttaaactgtgcatttctcattttgatgtgtcatgtatgttaatgtatgaaatgattaaataaaatcaaaactggtacctgtttatacataaatacgagaaaagacctatctttgcagccataaactcggtgggaacaccaccactcaagttgccaaaggaggcagtggtgaaacctgtcctgttctcacttaaatgaggatttagctcaaaataaagtggtggtgtcatcaggtttattccgtgttctgtcattcacatggaacaccggatgattagctaacagtttagtgccagccttcattctttactgtgtacgttaaatgcacactacagtgaaaaagcctaagacacttggtaaatattttctagctgactgattccagaacacacaa

SEQ ID NO: 68899 - DNA, 5414 bp, Homo sapiens
gagagagaaggagaagataatatactgaaaagaagaggaggaggagagcgacgggacgggacgcgagcgggagcgcagccgccctctcggctccgcggcggcgcctcgcaagtccgggaggcgaggggggcccgaggggagacgccgtgacaactttcgtttccctctgagggaattgggaggtcggcggccccaaaagctttcagtccagtgtaaagctgttggagcgcgggagcaaaggtaaagaatgatgtaatgcgctggctgctccaaagcatcttttgttgtggaatggttattccagtcatctctttatgaatcaaatgtgaggggctgctttgtggacggagtcctttgcaagagcacatcaacgggaaagagaaagagacattcacttggagggctcttgctgaaaatgggtttaactctccttttgccagtcaccaccagcctgacctcatacacttttagtacaatggagtggctgagcctttgagcacaccaccattacatcatcgtggcaaattaaagaaggaggtgggaaaagaggacttattgttgtcatggcccatgagatgattggaactcaaattgttactgagaggttggtggctctgctggaaagtggaacggaaaaagtgctgctaattgatagccggccatttgtggaatacaatacatcccacattttggaagccattaatatcaactgctccaagcttatgaagcgaaggttgcaacaggacaaagtgttaattacagagctcatccagcattcagcgaaacataaggttgacattgattgcagtcagaaggttgtagtttacgatcaaagctcccaagatgttgcctctctctcttcagactgttttctcactgtacttctgggtaaactggagaagagcttcaactctgttcacctgcttgcaggagctgatgcagcagaatgggattggttatgtgttaaatgccagcaatacctgtccaaagcctgactttatccccgagtctcatttcctgcgtgtgcctgtgaatgacagcttttgtgagaaaattttgccgtggttggacaaatcagtagatttcattgagaaagcaaaagcctccaatggatgtgttctagtgcactgtttagctgggatctcccgctccgccaccatcgctatcgcctacatcatgaagaggatggacatgtctttagatgaagcttacagatttgtgaaagaaaaaagacctactatatctccaaacttcaattttctgggccaactcctggactatgagaagaagattaagaaccagactggagcatcagggccaaagagcaaactcaagctgctgcacctggagaagccaaatgaacctgtccctgctgtctcagagggtggacagaaaagcgagacgcccctcagtccaccctgtgccgactctgctacctcagaggcagcaggacaaaggcccgtgcatcccgccagcgtgcccagcgtgcccagcgtgcagccgtcgctgttagaggacagcccgctggtacaggcgctcagtgggctgcacctgtccgcagacaggctggaagacagcaataagctcaagcgttccttctctctggatatcaaatcagtttcatattcagccagcatggcagcatccttacatggcttctcctcatcagaagatgctttggaatactacaaaccttccactactctggatgggaccaacaagctatgccagttctcccctgttcaggaactatcggagcagactcccgaaaccagtcctgataaggaggaagccagcatccccaagaagctgcagaccgccaggccttcagacagccagagcaagcgattgcattcggtcagaaccagcagcagtggcaccgcccagaggtcccttttatctccactgcatcgaagtgggagcgtggaggacaattaccacaccagcttccttttcggcctttccaccagccagcagcacctcacgaagtctgctggcctgggccttaagggctggcactcggatatcttggccccccagacctctaccccttccctgaccagcagctggtattttgccacagagtcctcacacttctactctgcctcagccatctacggaggcagtgccagttactctgcctacagctgcagccagctgcccacttgcggagaccaagtctattctgtgcgcaggcggcagaagccaagtgacagagctgactcgcggcggagctggcatgaagagagcccctttgaaaagcagtttaaacgcagaagctgccaaatggaatttggagagagcatcatgtcagagaacaggtcacgggaagagctggggaaagtgggcagtcagtctagcttttcgggcagcatggaaatcattgaggtctcctgagaagaaagacacttgtgacttctatagacaatttttttttcttgttcacaaaaaaattccctgtaaatctgaaatatatatatgtacatacatatatatttttggaaaatggagctatggtgtaaaagcaacaggtggatcaacccagttgttactctcttaacatctgcatttgagagatcagctaatacttctctcaacaaaaatggaagggcagatgctagaatcccccctagacggaggaaaaccattttattcagtgaattacacatcctcttgttcttaaaaaagcaagtgtctttggtgttggaggacaaaatcccctaccattttcacgttgtgctactaagagatctcaaatattagtctttgtccggacccttccatagtacaccttagcgctgagactgagccagcttgggggtcaggtaggtagaccctgttagggacagagcctagtggtaaatccaagagaaatgatcctatccaaagctgattcacaaacccacgctcacctgacagccgagggacacgagcatcactctgctggacggaccattaggggccttgccaaggtctaccttagagcaaacccagtacctcagacaggaaagtcggggctttgaccactaccatatctggtagcccattttctaggcattgtgaataggtaggtagctagtcacacttttcagaccaattcaaactgtctatgcacaaaattcccgtgggcctagatggagataatttttttttcttctcagctttatgaagagaagggaaactgtctaggattcagctgaaccaccaggaacctggcaacatcacgatttaagctaaggttgggaggctaacgagtctacctccctctttgtaaatcaaagaattgtttaaaatgggattgtcaatcctttaaataaagatgaacttggtttcaagccaaatgtgaatttatttgggttggtagcagagcagcagcaccttcaaattctcagccaaagcagatgtttttgccctttctgcttcactgcatggatacagttggtaaaatgtaataatatggcagaattttataggaaacttcctagggaggtaaattatgggaagattaagaaaggtacaaattgctgaggagaagcaggaaacctgtttccttagtggcttttatcccctcggcatgcgatggggctgatgtttctataattgcctcagactttcacatttactagtagggctgagagaggctttagtgaggaaggaatattcagaataaaacggttgagaaagctgagaagaccattgagttttgatcagttgtgaatagagtgcaaagccatggccaagctgtttttggaaacgctggccggcgtgtcttcagtggaaaaagcaaatcaaaatggagcgagagcaaaggggcgtcctcagtcctcaacctacaatcactgtatggaatcggtcctggcagctgaacataggaggtcactggaacaagtgatagtgcagattggctttcaaacatcctcctggcttgagttttatcagctacaatgtgggtcctcttttgaagccttaattcacaacagcagctttttgggggtggggctgggcgggtgttgtcattgttctttcccttcctgtaagtgtcgctagttgctgcctcgtatctcaggtttttctctgtttttgagaaatggacagttttttgaccaggatgtgacttcatgtttcctatggtgacttctaaaaccagcacagaatgatatgactcaacacagaccgacttggttatggggatgatgagccgcacagacctcactagttgtgcacaaataatgtgctatgatggggtgtaaagtgaaggcagaagagggtcagccgcattgttatgatactgggaaagtgctggtcaacgatttgagttagtttttagatatacattgaaatctttaatcagacattctcaagtttcacacagtagtttttgatgttatgtacacacacaccaaatgtgtaacagttcaccacttccagagtgtggtcatgcccaaaacatgtttaagaaaggaaagcagtagctccttgctaacgatgtttcaggaggtttgggggacttggttttaatgagcttctgtcatttagggcttctcttggccatggtcccccttccttctggaactgtgatgtagtcacatcctacagcctttagtgctggttcactagtgtcagataatcagttcttggaatcgagactgccgtggcgaaggggtggcctcggaggcaggctctggagctgcttggatgtctttaggtggggtggtggctggctctcttcagcatgtattggggaaaccctcgttctactaggggtgatacagatggtgattttaaagagcaaaactagacttctatgtgagaagtctagttttgctctcttcagcatgtaattggggaaaccctcgcgtctactaggggtgatacagatggtgattttaaagagcaaaactagacttctatgtgagaagtgctggaaaatgatttaggacatgtgtaaagttagatggaaagactgtaaatgtttaatatgaatatagtgttcttttgaagtaaggccagctgttgaacggttaaactgtgcatttctcattttgatgtgtcatgtatgttaatgtatgaaatgattaaataaaatcaaaactggtacctgtttatacataaatacgagaaaagacctatctttgcagccataaactcggtgggaacaccaccactcaagttgccaaaggaggcagtggtgaaacctgtcctgttctcacttaaatgaggatttagctcaaaataaagtggtggtgtcatcaggtttattccgtgttctgtcattcacatggaacaccggatgattagctaacagtttagtgccagccttcattctttactgtgtacgttaaatgcacactacagtgaaaaagcctaagacacttggtaaatattttctagctgactgattccagaacacacaa

SEQ ID NO: 68900 - DNA, 855 bp, Homo sapiens
cggggactgcggataaatggccttaggccgcgggcagcgagatgttgcgttccggtgtgggtgtgggtgtgcctccgacggcgtctcggtgccagtgtcgaggttctttctgcttagctacccggagccgactacggaggaggacacctgagtttacgtctcttccatctgctgctcgcctcagctgcctgggtccccgacgagagccaggtgacacttaactccgccatctgcgttttgagcactgttctcataatggagtttcctgatttggggaagcattgttcagaaaagacttgcaagcagctagattttcttccagtaaaatgtgatgcatgtaaacaagatttctgtaaagatcattttccatacgctgcacataagtgtccgtttgcattccagaaggatgttcacgtcccagtatgcccactctgtaatacccccatcccagtaaaaaagggccagataccagacgtggtggttggtgatcacattgacagagactgtgactctcaccctgggaagaagaaagagaagatttttacataccgttgctcaaaagagggctgcaagaagaaagagatgctgcagatggtatgtgcccaatgtcacggcaacttctgtatccagcacagacaccctttggaccacagctgcagacacgggagtcgccccaccatcaaagctgggtgagaagagactccgctgcgatggctcggagcacgcagtagcatgcgtggaagcagcttacactctagtgggaagtggagccccattgagcaccatcccacactggctgctgatcttgtttgttgagggagatgggactataataaaattgaatgctgaagttga

SEQ ID NO: 68901 - DNA, 660 bp, Homo sapiens
cggggactgcggataaatggccttaggccgcgggcagcgagatgttgcgttccggtgtgggtgtgggtgtgcctccgacggcgtctcggtgccagtgtcgaggttctttctgcttagctacccggagccgactacggaggaggacacctgagtttacgtctcttccatctgctgctcgcctcagctgcctgggtccccgacgagagccaggatgttcacgtcccagtatgcccactctgtaatacccccatcccagtaaaaaagggccagataccagacgtggtggttggtgatcacattgacagagactgtgactctcaccctgggaagaagaaagagaagatttttacataccgttgctcaaaagagggctgcaagaagaaagagatgctgcagatggtatgtgcccaatgtcacggcaacttctgtatccagcacagacaccctttggaccacagctgcagacacgggagtcgccccaccatcaaagctgggtgagaagagactccgctgcgatggctcggagcacgcagtagcatgcgtggaagcagcttacactctagtgggaagtggagccccattgagcaccatcccacactggctgctgatcttgtttgttgagggagatgggactataataaaattgaatgctgaagttga

SEQ ID NO: 68902 - DNA, 470 bp, Homo sapiens
gccacatacaggtagagctccctctggaaagcagagtgctcagggagcctggggagggttgggggccgccgcatggaccaggcagctttgggtgggtctctgaggacaggtgacttgcacatggtggggacagtgggaagaagaaagagaagatttttacataccgttgctcaaaagagggctgcaagaagaaagagatgctgcagatggtatgtgcccaatgtcacggcaacttctgtatccagcacagacaccctttggaccacagctgcagacacgggagtcgccccaccatcaaagctgggtgagaagagactccgctgcgatggctcggagcacgcagtagcatgcgtggaagcagcttacactctagtgggaagtggagccccattgagcaccatcccacactggctgctgatcttgtttgttgagggagatgggactataataaaattgaatgctgaagttga

SEQ ID NO: 68903 - DNA, 452 bp, Homo sapiens
gaaagttcagttttcatcatgctagaggcttggaccagttattcattcttggaagcaatagtgcccagcagcggggccaggatgagggtgaagagagtaagtccaaggcctgtaagtgcacggctggattctgtcttgattgaaaattttgtcttttgctcatcatagattttttccccactaatcttcattatttatttacttttttagagacagagtctcactctggagtgcagtgttgtgatcacagctgcagacacgggagtcgccccaccatcaaagctgggtgagaagagactccgctgcgatggctcggagcacgcagtagcatgcgtggaagcagcttacactctagtgggaagtggagccccattgagcaccatcccacactggctgctgatcttgtttgttgagggagatgggactataataaaattgaatgctgaagttga

SEQ ID NO: 68904 - DNA, 708 bp, Homo sapiens
gttttagttacactcaatttaataaattgagggggcataaccaagtcctcaccattttaacaatttgtgctaacgcatttgaaaaaaattttacttccaacttctaaatccattatctctgttaacaggaagcattgttcagaaaagacttgcaagcagctagattttcttccagtaaaatgtgatgcatgtaaacaagatttctgtaaagatcattttccatacgctgcacataagtgtccgtttgcattccagaaggatgttcacgtcccagtatgcccactctgtaatacccccatcccagtaaaaaagggccagataccagacgtggtggttggtgatcacattgacagagactgtgactctcaccctgggaagaagaaagagaagatttttacataccgttgctcaaaagagggctgcaagaagaaagagatgctgcagatggtatgtgcccaatgtcacggcaacttctgtatccagcacagacaccctttggaccacagctgcagacacgggagtcgccccaccatcaaagctgggtgagaagagactccgctgcgatggctcggagcacgcagtagcatgcgtggaagcagcttacactctagtgggaagtggagccccattgagcaccatcccacactggctgctgatcttgtttgttgagggagatgggactataataaaattgaatgctgaagttga

SEQ ID NO: 68905 - DNA, 615 bp, Homo sapiens
gttttagttacactcaatttaataaattgagggggcataaccaagtcctcaccattttaacaatttgtgctaacgcatttgaaaaaaattttacttccaacttctaaatccattatctctgttaacaggaagcattgttcagaaaagacttgcaagcagctagattttcttccagtaaaatgtgatgcatgtaaacaagatttctgtaaagatcattttccatacgctgcacataagtgtccgtttgcattccagaaggatgttcacgtcccagtatgcccactctgtaatacccccatcccagtaaaaaagggccagataccagacgtggtggttggtgatcacattgacagagactgtgactctcaccctgggaagaagaaagagaagcacagacaccctttggaccacagctgcagacacgggagtcgccccaccatcaaagctgggtgagaagagactccgctgcgatggctcggagcacgcagtagcatgcgtggaagcagcttacactctagtgggaagtggagccccattgagcaccatcccacactggctgctgatcttgtttgttgagggagatgggactataataaaattgaatgctgaagttga

SEQ ID NO: 68906 - DNA, 1639 bp, Homo sapiens
gttttagttacactcaatttaataaattgagggggcataaccaagtcctcaccattttaacaatttgtgctaacgcatttgaaaaaaattttacttccaacttctaaatccattatctctgttaacaggaagcattgttcagaaaagacttgcaagcagctagattttcttccagtaaaatgtgatgcatgtaaacaagatttctgtaaagatcattttccatacgctgcacataagtgtccgtttgcattccagaaggatgttcacgtcccagtatgcccactctgtaatacccccatcccagtaaaaaagggccagataccagacgtggtggttggtgatcacattgacagagactgtgactctcaccctgggaagaagaaagagaaggtaaggacagagcccgcctcagttccttcatctgggaagcctggtttttccttgggaagagtcagtttgctacctgaaaattactcccaatagtttatgtacaaagtagaaaagaagagtcctaacgctgcgttatccctgtcctaaactgcgaggggcctgagttttcagttttataaatgttctttaatatgagggatcccaggtcaggttcgtctttcttgactggaatttactagtttccctcctgagatggagaattcacatggctttctagatccattctgttcatgtgcgtttcatttgtttgtttgtttgtttgtttgttttgagacagtcttgctctgtcacccaggctggagtgccatggtgaatggtgccgtctcggctcattgcaacctctgcctcccgggttaaagcgattctcctgtctcagcctcccgagtagctgggactacaggcgcatgccaccacatccagctaacttttgtatttttagtagagacagggtttcactatgttggccgggctggtcttgaactcctcaccttatgatctgcccgcctcagcctcccaaagtgctgagattataggtgtgagccaccacgcccagctcaaggagcttctctagtgaactggctgctgtcaggcttaatccgttcctagtcatgggtcctggttggtggttaccaactatcttagtatatgatgttcaatactttacagttatattaccataaaccaaataacttttggtctcaaacatagagaataaaatcagtgttccttagtctgccacacaaaattctctgtgcggaagcttgctctggtccccactttctggccctgtctagctctccctgctgtggctgtgccctgggaccctcagcctctggaggtctcttaagcctctgagacatcacagctctctggcacacccgcttcttccacatgacacagcttcccttgctgggggctcacccagcactgccccaaggcccccacacaggaatgccctcccggctgctcctggcccgctgtgctcctgtccttttggtgggcacgccctgtgttctgcctgcatccctgcacgggtccctcctgcatggtcgctcagcatggccatgcctgcctgccttggccggagggccacccccggctgctggaaccctccccactctcctcactgccttcccctcttggagttctgactcctaggactttatatcgctgcctacatcctggcacc

SEQ ID NO: 68907 - DNA, 241 bp, Homo sapiens
tcttcaaacaagactccaggtaatttgataagatgtgcttacttatgcatggaattcaattgcatattgtgaaagagggacacatagaaaacagtgtctgtgaaaaatctaaattactttgaagcctactgaaaacttttatttatttgttttatttatttattttttggagacagagtcttgctctgttgcccaggcttaagtgcagtggtgcagtctcggctcactgcaacctctgcct

SEQ ID NO: 68908 - DNA, 470 bp, Homo sapiens
tcctgcacatataaacacatgtgcatcttgatttgcatctgtatcagatggtgtgtgttttaagaccttttctcaaatcttaaattttctttgttctggccttcaccttttgtgggtcatttcagcaacctctttgctctctttccttcctgcagtcttgtctgtgtgtcccccagcaccctttagactccttcccccacccccacctcctccctgtcctcttctcccatcttacctgcatcccccaatccactgtgttctgttgttctgttttgctgcagttttctacttgtcttctttaattgcatcagtctgtgtttagattcttttctctttaaactgcctctctcccagttgtctacttagtgagcttatcttgtgtttccagtacctagtgcaatgctggcatgtgcagcgtttaatacagatttgttagaagagtgaagtgaataaatgactggattaaaaaa

SEQ ID NO: 68909 - DNA, 245 bp, Homo sapiens
gcaaagtgttggcagcgtttattttttactgcttagaatttaaactttagatttagcaaacagtaggtaccaaacagtcttagatatatccagtagagaggggaaaaaagaatttattcttatataaaatttgaccctgttacatttagttcatcattttaatccatcaagatattttgtttactatacagattctgccatctaatatattttccacgctttcttgctctgtgtgactgcagcag

SEQ ID NO: 68910 - DNA, 414 bp, Homo sapiens
tcgacaaaaatattaagccaaaaaaaggacattaaaaagtcccaactcattggaaaagcatgacattttggtattgagtctttatgtccaagatgtcatgcttttccaatgagttgggactttttaatgtcctttttttggcttaatattttttctttagatcttatacatttcttaagttttgttcctataaattttatcctttttgttctgctacaacatgagctcttctaattgcttggttttctaggtatattaatgtcatctgtaaataattttttctttttccttccagttttcatactgctcactgcttttgctaattgctttgactaatgaatattagtaaatcaaagtgaagattttgggcttattttcttcatatatataaagggagtattgtaatgtttcatc

SEQ ID NO: 68911 - DNA, 507 bp, Homo sapiens
gacggggtttcaccgtgttagccaggatggtctcaatctcctaacctcgtgatccgcccgcttcggcctcccaaagtgtttttatttgatcttatcacagtagtcagcatattttgccttgtattatacttatatgtgtacatgtagtcttcccccagactagccattacttgagagcaaaattttagccttatccgtctaaatatcccccaagtgcttatctagtgaatgcctaattgtaatgcctattgacttaaatggaatttaattaaatggggtttgttatattctgctaagactgtagtagatgtagacacaagtctgattcttttcttataactaccattttcccctgttatggatatatcaaattacttaccacccttaacatctcctccagattaatttgtcttgtgtaagcccctagttgaccaaagctgatggctgattaaattcccccaagggaactcagccacacagccacataggttttttttcttttttggt

SEQ ID NO: 68912 - DNA, 570 bp, Homo sapiens
aaaacctggaaagtttgaggtagtagtgatagtccatatatggctaaaaaggatgttttcctcaagttgtaaaatgtggaatttagaaagtaaattaatatatttcaaaggattagttgaggtttaacatattttatggctatgaaggcaataaagacattttacacattgacgctgtgatgtagctacatcagagagtgtgacgtgcctgtggttgagccctccttattggctaagctggccactgtttttgaaacttaatggtaggcctctgacgaaaggtctaatgtggataaaacctgcattttataccagtgtaaatcaataatttcaactttgttatggtggttttgatgttttttctctgaaaaggaactcaggaaatgtgattaataaggtcaactgctagatttaattttgtttttgatggaaatattttttcctagaaaatttaatggccatgaatctgattgcagagattatttaccataactagacctgtcccctgacaggcaatttaaaccacttccattaaaatctagataatcagaaagaatgttgtggaacatt

SEQ ID NO: 68913 - DNA, 378 bp, Homo sapiens
attaatagtcttttaaaaaaattatgtgtttgaaagtaatttgtgtggttattactatttccgaaaaatcgaagtatcccattttccacattgcccaatgtactttaaaactaactgcaacctacttcctcaattcccaaatactcatatttggaaatgtaatacaaactgacgaattttagctctgctcatttaacttgacttctagtccacatttactcaataatttcagagcaaacctttattacccaaacccagactttttttctacctcgaatgcagttttaattattgaaggtctttccattacatttttattctaaaaaggactttggttaaaatataataccctataaataagatgtaagcattttattt

SEQ ID NO: 68914 - DNA, 474 bp, Homo sapiens
caagggcaccaggggggtttcctccccctcctcctctccctcctcctccccgtcctccttctcctcctcctcagcggtgactttccaggtggagcctttgaattttttaaaagaccatagtaatcagatctacttgaaaaattaagtgaattgatttggttggaatgctcttttaccgatgctttaacatacagccactagattcccagaagttgtgcatgagttcctgtgaggagagttggcatcttggaaatcaaagacggttgtgatgcagttttttgatatgaggataacaggaagcgtcaggacaatcatgcccataagaactctaaactgttcagatcattttatcttagtgaaactggcaattgaactttgctctagttgatgggcaaaatttctcctagactattcatcatcccaatttcatcctagttgaaaattttcaaatgccataagaaatctttatagatt

SEQ ID NO: 68915 - DNA, 346 bp, Homo sapiens
caagggcaccaggggggtttcctccccctcctcctctccctcctcctccccgtcctccttctcctcctcctcagcggtgactttccaggtggagcctttgaattttttaaaagaccatagtaatcagatctacttgaaaaattaagtgaattgatttggttggaatgctcttttaccgatgctttaacatacagccactagattcccagaagttgtgcatgagttcctgtgaggagagttggcatcttggaaatcaaagacggttgtgatgcagttttttgatatgaggataacaggctggagtgcagtgctgcaatcatagctcactgcagcctcgacctgctgg

SEQ ID NO: 68916 - DNA, 1731 bp, Homo sapiens
ggagcctcggttcccctcgggcggctgaaggaggggctgagcctcaggacccctaggccaggccgtgttgaaagcagataccccgaggcctcgcccagcctgcgctggagggaagaaggcgctggaggagcaccagcgaaagcagccagtctgagatattgacactacagaaaaaactgacagcttactccttgtattgattctactcttctctacaaatatagactccgttccctaccacagccttatagttctgccccagagacaagtatgaataccacagacaacggtgtcaactgtctgtgtgctatctgtggggacagagcaacaggaaaacactatggggcatccacctgtgatgggtgcaagggtttcttcagacgcagcattcgtaagagtcacatttattcttgcaggttcagtcggcaatgtgttgttgacaaggacaaaaggaatcaatgtagatattgtcgattaagaaagtgttttagagcgggaatgaaaaaagaagctgtacaaaatgaacgtgacagaataagcaccagaagaagcacatttgatggcagcaacatcccctccattaacacactggcacaagctgaagttcggtctcgccagatctcagtctcaagccctgggtcaagcactgacataaacgttaagaaaattgcaagtattggtgatgtctgtgaatctatgaaacagcagctcttagtcttggtggaatgggctaaatatattcctgccttctgtgaattaccattggatgatcaggtggcactgttgagagctcacgcaggggagcacttactgcttggagctacaaagagatccatgatgtataaagatattttgcttttgggaaacaactatgttattcaccgcaacagctgtgaagttgagattagccgtgtggccaatcgtgttctagatgagctggttagaccatttcaagaaatccagattgatgacaatgagtatgcttgtttaaaggcaattgtattttttgatccagatgcaaaagggctaagcgatccagtaaaaattaagaacatgaggttccaagtgcagatcggtttggaggactacatcaatgatcggcagtatgactcccgggggaggtttggagagttgcttctgctcctgcccacactgcagagcatcacgtggcaaatgattgagcaaatacagtttgttaaactttttgggatggttaaaattgacaatctacttcaggaaatgctattaggtggggcttccaatgatggcagtcatctccatcatccaatgcatccacatttgtctcaagacccattaactggacaaactatacttttaggtcccatgtcaacactggttcatgcagaccagatctcaactcctgaaaccccactcccttccccaccacaaggctctgggcaagaacagtacaaaatagctgcaaaccaagcatcagtcatttcacaccagcatctctccaaacaaaagcaattgtgaaaatgtgtttacttcagaacggcactacataaatgtgaaaagttgttgatcttgaaatatctcaagatagcacttttggcaaactcttagccaaggcttcttcattggtgctgttataagatggtatcctattttcttgtttatacgttcattctatttgttattgctactatgtgaaactttcacatgcaaccaatgtatatctgagtttgaaggatgtttatatagggtagg

SEQ ID NO: 68917 - DNA, 2071 bp, Homo sapiens
ccggaatctccactatgcgggcatgaggcggcggcagtcaccgcctggctgccccgcgggggcccgggagagccgctgcggtctcgggaggcctccgcctggctgccccgcggaggcccgggagagccgctgcggtctcgggaggccgggctttgggacttgctggcccgaccgccagtcgccctggggccttgggaacagggaaatgcgcgcgccgaggcggtggcggcctcgctgctttcagttttcattgagtctgctggttactgtttaacgtccccacccacgtttcagtttgtttagtaaatcgataggactgtgagagtcaggccgctgccctgtcgccattgagcaaagctaatattctcccagcatatggtctaaaatctttgctagagatcgggaaaaagaaacaaacaaacaaacaaacaacaacaaaatccttaagcttcctctcccaagtccccccatccccacccccacttcccacctcctcgctttcagcaaacttcccagcctgggaaaagtgcggcgcgggacagcgcgacggggtgggtgggggacctgctgccgggagatgcggcggcggccgcgcggctgactgcgactcgggagctccgggagcggcccgcgcaggagcaccagcgaaagcagccagtctgagatattgacactacagaaaaaactgacagcttactccttgtattgattctactcttctctacaaatatagactccgttccctaccacagccttgttcagtcggcaatgtgttgttgacaaggacaaaaggaatcaatgtagatattgtcgattaagaaagtgttttagagcgggaatgaaaaaagaagctgtacaaaatgaacgtgacagaataagcaccagaagaagcacatttgatggcagcaacatcccctccattaacacactggcacaagctgaagttcggtctcgccagatctcagtctcaagccctgggtcaagcactgacataaacgttaagaaaattgcaagtattggtgatgtctgtgaatctatgaaacagcagctcttagtcttggtggaatgggctaaatatattcctgccttctgtgaattaccattggatgatcaggtggcactgttgagagctcacgcaggggagcacttactgcttggagctacaaagagatccatgatgtataaagatattttgcttttgggaaacaactatgttattcaccgcaacagctgtgaagttgagattagccgtgtggccaatcgtgttctagatgagctggttagaccatttcaagaaatccagattgatgacaatgagtatgcttgtttaaaggcaattgtattttttgatccagatgcaaaagggctaagcgatccagtaaaaattaagaacatgaggttccaagtgcagatcggtttggaggactacatcaatgatcggcagtatgactcccgggggaggtttggagagttgcttctgctcctgcccacactgcagagcatcacgtggcaaatgattgagcaaatacagtttgttaaactttttgggatggttaaaattgacaatctacttcaggaaatgctattaggtggggcttccaatgatggcagtcatctccatcatccaatgcatccacatttgtctcaagacccattaactggacaaactatacttttaggtcccatgtcaacactggttcatgcagaccagatctcaactcctgaaaccccactcccttccccaccacaaggctctgggcaagaacagtacaaaatagctgcaaaccaagcatcagtcatttcacaccagcatctctccaaacaaaagcaattgtgaaaatgtgtttacttcagaacggcactacataaatgtgaaaagttgttgatcttgaaatatctcaagatagcacttttggcaaactcttagccaaggcttcttcattggtgctgttataagatggtatcctattttcttgtttatacgttcattctatttgttattgctactatgtgaaactttcacatgcaaccaatgtatatctgagtttgaaggatgtttatatagggtagg

SEQ ID NO: 68918 - DNA, 1055 bp, Homo sapiens
ccggaatctccactatgcgggcatgaggcggcggcagtcaccgcctggctgccccgcgggggcccgggagagccgctgcggtctcgggaggcctccgcctggctgccccgcggaggcccgggagagccgctgcggtctcgggaggccgggctttgggacttgctggcccgaccgccagtcgccctggggccttgggaacagggaaatgcgcgcgccgaggcggtggcggcctcgctgctttcagttttcattgagtctgctggttactgtttaacgtccccacccacgtttcagtttgtttagtaaatcgataggactgtgagagtcaggccgctgccctgtcgccattgagcaaagctaatattctcccagcatatggtctaaaatctttgctagagatcgggaaaaagaaacaaacaaacaaacaaacaacaacaaaatccttaagcttcctctcccaagtccccccatccccacccccacttcccacctcctcgctttcagcaaacttcccagcctgggaaaagtgcggcgcgggacagcgcgacggggtgggtgggggacctgctgccgggagatgcggcggcggccgcgcggctgactgcgactcgggagctccgggagcggcccgcgcagtgattgctgccttgaccgtccctgctcttgaagagcaccagcgaaagcagccagtctgagatattgacactacagaaaaaactgacagcttactccttgtattgattctactcttctctacaaatatagactccgttccctaccacagccttgcctcagaattcactgtgctgaggagctaacaggatcctgacatttaattgtctctgcctgagcattctgtcaactttggaacttgtatgagcacagacggggtttcaccgttttagacaggagggtcccgatctccagacgtcgtgatcctcccgccttggcctcccaaagtgctgggattacaggcatgagccaccccacctggcccaacaagcattcttttcacaacatgtttagtgccctgtttgcctcatttttgtgcttat

SEQ ID NO: 68919 - DNA, 388 bp, Homo sapiens
cttttgggctattggtctttcaacatgcagttaggggataaaagtaaatcatttaatctatgcagcatgtcactcaatagtatacttttggaaattgtttccacaggagcaccagcgaaagcagccagtctgagatattgacactacagaaaaaactgacagcttactccttgtattgattctactcttctctacaaatatagactccgttccctaccacagccttgtaagtggtgcccgctgaggctgctaaattgctttgtaaattatttattacttggacaccttgtaaagacctcttttcttcttgtctgacttgcttgtgctttcgtatatactaaaaggtctcaaagtgtacactgaccacaacctccttatgaaatccttt

SEQ ID NO: 68920 - DNA, 2278 bp, Homo sapiens
ccggaatctccactatgcgggcatgaggcggcggcagtcaccgcctggctgccccgcgggggcccgggagagccgctgcggtctcgggaggcctccgcctggctgccccgcggaggcccgggagagccgctgcggtctcgggaggccgggctttgggacttgctggcccgaccgccagtcgccctggggccttgggaacagggaaatgcgcgcgccgaggcggtggcggcctcgctgctttcagttttcattgagtctgctggttactgtttaacgtccccacccacgtttcagtttgtttagtaaatcgataggactgtgagagtcaggccgctgccctgtcgccattgagcaaagctaatattctcccagcatatggtctaaaatctttgctagagatcgggaaaaagaaacaaacaaacaaacaaacaacaacaaaatccttaagcttcctctcccaagtccccccatccccacccccacttcccacctcctcgctttcagcaaacttcccagcctgggaaaagtgcggcgcgggacagcgcgacggggtgggtgggggacctgctgccgggagatgcggcggcggccgcgcggctgactgcgactcgggagctccgggagcggcccgcgcaggagcaccagcgaaagcagccagtctgagatattgacactacagaaaaaactgacagcttactccttgtattgattctactcttctctacaaatatagactccgttccctaccacagccttgcctcagaattcactgtgctgaggagctaacaggatcctgacatttaattgtctctgcctgagcattctgtcaactttggaacttgtatgagatagttctgccccagagacaagtatgaataccacagacaacggtgtcaactgtctgtgtgctatctgtggggacagagcaacaggaaaacactatggggcatccacctgtgatgggtgcaagggtttcttcagacgcagcattcgtaagagtcacatttattcttgcaggttcagtcggcaatgtgttgttgacaaggacaaaaggaatcaatgtagatattgtcgattaagaaagtgttttagagcgggaatgaaaaaagaagctgtacaaaatgaacgtgacagaataagcaccagaagaagcacatttgatggcagcaacatcccctccattaacacactggcacaagctgaagttcggtctcgccagatctcagtctcaagccctgggtcaagcactgacataaacgttaagttggtggaatgggctaaatatattcctgccttctgtgaattaccattggatgatcaggtggcactgttgagagctcacgcaggggagcacttactgcttggagctacaaagagatccatgatgtataaagatattttgcttttgggaaacaactatgttattcaccgcaacagctgtgaagttgagattagccgtgtggccaatcgtgttctagatgagctggttagaccatttcaagaaatccagattgatgacaatgagtatgcttgtttaaaggcaattgtattttttgatccagatgcaaaagggctaagcgatccagtaaaaattaagaacatgaggttccaagtgcagatcggtttggaggactacatcaatgatcggcagtatgactcccgggggaggtttggagagttgcttctgctcctgcccacactgcagagcatcacgtggcaaatgattgagcaaatacagtttgttaaactttttgggatggttaaaattgacaatctacttcaggaaatgctattaggtggggcttccaatgatggcagtcatctccatcatccaatgcatccacatttgtctcaagacccattaactggacaaactatacttttaggtcccatgtcaacactggttcatgcagaccagatctcaactcctgaaaccccactcccttccccaccacaaggctctgggcaagaacagtacaaaatagctgcaaaccaagcatcagtcatttcacaccagcatctctccaaacaaaagcaattgtgaaaatgtgtttacttcagaacggcactacataaatgtgaaaagttgttgatcttgaaatatctcaagatagcacttttggcaaactcttagccaaggcttcttcattggtgctgttataagatggtatcctattttcttgtttatacgttcattctatttgttattgctactatgtgaaactttcacatgcaaccaatgtatatctgagtttgaaggatgtttatatagggtagg

SEQ ID NO: 68921 - DNA, 190 bp, Homo sapiens
taggtccaaagcagggcagggaaggttctccaaatgctgccccagctgtacaaactgtccctcaacccatccaatttccatgctcacctagcaacactcatatttttctaaaataatttttattacaaaacagtacatgcttataaaataaaaaataaaaaatgcataaagtagaaaaaaggaataaaaa

SEQ ID NO: 68922 - DNA, 377 bp, Homo sapiens
gttaatttcccttggaaaagtattgatgatcaagtgatgctagcagcaacagtgttaaaggctttaacgcttttaaagggtgacacaggcttaaactgagacaatccagcatggaacacttgcaggaagtactaggaaagtgcattttctttccatgagggttgccaaactggaagcatgttagctaaagctacctgtagtcattttgtggccacattgggtgagattgtctgagaaagcaaaccaactgaagcagagcagagaagatactctaccaacctagttggagccctggttccagccttgcctgaagctaaatgcacctctatgcttcctttttactgacccaataaatttccctatttgtttaaacaagc

SEQ ID NO: 68923 - DNA, 751 bp, Homo sapiens
gctgatttatttgcttatggtctgtttttatgctgcaacaagcagagttgaataatggtgacagaaatgatatgacccacaaagtctgaaatattcaccatctgtcttttataggaaatttgttgactcttgttctaaagtataacttgagtatagtcataacatgtttaatgctataaatcttgtattacttttttaattcctaatttttaactgtctgatagctaacaatacttataataatgctgaggtatacttttaccttccatattatcatcggatgattattttaaacacataattgtattcactctcacaataatcagcattattattatcagtcttattagcagaagtttgttttagttaggtgcttcccctgcccaacctaacctactcctcatatctctaaattttaaactaaggacattttaaattttaaattaatttccattctttaatttataagcctgttttcagattttctgaattggcaatgtttataaagtctggttgtattatcagtcaaggaaagataccacgttttaaaaatatctaattttttttagcttaggacatagtttctaatcatgtgcttgttttaacctctagctcttctctatatggggaggctgaggcaggaggattgcttgaacctgggaggcagaggttgcagtgatccaagattgtgccactgcgctccagcctgggcgacagagtgagacttgagactttgtctcaaaaaaaaaaa

SEQ ID NO: 68924 - DNA, 347 bp, Homo sapiens
ccctattctgagcacaaaagaaaccaggcatttactgtattgaactgtttacttctttttgttatattcaattttcccttggtaatcaggtataaaatccttaaaacaaaaagcctgtgtctttggaggcaggaaggagaaacagaagctggagagagcatgattgtaaaagagaagcgcctccagaacaaatctaacaaaaagaaggaataggagtgttactgggctttcctcaaaagagggcctgacagtggctcacgcctgtaatcccagctatttggtaggcagaggcgggaggatcacttgagcccagcctgggtaacatggcaaaaccccatctccacaaa

SEQ ID NO: 68925 - DNA, 359 bp, Homo sapiens
taccttccccctggtaactagtagaatactgacatatagtgcatatttattaaaataatgaataaaaaatgaattaaagagcagttaaagttcccagatgcttcactgtggacatgctgatgtttcgttatagttcttattctcagggagcattatcctcagcccctgacattcttccactttcaagtttttgagtagtaatttggaagatagatttggggaaagatcctgagatctgtacctacttatccaactatcaactcgacatgaccactttcatgcctaataggtttcgcagttttaatgtcttacctcttcctttctcattcttcacattagtcaatggccgtgcctcccac

SEQ ID NO: 68926 - DNA, 844 bp, Homo sapiens
ccatttgtatgtattcctgtgtattctcctgatggttaaatcgtggaagactatcctatggtggttaacatagctgatgttcttgccgtttattaacacaaatgatataaaactttaagtgttatatacttttttaaataatgggataagcctgtgtgtaggactgcattggtttgggcaggaatgaacagttctgggctgataatgaatggagttagagcagataggttcttagaggaagggcatgttggaagctccaatgcccatcttgcctccagtacctctacccatctgctgcttctaaagtggccacaggagacatagcagcttgtgacttaaatgtagcttgctgttcctagtaggaacttgagggattcagagagtaacgattttctgtatgaaaattatgtatcgtctctgagaatgcatagtgtcagatggaatagcagtgagcattccagttacatggcttaggattttaaaggtaaaatgctgttttagtgcgtattcagaattttgtatttttttcgaatttaaagtgtatccttctttacatgatttaatgttttatattccgatatcactaagtgaatattgttgattcactaatagtatgaggaatttcaatgaacatgatgatataaaagttgtaaaggcaatgataagactattgctgtgttaaaatatgactgtttatggttgctttcacatctcatttaattgtgtttttgcagcaccaattgtattatattacttaaggtcaagtaatccagttgactttatggcactttttcatttaacagtgccattcagtataataaatttctacagtgatttgaacatt

SEQ ID NO: 68927 - DNA, 509 bp, Homo sapiens
ttgggattcaagtctaatacgtaaaggttatgagtgagcacagagcaacccatttaaagggcttggtttcttttcaaaaaaaaataaaggcaaaacaagggtttgaagggcaaatttcgagaacttttcgttaacataacaagaactaagccactgagtgtattctgtgtcatattcatcacaactacagggactagcagtaaggaagccattaaattcccatctccagccttagcctagtattttatacacggttggttatgaaagcagaactcagaatgttaatttttttcacctatgtaatttatcttaagagtggcaataccaaaaggctactattgccctaagcaaacttcaacagttagccattttaaataaatactactgaattaagtaaaaatcgctctccagggaaaccccaagggtctcattctcagcccaatgcagatgggtaaattatccaagaacgactgctctgagaacgagaaaggctactcctttccagatgt

SEQ ID NO: 68928 - DNA, 288 bp, Homo sapiens
ataaattgttgctgcaacttttaatcaattgctcctgaagtctttattaaaatttatgtttcttagaactacctatatttaaaatgtttttgtccatcatctcaggttccacatttgaaagattttctcacatttacactttcatattgtgacttggcttaagaggtaaagttagagatatttcagaaatttgggtttataaattccttaacttgctttctatttcccatgattttagaacagtgtttctcaaactttatggtgactgagaatcccctagaaacttgt

SEQ ID NO: 68929 - DNA, 1021 bp, Homo sapiens
gttcctgctgttctttacagtatgggaacaactaagccatgcactggttatctggtctaaatatttaaaatagggaactactcagtggtacccaccattggttatactgctacctgagtcacatcatgagaatcacagcattttgtgcttggagaaaggcaaaagccatcttttttaatatcaggccatctattcctaatggatttaatcattatagggattgagagtggagaaagatggggtgagtgtgggtggagctgtacatttttatttttacctctcacaccccactggaccccaggtagctgcaaggtggggacttggattaagttttggcctgggcgagctgtggccttgggcaggctttccaggaggcctggcttagtttggtcactcacctgacagaacagcaagtgtgatggcagagaatgttccttctacaactggcctggcttcctgtgataatcctgtagaggttatttttgtataacatcagctttgacaaggagcaaaagcacagtgaaaacaaaccttatccaaaggagcagcataaataccctctgtcagtttgttcaagagcaagcgaactgcccctctgctctgttctttagcaggtgcatacacttgccagtgaaaagtccatggtttagctaatgcaggtgttggtgtcatcttacacatttgccttgctaattgctcatatttggctgcattttcctgcagttgttgcaagactttagtgcacaagattcaggctcctgagggtccttgttgtaccctaagcaccaaaattgctagttacagatctaggactgttttttcctagaatcaaagcagagaatagcgttctgtgcctctgtcctgcctcctactcccttgtcttttttgtacacagacctaagggtgtgagtgaaagctccattcctgacttgtggattggagaacagtgcccagttgtaaagtaatggcagaaatgtggaatctgatgaatgcaataaatcattaaatgctggaaatgaag

SEQ ID NO: 68930 - DNA, 2152 bp, Homo sapiens
  misc_feature (1289)..(1289): n is a, c, g, or t
  misc_feature (1292)..(1292): n is a, c, g, or t
cagctgggggagccacccatgggaatacagtcacatagtctctttccactcccccattccctgtgctatttaagttctaaaatgctattgtgggtttcttctgtgctagactcatatttatttatgctcctagctaggaaagaaatgtgtcctcagagtctacaggaggaaacttctcgtctctggagaatttttgaccatgagttggctttgtaactctaccctcagagggccttttaaacagctggtggttcttaaagaaatgaaatgcatgatgtgttactgctttgagctccgctgtggcagagcctggagctgagctcttggtgactggtcactgcacaattccatgaaagttcagataatataattgggtggtaaatgacacactaaatgaatctcttgggtgcagttgtttgcatcctaaactccagaatatgcagaaagagatattctgtgatagatatatctgccagttgggtaagcaaacaaaagtagatttgtcttcggcatgtgcaccaatggcaaactgcattcctacctagctttgaaataaattattggaagttctctggtgccttaaggtggtgtagaaggaaaagatccctggggtttgttaatgtatttagtcctcttctctgtgttatgggaatttctaaaaacagataatttgtacgttggacctaaaactgctttcaagaactcagtagacttgggattgaaggattgggttttctctttcccatgtgaacttccctaaatcctactctggcttcagaaagcacagctcctatacaagtctgacttctgcatttttagtgtaaatgtaatgtattgagtaatggaaagactaatggaagaattgatagctcaaaaatgagttttttccaacaccatttttttttgtctctgaaaacaccagcaggctgtgtccaagcatgggctgatgatccctttatgtgatgatagaacaagggaggagagagacaaattaatgggattgttaaaaatggctgaaaacttgatactaactttgagtcagtattttctttttaaagtcgtgtaatacaatatttgtagataggacattgaaagtgatgggggaaataaatgtctatgcagtgacgttatagccattaattctttagtggaaaaggacaaggtctgtacctaacagcagtaggagagtgagttttggggccagacacgcgacggctctgctgccgactaactgtgcaagcttggacagggtacctacctctcttaacctcaaagtcctccatggaaanagngggtaaggtgtgaagattaaagaaatagcacgcttcttaaagcactcagcatgtcagtggatgttgggagccttccctcacccctttgaaaatgggctctgcacaaacacattttggtgggaggctggggtctatcctaccaacctgagttgggggaataagatgatctcttccacagttcgggtttgcacaaccagcttttgcaggtgaggcagggaagaggcatgagtgtcattggcagagtgataagcgaggctggcaagttcactttggtagaacctctgtggactccttagttcttccaggttgaatcctgggcagaaatcacatgaaagctgtgaagcacagacatcagtttagaaattgtgtactttcccgctgaatcccaaatgcacaataactgtacaccttgcggttgcatgaatctacaaggtctcctatgcgccctcattcataaactcaaggctgagaatgttggcaggccaagtcctgcccctccccggagtgagctgccttggttcacacgggagtggtccagcgacaggacccgacacctcccctccggaagctcttcagcaggacctgcctcgggtcctggggcagctatcctccggggcctgcctgcagtgaaaccatcagtccgtggagatgttcactggattcctgaccagttgtgggtcgggctcaaccctccctctgggttttcaggatttgtaatgatcgctccatttgtgtaaaataggccggcattttctcttgttactgagatgtatttttctatgtgagttaaatgtataatttgtgtaattttgtacattaaaatgtatgctttttcacaattaaagggtttttttcccttc

SEQ ID NO: 68931 - DNA, 2250 bp, Homo sapiens
gctcataatctaggataatcacctatattaaagtcagttcactggcaaacttaattcaatctggtggcttaattcctctttgccatggaacatatattcacagatgccagggatctaagacatggccatatttcgggaaccattattcagagtaccagagttcaccctctggccctcaaaagattcacatccatcccaaatgcaaaacagatcaccctatccccacatcccctaaagacctaggatatggcagtatcaagtcaaaatcctaaatcttaacaacttaaacaccccaaatctcatcatctaaactaacccattcaaattaggtaaaaaggaggctccatgtttaatccaccctggaatacattgctctctatgaacctgtgaaaattaagaaacaagttatctgctccctaaattcactggtgaaacaggcatagaataacagttatagacattcctatttaaaaagggagagaagccaggcgtgatgtttcactcctgtaatcccagcactttgggaggccgaggcaggcggaccacgagttcaggagattgagatcatcctggctaacatggtgaaaccccatctctactaaaaatacaaaaaaattagccgggcgtggtggtgggcgcctatagtcccagctacttgggaggctgaggcaggagaatggcgtgaacccgggagggggagcttgcagttagccgagatcccgccactgcactccagcctgggcgacagagtgagactgtctcaaaaaaaaaaaaaaggagagagagagagaaatagacggaaaaaagaagtcatcagtccccagcaacttcaaaatccagcagggaccaggcatgatggctcactcatgcctgtaatcccagcactttgggaggccgaggcaggcagatcacttgaggtcaggagttcaagaccagcctggccaacgtggtgaaatctcatctactaaaaatacaaaagattagctgggtgtggtggcacactcctgtaatcccagctactctggaggctgaggcaggagaatcacttgaacccaggaggcagaggttgcactgagccgagattgcaccactgcactccagcctgggcagtggagtgagactctgtctaaaaaaaaaaaagggaaagaaaaatccagccagggatgctccatttggcttcaaggcctggaaatagacccaagtggctcatgtctggtttcttgccaccaaggtcagcctgctctttgctgctggacaatgcagtcccctccagcccctggaatagctcagcaatttcacagcatttttatataagtggtgatgtccgtttgagccccaaaatgtagctagtaagatccttaaggccagagtccaaattttcacttcaaatctgaagaaccagtgtccagaggggcagaacaactcttgttggtgggggtaggagagggaaggcacccagggagtggagggactggtgagaccagagcccaagcctcccgatccgagtaccccagtctttccattttatcttccaacagtacttgacaaaccaaacttgagaagtagccccgtttcatgcggacttaaggaaacaatggagctgcgtggtattgtgaggagcagcatgatgtggagaaggaaacaaggacctggggactcagacccaggttgcagtcttggctctgacacttcctggctatgtgatgtgactttggacacgtttcttaacctctctgagccttgggttattgctcgttaaagatgagatttacaagatctgtttttatacctctttgctcatggcagtctgtgagccttgacttgcttctttaaatggggttcacggactaacaacatttgtatccctggggagcttggtagaaatatagacctaggagaacccctgccccaccccaacctacagaatcagaatcttcctttgggtaggatccccaggtgatctacatgcacaataaggtttgagaaatacccccactctttgctcattaaacctgcagactctgttcaggtgtgcttcccccaagccacactcctccggggcttggctcggagcatgctgggtgcagacatcggtaacctcttagcttaatgtaccaaaattgcatgcataaagatctgtatcaagactgtcagattctcaggggcagaagccagtcttatcctctgcaaatcctgcatgtctgcctggcactgaatagttcccggcaattttgaaccaattaatcatca

SEQ ID NO: 68932 - DNA, 309 bp, Homo sapiens
atggtttcaccatgttggccagactggtcttgaactcctgacctcaagtgatccacccacctcccaccttggcttcccaaagtgctaggattacaggtgtgagataccgtgctcggccctgaatattctctttcttgatgacagcaataattaacatctattgagagcttaatacacatcaggcactcttctaagcagagaggcaatatggcctgctggacaactgcccaggcactagggccagattgccagtgtttgaatcctggttctgccacttattagctgtgtgaccctgggcatattcttttt

SEQ ID NO: 68933 - DNA, 232 bp, Homo sapiens
aatccagtactgaggggctgttagtgaagaagggatgaaggactatctgtgggatcagggctgccttgaaaagataaagaaatggtcagcactgcactccagcgtgggcaacagagaaagaccctgtctacaatacagtacaatacaatacagtacaatacaaaacacacagaaatgatcaggagtgaacctacacttgtgatgtgtaggtatgagaagtggaacaattagg

SEQ ID NO: 68934 - DNA, 850 bp, Homo sapiens
tttgaaccttaatttaaattcttttcttttccatttagagatatgtttttttctttaccttcatacctttctatttcttgctaatttctatcactaattccttataattgtccctgctccccttcttgatctcttcagggggaatactaggcagttttgtatcttctgatctcgtaccctgagacttcatctgaatgtgctctgccgccttcttatctgaactagatgaattggccataattatgaataggaatattaatgaaccagaggacatactagtcacatgttattatacactaaaaaataggaagtcatcttgaaaggcagttaatgtactgcaaatgtccctatgacttctttgctttctcttataccaaacatgcaggtatttaatttgtttaatgagggttgagtggagttatgtgtcgcttttattcggattgacgaaaatcaaccataattttcaagggatcttcatgggttgtgactggaagctgaccttagtcttgcgtctcatcctttatgatgttgagaaatcatctaatttctcagaactttttcttatctctaacacagttattaccataataatattgtctccatttatcatacaggatcattatgaaagtaaaatgaagtagtatatatgaaaatgctttttaaacacaaaagctttatacaaaatattgttgaatttaaataaggtaaatcttttttagtttatatatttgcagactatacatgttggattaaatgggcaattaagttttataggaatttgcttcctaagtctacttttgaagaggaaaacaggaacgtaccatatattttgctaagggtaaaatatttt

SEQ ID NO: 68935 - DNA, 1496 bp, Homo sapiens
  misc_feature (1438)..(1438): n is a, c, g, or t
ttcaaagctctgcgcagaagtgtccctgaagccagacgtcttctaactggttggcctcccctccagggcagcagacactatgtgcgcgccagctgcgggatccagcggccccttctcagcctccctgtcactctcccagctgcccggagtgtgccagtccgaccaaagcaccactctcggggcttcacacccaccttgcttcaaccgctccacctacgcacagggtaccaccgtcgcgcccagcgcagcccccgccacccggcctgcgggagaccagcagagtgtctccaaggcccctaacgtgggctctcgcacgatagctgcatggccgcacagcgatgcacgggaggggactgccccctccacgaccaactctgtagcaggtcacagcaactccagcgttttccccagggctgccagcaccaccaggacccagcaccgaggagaacatgcccccgagcttgtccttgagcctgatatctcagctgcctccaccccactggccagcaagctcctgggccccttccctacctcgtgggaccgcagcataagctcgcctcagcccggccagaggacacacgccacaccccaagcccccaacccgagtctttccgagggcgagattccagtcttgctgctggacgactacagtgaggaggaggaagggaggaaggaggaggtgggaacgcctcaccaggacgtcccctgtgattaccatccctgcaagcacctgcagaccccgtgcgcggagctgcagaggcggtggcggtgccggtgccccggcctcagcggggaagacaccatcccagacccgcccaggctgcagggggtgacggagaccacggacacgtcggcgctggtccactggtgtgcccccaactcggtagtgcatgggtaccagatccgctactctgcggagggctgggcggggaaccagtcggtggtgggggtcatctacgccacggcccggcagcaccctctgtacgggctgtcgccgggcaccacctaccgcgtgtgcgtgctggcggccaacagggcgggcttgagccagccacggtcttcgggctggaggagcccgtgcgccgccttcaccaccaagcccagcttcgcgctcctgctctctgggctgtgcgccgccagcggcctgttgctcgccagcaccgtggtgctgtccgcatgtctctgcaggcggggcagacgctgggcctgcagcgctgcgacacgcacctggtggcctacaaaaaacccggctttgatgattacccgctgggggctccagaccgtcagttagcccagcttctgggataacgcgtctcatcgaactggatctgagcgcaaaaggaagacacagacggtcaaaaacgaccccatccgctcctagggtttctaattcccgtgaagccagaatgccttgagcacacatggaacttgccactgntgttgggccagacgttgcccctctttatattgtccccaaattgggtgcggttccctgg

SEQ ID NO: 68936 - DNA, 1766 bp, Homo sapiens
ttcaaagctctgcgcagaagtgtccctgaagccagacgtcttctaactggttggcctcccctccagggcagcagacactatgtgcgcgccagctgcgggatccagcggccccttctcagcctccctgtcactctcccagctgcccggagtgtgccagtccgaccaaagcaccactctcggggcttcacacccaccttgcttcaaccgctccacctacgcacagggtaccaccgtcgcgcccagcgcagcccccgccacccggcctgcgggagaccagcagagtgtctccaaggcccctaacgtgggctctcgcacgatagctgcatggccgcacagcgatgcacgggaggggactgccccctccacgaccaactctgtagcaggtcacagcaactccagcgttttccccagggctgccagcaccaccaggacccagcaccgaggagaacatgcccccgagcttgtccttgagcctgatatctcagctgcctccaccccactggccagcaagctcctgggccccttccctacctcgtgggaccgcagcataagctcgcctcagcccggccagaggacacacgccacaccccaagcccccaacccgagtctttccgagggcgagattccagtcttgctgctggacgactacagtgaggaggaggaagggaggaaggaggaggtgggaacgcctcaccaggacgtcccctgtgattaccatccctgcaagcacctgcagaccccgtgcgcggagctgcagaggcggtggcggtgccggtgccccggcctcagcggggaagacaccatcccagacccgcccaggctgcagggggtgacggagaccacggacacgtcggcgctggtccactggtgtgcccccaactcggtagtgcatgggtaccagatccgctactctgcggagggctgggcggggaaccagtcggtggtgggggtcatctacgccacggcccggcagcaccctctgtacgggctgtcgccgggcaccacctaccgcgtgtgcgtgctggcggccaacagggcgggcttgagccagccacggtcttcgggctggaggagcccgtgcgccgccttcaccaccaagcccagcttcgcgctcctgctctctgggctgtgcgccgccagcggcctgttgctcgccagcaccgtggtgctgtccgcatgtctctgcaggcggggcagacgctgggcctgcagcgctgcgacacgcacctggtggcctacaaaaaacccggctttgatgattacccgctgggggctccagaccgtcagttagcccagcttctgggataacgcgtctcatcgaactggatctgagcgcaaaaggaagacacagacggtcaaaaacgaccccatccgctcctagggtttctaattcccgtgaagccagaatgccttgagcacacatggaacttgccacactgagtgtctgggtccaaggaactgctgccctcccttccttctacttaactctgttcccagaaacctgatggtcaatgccagatcgctccccactgccgccaggccttcttgtgtgttgttggttcatttgcggttttcagcagtcagtgcctctctatccagtagaatagtgtatggacgtaggaagggatgaaacagagaagttgcataacccagcctctttgatcatgttagaaatcacatcctcaggtctttccagcggaagctccttcatggtcaagctctaagacacaacgagctctgttattcaagaaatcaattccagtgga

SEQ ID NO: 68937 - DNA, 787 bp, Homo sapiens
  misc_feature (12)..(12): n is a, c, g, or t
tctagctcgcgnatcctgaggaggcggggttggcctaggcgaagatccggactctgggtgttttgctaccgtgaccgtttagaacagaaactgttcatacttggtgcgctgtggactcttgtgataattaaccaagagtagctctatttgtccaacctcacacctaaagaagaaagaaaatggcttgtgctgagttttcttttcatgtaccaagtcttgaagagcttgctggagttatgcagaaggggttaaaagataactttgctgatgtccaggtctctgtagttgattgccctgatttgactaaggaaccctttacctttcctgtaaaaggcatctgtgggaaaactagaattgcagaagttggaggtgtgccttacttattgcctcttgtaaaccaaaaaaaatattcttggagcaggagcaggtccatttcagactctcgggttcaattctgagtttatgccagttattcagacagaaagtgaacacaagcctcctgtaaatggaagttactttgcccatgtgaaccctgcagatggagggtgcctactggagaaatacagtgagaaatgtcatgattttcagtgtgcattactggctaatctttttgccagtgaaggccaacctggcaagaggtgaaagccaaagaaaactggccacttactttggactgggtgagaaaacctggaaaacatttggaattagcttaggaatggagggccttctaatacaagggaaagggggctccattttcctgagttcttctgccctggacttgtgaggt

SEQ ID NO: 68938 - DNA, 1135 bp, Homo sapiens
  misc_feature (12)..(12): n is a, c, g, or t
tctagctcgcgnatcctgaggaggcggggttggcctaggcgaagatccggactctgggtgttttgctaccgtgaccgtttagaacagaaactgttcatacttggtgcgctgtggactcttgtgataattaaccaagagtagctctatttgtccaacctcacacctaaagaagaaagaaaatggcttgtgctgagttttcttttcatgtaccaagtcttgaagagcttgctggagttatgcagaaggggttaaaagataactttgctgatgtccaggtctctgtagttgattgccctgatttgactaaggaaccctttacctttcctgtaaaaggcatctgtgggaaaactagaattgcagaagttggaggtgtgccttacttattgcctcttgtaaaccaaaaaaaagtttatgatctgaataaaattgcaaaagaaatcaagctgcctggagcctttattcttggagcaggagcaggtccatttcagactctcgggttcaattctgagtttatgccagttattcagacagaaagtgaacacaagcctcctgtaaatggaagttactttgcccatgtgaaccctgcagatggagggtgcctactggagaaatacagtgagaaatgtcatgattttcagtgtgcattactggctaatctttttgccagtgaaggccaacctggcaaggtaattgaggtgaaagccaaaagaagaactggaccacttaactttgtgacttgtatgagagagaccctggaaaaacattatggaaataagcctataggaatgggaggtactttcataattcagaagggaaaagtgaagtctcacattatgcctgcagaattttcttcctgccccttgaactctgatgaagaagtgaataaatggttgcatttttatgaaatgaaagctcctttggtttgtctaccagtttttgtctccagagacccagggtttgatttgcgactggagcacactcatttttttagtcgtcatggagaaggtggacactaccattatgacactactccagatatagtggaatatcttggatacttcttacctgcagagtttctctatcgcattgatcaaccaaagagacgcattcaattgggcgagattaaatcagctga

SEQ ID NO: 68939 - DNA, 1180 bp, Homo sapiens
gtcttgtctgtgttccctgttgtgattggcttggagtaggatacctgtctacctcatattacttatatttttccctgtcttcattttatctccctctggttgcatacttcatcactgaacacttaagaacagaaactgttcatacttggtgcgctgtggactcttgtgataattaaccaagagtagctctatttgtccaacctcacacctaaagaagaaagaaaatggcttgtgctgagttttcttttcatgtaccaagtcttgaagagcttgctggagttatgcagaaggggttaaaagataactttgctgatgtccaggtctctgtagttgattgccctgatttgactaaggaaccctttacctttcctgtaaaaggcatctgtgggaaaactagaattgcagaagttggaggtgtgccttacttattgcctcttgtaaaccaaaaaaaagtttatgatctgaataaaattgcaaaagaaatcaagctgcctggagcctttattcttggagcaggagcaggtccatttcagactctcgggttcaattctgagtttatgccagttattcagacagaaagtgaacacaagcctcctgtaaatggaagttactttgcccatgtgaaccctgcagatggagggtgcctactggagaaatacagtgagaaatgtcatgattttcagtgtgcattactggctaatctttttgccagtgaaggccaacctggcaaggtaattgaggtgaaagccaaaagaagaactggaccacttaactttgtgacttgtatgagagagaccctggaaaaacattatggaaataagcctataggaatgggaggtactttcataattcagaagggaaaagtgaagtctcacattatgcctgcagaattttcttcctgccccttgaactctgatgaagaagtgaataaatggttgcatttttatgaaatgaaagctcctttggtttgtctaccagtttttgtctccagagacccagggtttgatttgcgactggagcacactcatttttttagtcgtcatggagaaggtggacactaccattatgacactactccagatatagtggaatatcttggatacttcttacctgcagagtttctctatcgcattgatcaaccaaagagacgcattcaattgggcgagattaaatcagctga

SEQ ID NO: 68940 - DNA, 1243 bp, Homo sapiens
gtttctattaaaaaattagttttaaattttaaattacaataaaataaagtgtaagtattaaaaggccacttgtctatttctcacttggaatattaaatgctggaagctgtgtttgcctgtttatgaagatagaaacctaaatgcccttttgttctgtttatatgtttgaatgctcaatgttcatttccagaacagaaactgttcatacttggtgcgctgtggactcttgtgataattaaccaagagtagctctatttgtccaacctcacacctaaagaagaaagaaaatggcttgtgctgagttttcttttcatgtaccaagtcttgaagagcttgctggagttatgcagaaggggttaaaagataactttgctgatgtccaggtctctgtagttgattgccctgatttgactaaggaaccctttacctttcctgtaaaaggcatctgtgggaaaactagaattgcagaagttggaggtgtgccttacttattgcctcttgtaaaccaaaaaaaagtttatgatctgaataaaattgcaaaagaaatcaagctgcctggagcctttattcttggagcaggagcaggtccatttcagactctcgggttcaattctgagtttatgccagttattcagacagaaagtgaacacaagcctcctgtaaatggaagttactttgcccatgtgaaccctgcagatggagggtgcctactggagaaatacagtgagaaatgtcatgattttcagtgtgcattactggctaatctttttgccagtgaaggccaacctggcaaggtaattgaggtgaaagccaaaagaagaactggaccacttaactttgtgacttgtatgagagagaccctggaaaaacattatggaaataagcctataggaatgggaggtactttcataattcagaagggaaaagtgaagtctcacattatgcctgcagaattttcttcctgccccttgaactctgatgaagaagtgaataaatggttgcatttttatgaaatgaaagctcctttggtttgtctaccagtttttgtctccagagacccagggtttgatttgcgactggagcacactcatttttttagtcgtcatggagaaggtggacactaccattatgacactactccagatatagtggaatatcttggatacttcttacctgcagagtttctctatcgcattgatcaaccaaagagacgcattcaattgggcgagattaaatcagctga

SEQ ID NO: 68941 - DNA, 958 bp, Homo sapiens
  misc_feature (12)..(12): n is a, c, g, or t
tctagctcgcgnatcctgaggaggcggggttggcctaggcgaagatccggactctgggtgttttgctaccgtgaccgtttagaacagaaactgttcatacttggtgcgctgtggactcttgtgataattaaccaagagtagctctatttgtccaacctcacacctaaagaagaaagaaaatggcttgtgctgagttttcttttcatgtaccaagtcttgaagagcttgctggagttatgcagaaggggttaaaagataactttgctgatgtccaggtctctgtagttgattgccctgatttgactaaggaaccctttacctttcctgtaaaaggcatctgtgggaaaactagaattgcagaagttggaggtgtgccttacttattgcctcttgtaaaccaaaaaaaagtttatgatctgaataaaattgcaaaagaaatcaagctgcctggagcctttattcttggagcaggagcaggtccatttcagactctcgggttcaattctgaggtaattgaggtgaaagccaaaagaagaactggaccacttaactttgtgacttgtatgagagagaccctggaaaaacattatggaaataagcctataggaatgggaggtactttcataattcagaagggaaaagtgaagtctcacattatgcctgcagaattttcttcctgccccttgaactctgatgaagaagtgaataaatggttgcatttttatgaaatgaaagctcctttggtttgtctaccagtttttgtctccagagacccagggtttgatttgcgactggagcacactcatttttttagtcgtcatggagaaggtggacactaccattatgacactactccagatatagtggaatatcttggatacttcttacctgcagagtttctctatcgcattgatcaaccaaagagacgcattcaattgggcgagattaaatcagctga

SEQ ID NO: 68942 - DNA, 981 bp, Homo sapiens
  misc_feature (12)..(12): n is a, c, g, or t
tctagctcgcgnatcctgaggaggcggggttggcctaggcgaagatccggactctgggtgttttgctaccgtgaccgtttttatgcagaaggggttaaaagataactttgctgatgtccaggtctctgtagttgattgccctgatttgactaaggaaccctttacctttcctgtaaaaggcatctgtgggaaaactagaattgcagaagttggaggtgtgccttacttattgcctcttgtaaaccaaaaaaaagtttatgatctgaataaaattgcaaaagaaatcaagctgcctggagcctttattcttggagcaggagcaggtccatttcagactctcgggttcaattctgagtttatgccagttattcagacagaaagtgaacacaagcctcctgtaaatggaagttactttgcccatgtgaaccctgcagatggagggtgcctactggagaaatacagtgagaaatgtcatgattttcagtgtgcattactggctaatctttttgccagtgaaggccaacctggcaaggtaattgaggtgaaagccaaaagaagaactggaccacttaactttgtgacttgtatgagagagaccctggaaaaacattatggaaataagcctataggaatgggaggtactttcataattcagaagggaaaagtgaagtctcacattatgcctgcagaattttcttcctgccccttgaactctgatgaagaagtgaataaatggttgcatttttatgaaatgaaagctcctttggtttgtctaccagtttttgtctccagagacccagggtttgatttgcgactggagcacactcatttttttagtcgtcatggagaaggtggacactaccattatgacactactccagatatagtggaatatcttggatacttcttacctgcagagtttctctatcgcattgatcaaccaaagagacgcattcaattgggcgagattaaatcagctga

SEQ ID NO: 68943 - DNA, 804 bp, Homo sapiens
  misc_feature (12)..(12): n is a, c, g, or t
tctagctcgcgnatcctgaggaggcggggttggcctaggcgaagatccggactctgggtgttttgctaccgtgaccgtttagaacagaaactgttcatacttggtgcgctgtggactcttgtgataattaaccaagagtagctctatttgtccaacctcacacctaaagaagaaagaaaatggcttgtgctgagttttcttttcatgtaccaagtcttgaagagcttgctggagttatgcagaaggggttaaaagataactttgctgatgtccaggtctctgtagttgattgccctgatttgactaaggaaccctttacctttcctgtaaaaggcatctgtgggaaaactagaattgcagaagttggaggtgtgccttacttattgcctcttgtaaaccaaaaaaaagtttatgatctgaataaaattgcaaaagaaatcaagctgcctggagcctttattcttggagcaggagcaggtccatttcagactctcgggttcaattctgagtttatgccagttattcagacagaaagtgaacacaagcctcctgtaaatggaagttactttgcccatgtgaaccctgcagatggagggtgcctactggagaaatacagtgagaaatgtcatgattttcagtgtgcattactggctaatctttttgccagtgaaggccaacctggcaaggtaattgaggtgaaagccaaaagaagaactggaccacttaactttgtgacttgtatgagagagaccctggcaatatcggaatcccatatgaatgggggggtcttttcttatttgcggg

SEQ ID NO: 68944 - DNA, 1030 bp, Homo sapiens
gtcttgtctgtgttccctgttgtgattggcttggagtaggatacctgtctacctcatattacttatatttttccctgtcttcattttatctccctctggttgcatacttcatcactgaacacttaagaacagaaactgttcatacttggtgcgctgtggactcttgtgataattaaccaagagtagctctatttgtccaacctcacacctaaagaagaaagaaaatggcttgtgctgagttttcttttcatgtaccaagtcttgaagagcttgctggagttatgcagaaggggttaaaagataactttgctgatgtccaggtctctgtagttgattgccctgatttgactaaggaaccctttacctttcctgtaaaaggcatctgtgggaaaactagaattgcagaagttggaggtgtgccttacttattgcctcttgtaaaccaaaaaaaagtttatgatctgaataaaattgcaaaagaaatcaagctgcctggagcctttattcttggagcaggagcaggtccatttcagactctcgggttcaattctgagtttatgccagttattcagacagaaagtgaacacaagcctcctgtaaatggaagttactttgcccatgtgaaccctgcagatggagggtgcctactggagaaatacagtgagaaatgtcatgattttcagtgtgcattactggctaatctttttgccagtgaaggccaacctggcaagcctgcagaattttcttcctgccccttgaactctgatgaagaagtgaataaatggttgcatttttatgaaatgaaagctcctttggtttgtctaccagtttttgtctccagagacccagggtttgatttgcgactggagcacactcatttttttagtcgtcatggagaaggtggacactaccattatgacactactccagatatagtggaatatcttggatacttcttacctgcagagtttctctatcgcattgatcaaccaaagagacgcattcaattgggcgagattaaatcagctga

SEQ ID NO: 68945 - DNA, 1066 bp, Homo sapiens
gtttctattaaaaaattagttttaaattttaaattacaataaaataaagtgtaagtattaaaaggccacttgtctatttctcacttggaatattaaatgctggaagctgtgtttgcctgtttatgaagatagaaacctaaatgcccttttgttctgtttatatgtttgaatgctcaatgttcatttccagaacagaaactgttcatacttggtgcgctgtggactcttgtgataattaaccaagagtagctctatttgtccaacctcacacctaaagaagaaagaaaatggcttgtgctgagttttcttttcatgtaccaagtcttgaagagcttgctggagttatgcagaaggggttaaaagataactttgctgatgtccaggtctctgtagttgattgccctgatttgactaaggaaccctttacctttcctgtaaaaggcatctgtgggaaaactagaattgcagaagttggaggtgtgccttacttattgcctcttgtaaaccaaaaaaaagtttatgatctgaataaaattgcaaaagaaatcaagctgcctggagcctttattcttggagcaggagcaggtccatttcagactctcgggttcaattctgaggtaattgaggtgaaagccaaaagaagaactggaccacttaactttgtgacttgtatgagagagaccctggaaaaacattatggaaataagcctataggaatgggaggtactttcataattcagaagggaaaagtgaagtctcacattatgcctgcagaattttcttcctgccccttgaactctgatgaagaagtgaataaatggttgcatttttatgaaatgaaagctcctttggtttgtctaccagtttttgtctccagagacccagggtttgatttgcgactggagcacactcatttttttagtcgtcatggagaaggtggacactaccattatgacactactccagatatagtggaatatcttggatacttcttacctgcagagtttctctatcgcattgatcaaccaaagagacgcattcaattgggcgagattaaatcagctga

SEQ ID NO: 68946 - DNA, 376 bp, Homo sapiens
gtttataagtaaaactactttttgtttttctttttgatactcatatacttctggatttgggagacatttttggtggggttagttagacaaactatttattccataaaggattccttgaagaatttccctgaaggtggtcatttagtttccttttaagtgctacttgtaaaggctggccaacccctttcagggcagctgttttaccaatgtgaaaatgctactagaatttgtactagaaaattctgccattaagtgtgtcactaaatgaccttgtaaggtaacataaagtgccttctcctagatgaaagaaagctttctgagtagctgaagatacttcttactcttagcagtgttaacaaaatgcttctaggttttt

SEQ ID NO: 68947 - DNA, 454 bp, Homo sapiens
tggtcttgaactcctgacctcagattatccgcctgcctcagcctcctaaagtgctgggattacgggcatgagccaccgcgcctggcaggaccctgtctcttaaaaaaggaagaagcagcctgtgtcgcaggcacaagtatgcccgcagggcagtggtaacccccagtgggcctgcctgtggggggtctctggacaggataagccacatggctcatagtgattgttttcggggcactcaatagctgcaggggcaggagtggggatggagaaagacaggaagggaaaggtattcacaccaggactcccaggtctggtttccaagacccaagcatttggccacccctatagtgcaaatgtccctgctctcagcttccaggaatccctaccaacatcctgtggtcctcaccctctagaatggagctctccaggcaacagacccagcaatccctgcctc

SEQ ID NO: 68948 - DNA, 348 bp, Homo sapiens
cgaggaaaactctgtctcaaaaaataataataaaaataaataaaaattttaaaaagtaatgggtctggctgggcatgctggctcacgcctgtaatcccagcactttgggaggccaaggtgggcggatcacctgagatcgggagttcgagaccagcctggccaacatggtgaaaccccttctctacaaaaaatacaaagttagccaggtgtggtggcacgcgcctgtaatctcagttacttgggaggctgagggaggagaagtgcttgaacccagaggcggaggttacagtaagcggagatcgtgccactgcactccagcctgggcaacagagccagactgtgtctcaa

SEQ ID NO: 68949 - DNA, 213 bp, Homo sapiens
cccccccccccccccccccagcaaggaaaagagccttggaaagttgtgaggaaaggaagaagacaatatccaggtgagggctagttgggcaggaagaagccatcaacacagggaaccccagatcactggggaagagacacatccttatgttgtttagaaagccctcttgaaaggtctgtggcccaaggaggaaaggtctgtggcccaaggagg

SEQ ID NO: 68950 - DNA, 494 bp, Homo sapiens
cgggttcgcgccccgagtgagcagtcctggcccggagcgtcggtcctggtaatctgtaggaaaagcgctgcggcccagggggtaaagagagatcagcctctgtggactcggtgcttctcctggcaagtaaaccccaaggaggactgaccagttcttgaatttctataccatggcccttcgatcagtgatgttcagtgatgtatccatagacttctctccagaagagtgggaatacctggacttggaacaaaaggacttgtacagagatgtcatgttggagaactacagcaacttggtctcactggcaggatgcttcatttctaaaccagatgtgatttcctcattggagcaaggaaaagagccttggaaagttgtgaggaaaggaagaagacaatatccagatttggagaccaagtatgagaccaagaagttatctttagaaaatgacatttatgaaataaatttatcccagtggaagataatggaaagaattg

SEQ ID NO: 68951 - DNA, 438 bp, Homo sapiens
ctggtcttcagagcttgagggccaagggagcaggaagccttcacaggaaaagaaaggtctgagtgaaagtgactgaagagaggtgggaaagggaagggagaggcctctggtcttgttgtgcaaggagagggagtgtccaggtatgtagatggggtgtgagcctcttttagagaagtaagggttgggctcacttgcaagcactcaggaaggaccggaaggaagaaagtgaagatgccgtccccattgtgtccctcagcgcccagagggtgtgtcgacctgctcctcaggccaggccagcccaacacctgtgactaacatgacctcagagtctaaaataatgtgtgccacagctctgaagtcagaaggctgatttttataaatcagcacaaattgaccttattacccatggtccttcagtgacctcagaaatcaaagtga

SEQ ID NO: 68952 - DNA, 651 bp, Homo sapiens
agaatgaagtccctcaagaaactgacagtgtattaatgcgttcccaatacagatactccttgaggtacaatggggctttgtcctgataaacccattgtaagttgaaaatatcataagttgaaatgcattcaagacacccagcttactgaggcctcacagcttagcctagcctacctaaaacgtgctcaaaatatgtgcattagcctacagctaggcaaaatcatcaaacactaggccaattttataataaagtgttgaatgtccatgtaatttattgaatattgtactgaaagcataaaaacagaatggtttatggatactcgaagtacggtttctactgaatgggaatcacctttgaccatcttgaagttgcaaaatcctaaactgaaccattgtaagtcaggcaccatctgtaaatgtctcatatttcctactgggaataaagtttaaaatgaaataactgattttctgaaactggcactcaatttaagtcaaaaatagtttaacagtaaggcttgcattgctaggacttacagctttagtgggcagaagtatcatcaggggagcgtgttaaaatgcatattctcctgagacgagattgcgccattgcactccagcctgggtaacaagagggaaactttgtttcaaaaa

SEQ ID NO: 68953 - DNA, 376 bp, Homo sapiens
tattgtatgattccatttatttttttccctttttaaatttttcttggtttttatgctaatcttctctgtactcttccaattttagtatatgtgttgcaagcatgtattattccagttatatgggatgttcagaaaaggcatttggagacaacatggattagtggttgccttgggctgggggtgggaagaaggattaactgtaaatgggcatgagggatcttaatgtgcgacagaaattttcaaaaaacggattgttgtgatgactgcaaaacttggcaaatttactaaaaataactgcattgtacatcttaaattagtgaattttatgacatgcaaactatgtctcgatcaagttgtctttaaaaactaaaggcaa

SEQ ID NO: 68954 - DNA, 398 bp, Homo sapiens
actattcctggcacatgataagacctcatttttgttgtgattgtacttatattatcacagccctctagtagaactcccagcctccagcatcttccatttttaatagttacatacaaaacaggattttttttccttttaaaaactaaattgataaaaattgtatatatttatcatatacaacatgatgggtttttttgtttggttttggtttggggggggcagttattttttgaaacaggatctcgctctgttgccaggctggagtgcagtggcatgatctcagctcactgcatcctcgacctcccaggctcaaataatattcctgcctcagcctcctgagcagctaggactataggcacgcaccaccatacctggctactataagatttttttgcaga

SEQ ID NO: 68955 - DNA, 358 bp, Homo sapiens
acatgttccttgcagctttgccacttcattcttgggcccacgctgaagaaccagtctttttctgaaacattgctaagaatgtggcagaaggaagagatatggcagaacttcatcatggccctgacaaactctgctctgaaaaccttcatgatggtgctgaaaactgactccccctgagagttccttggctaaatgagtcacttggccaagcctgacatcctcagagtgggaaaacaatcttcccaaaataagggcaccataaattacatagccaaacctcatgtcagtagaatggcaggtaaaatcctcccacaagaaggagcagcatatatttggaaataaaaaatgcagtccacta

SEQ ID NO: 68956 - DNA, 998 bp, Homo sapiens
tttgataaataaaggaatcattgcacaatttgcatgtgtgaattgcagaagtacgcgcatgtaggtacatacctctgccgaggagcagtgttttaatttctaagccactctgtctactgtagtggagaaggaccagactaacttgcatttctccagctgtataacagataacctgtggaaacacagttaattgacatcattgctcttctgtgtgatcccagtgaggatttagctctctatatgggctggcaattgttcagccatttcatcttttaatctggctttggttgttctgagaggaaaaaaaaaacaaaaaacttttttctctttactctcacacactcagtacagcccttcacctcttgtcaccaaaatgtatgggaatttcttcccaccgacaaccaattctccagtggccaccaactctacgtcctataatttaacccagttctgacactgtgtacctggagttagtgtcagatcccatacgttcagggctcagtcccaaaagactgccccccacttcaaatgccaatcacaagtcccaggttgtgactatatgttgtttatgattaaccaaccagttacaaatctggattcccacaagcccctcctccggtttgattaatttgctagagtgactcacggaattcaaggaaacactttacttatgtttgcccatttattataaaggatattacaaaggacagatgaatagccagatagaagagaggcccagagaaaggtatgtgggcaagggtgtggaacttccatgccttctcagcccctccacatgttcagctatcccaaagatccctgaatcttgtcctttgggattttaatggaggattcattcataggcacaattgatgacatcattggccattggtgatcactcaacttgagcccttctctcttccccagaggtcagaggatggagctgaaagttccagctgcataatcacatggttggtttccctggtaaccagcccccatcc

SEQ ID NO: 68957 - DNA, 289 bp, Homo sapiens
tttgtttactctcctgtttcggtgaactttatcttccattgtcattttgagaaataatacaaagatgggaagaaagttgagatcttatcagaagatatactttgacttcttatcttttgatatggtttgaatataggcttctaggtgaaatatcactttacctccaaatgttgaatacattgctccattatcttctaggtttagatccatactgttgagtagaaatataatgtaaggcacagatgggagctcatctataattttaaatttcctagcatccacgttaaga

SEQ ID NO: 68958 - DNA, 479 bp, Homo sapiens
actcagtggagatttatttgcaatagtaggatcaggtgatttgaaatctttagtgtgtgtggttgtagcaggaggagtactgggttccagcatttaataagaggacccatggttttatgaaaatgtccagagatataattttggttaaggttatacctcatctttggttgtacagttgtttcttttagtttcagtacaatctaaaacaggaaatgtcaattcacatggtctggtagagaaagaatgactctaatgctctactattcaggtagaaatgaagaaagaagggtgatcacttccatgagcactgtaagcccttgaatgggcttataggcaaatacttatagttaaaatatgtaactcccattttagtattggatagaatactgtcacattttttcttattaaatctacatttttaccatctttcttgattgattttgccaataaaagttccttacctttttataaaagtcaaa

SEQ ID NO: 68959 - DNA, 496 bp, Homo sapiens
  misc_feature (7)..(7): n is a, c, g, or t
cgccccntgggatcaagcgattctcctacctcagcctcccaaatagctgggactacaaggtgccctccagcatgcctggctgatttttgtatttttagttgaggtgaggtttcaccatgttggccaggcgggtttcgaaatcctgacctcaaatgatccacccacctcagcctcccaaagtgctgggattacaggcatgagccaccacaaccgtcccactattttactttttaaaatgacattcctactgattgatttttatcttgctataagttcgatgacaccgtgaatctaataaggttcactgttgacacagtacaagttacatagctaaaatacatagcattgaagactaattttaaggattgacaagagtttattttctattgtgcaatatcttaaaggaagcacccacctttgggaaagtgtatctgctgctcctagggccatgcttgtatacatatttaaataaacatattcatttacccgaataata

SEQ ID NO: 68960 - DNA, 414 bp, Homo sapiens
gccattaaaaaagaagaatagatttgcattcagcaaaaagctaataaacgtagttgataccctttaagttatgacttgcttctgaaggttaagataacacatgagattacaggcatgagccaccacaaccgtcccactattttactttttaaaatgacattcctactgattgatttttatcttgctataagttcgatgacaccgtgaatctaataaggttcactgttgacacagtacaagttacatagctaaaatacatagcattgaagactaattttaaggattgacaagagtttattttctattgtgcaatatcttaaaggaagcacccacctttgggaaagtgtatctgctgctcctagggccatgcttgtatacatatttaaataaacatattcatttacccgaataata

SEQ ID NO: 68961 - DNA, 469 bp, Homo sapiens
ctcaaattgccatcaacagtaagttgaaggcaatttcaacttactgtttctaatttgaagagggaacattaagaatgcctctgtaatactgtaattatgggaagaaagcaccagaggcaacattttatcctgagcaccagatttagatcctgttaaagggctcaaacttaaaagggctggccgggtgcggtggctcacgcctgtaatcccagcactttgggaggtcaaggtgggaggattgcttgagccagaagttcgagaccagcctgagcaacatggtgaaaccctgtctctaccaaaaatacaaaaattagccgggcgtggtggtgcacacctatggtcctagttactcggaagactgaggcaggaggatcgtttgagctcaggaggttgggtctgcagtgagctatctatgatggcaccactgcacttcagcctgggtgacagagtgagaccctttctcaaaaat

SEQ ID NO: 68962 - DNA, 567 bp, Homo sapiens
gaaccaccagcactgccaggcccttgctagggagctggaccaggcattaggaccagggtttcctctgccctgcagggtttttggatcccacactgggggagacagagcatgatctttggggatttgagtcccagctctgccactcactagctgggtggccttggggagtagtcacttgcctttatctcacaggacagagtgagtcaagcatacaggatggtgtctggcacacgcagtaggtcaatccacatgtgtcaccttcaaaatctgggcattaggccgggcgtggtggctcacacctgtaattccagctctttgggaggccgaggtgggcgaatcatgaggtcaggagttcaagaccgcctggcgaatgtggcaaaaccccatctctactaaaaatacaaaaaattagctgggcgtagtggcaggtgcctgtaatcccagctactcgggaggctgaggcaggagaatcgcttgaacccaggaggcggagcttgcagcgagctgagagtgcaccactgccctccagcctgggcgagagcgagaatccgtctcaaaaaaaaaaaa

SEQ ID NO: 68963 - DNA, 595 bp, Homo sapiens
agccgagatcgcaccactgcactccagcctgggcaacagagtgagactctgtctcaaataaataaataaataataatttcttgaaggtgtaccagactttctcttcactttattgcctcctaaaagaatattaatttaaaattccttatgttaaaagtaatgtattctgcaccgtcttgtcccatttttctatttattttaaaatgtgtagctttttagcaaaagtaatacatcaacatggttaaaaaatatgaatattccagaaaaatatttattatatctaatagtgggtgtgtttccccactctgggttcatttctcaaccgtctatacaaacttgatcatattttatctacttttgtaccttgatcttttctcttaattagatctttactttccccaaagagtatgagtgaaatgtattgacagacccctccatatttgattggcatatgaggcatgctgccttagtgaaaaaatagctgagtctgggtgcagtggctcatgcctggtaatcctagcactttgggaggccaaggcaggcggatcatttgagcctaggacttgaagaccagcctgagccacaaagcgagatt

SEQ ID NO: 68964 - DNA, 592 bp, Homo sapiens
agtagagatggggtttcaccatcttggccaggctggtcttgaactcctgacctcatgatccacccacctcagcctcccaaagtgctgagattacaggcgtgagccaccgcgccaggcctggtctcttttgaataaacaaattgaccctcccagtctaaaaacttgagaaatttacatttgtcttatctgagttcctttctcagggaactagccatcagtcctcccagatagcaccaaggaactgaaacttatcggatcaccacatctggaaaatcagacaccagacccctcacctgcaacaattgcctgatgcctgttgacccactcctcttcatctctccctaactcctgctattttcccacatgcagttacatttcttccctgctatatcctaattttaatcagttgagaagatggatttgagactgatctctcccccctaggctgtagcacccaaataatgccttcttccctgacaataatggggtctcagtgactggctttctgtgctgtgaaccaccagacctagaccaaactcctggcatttctctaacaatttcccaccactgaactaagttataaattctgagg

SEQ ID NO: 68965 - DNA, 313 bp, Homo sapiens
gacaagtgctatattttattttaaagaaaatcaaagggatttaggatattggcagaaatgcaagtatttcttcagtgtctaagatgtgttgccacttgatggatttaagttaacacttagggcttcttaggaacattatcagccactaaagccctttggttagggctcagtcatctcttcagttagtcttagagatgtggttcattgaataagactttagcatattttccaaccaagttatttttggttgtcttgtttttgcaagagtgaaacttgattaaaacattacaacaagaatattaagtagttttaa

SEQ ID NO: 68966 - DNA, 881 bp, Homo sapiens
gagaaagaagcctttccgccttcctactctgtaaccctgcttttcgtttcctgtgtgtcctttcagagctccttttgctttcaaaagcaaatacaaatacgggcagcttctgaatggatggccaagtgactctggagcttccgcgctgtgtgagggctgggctttctgtccctgttcaccctcgaacccaggcttcagccaccgcacgggagaagatggttcagaccacacctctaccctgactcagcacacacagctgtaccgtcaggggctgcaaaccaacatctctcagggccttcctggaagctgcggctggactccccttgtactccaggggagcatccctggaggcccaggtcggggctcctggagggtccctgggttctgggggacagaagaacagggaggaagaatccagatgtggctcactgggctctgtggatctggcactggaacagctgtccaggctttggggcccccgacacccctgctgctctccctccggccccagatctgcttgggcccccagtgggcaaccgctcagtgctggcccaccacagggaaatattccggtggaggtaagctctgtcctgttctcagagagccctgaccaggcctggtagataaattccaggccaagccataggatttggacactggggctacaggaattcaagaaagaagaataaagaagcagccttgagtattagtcagtgaatgtggcctgacattggcagatggctttagcacagccttcctggaggaaaaggaggagggagactgcactgaacgggtttctgaaacttgtgccctgacgccaagcataccaccacatcacttataggatgtgcaagtataaacaagggattttgccgctctgc

SEQ ID NO: 68967 - DNA, 898 bp, Homo sapiens
gagaaagaagcctttccgccttcctactctgtaaccctgcttttcgtttcctgtgtgtcctttcagagctccttttgctttcaaaagcaaatacaaatacgggcagcttctgaatggatggccaagtgactctggagcttccgcgctgtgtgagggctgggctttctgtccctgttcaccctcgaacccaggcttcagccaccgcacgggagaagatggttcagaccacacctctaccctgactcagcacacacagctgtaccgtcaggggctgcaaaccaacatctctcagggccttcctggaagctgcggctggactccccttgtactccaggggagcatccctggaggcccaggtcggggctcctggagggtccctgggttctgggggacagaagaacagggaggaagaatccagatgtggctcactgggctctgtggatctggcactggaacagctgtccaggctttggggcccccgacacccctgctgctctccctccggccccagatctgcttgggcccccagtgggcaaccgctcagtgctggcccaccacagggaaatattccggtggaggtaagctctgtcctgttctcagagagccctgaccaggcctggtagataaattccaggccaagccataggatttggacactggggctacaggaattcaagaaagaagaataaagaagcagccttgagtattagtcagtgaatgtggcctgacattggcagatggctttagcacagccttcctggaggaaaaggaggagggagactgcactgaacgggtttctgaagatggtggcgggaagcgaggcagaccgacacgatgaagtataggatggcgaagaatagaagtgggatggggtgagatatttccctcctttcccccc

SEQ ID NO: 68968 - DNA, 334 bp, Homo sapiens
actgcatcccctcaaaattatatgttgaaatcctaagctacggtacctcagaatgtgaacttatttggagataacatctttacagaggtagtcaaggtaaaatgaggtcattagggtggaccctaatccattgtgactagtatccttgtaaatacaggaaatttggacacagaaacatagtcagagaaagaagacgatgtgagaagacagagcagaaagatggtcatctagaagccaatgagagaggcctggagctagatccttctagttctgagacttctagcctcagaactatgatacaataaatgtctgtggttacagccacctagactaa

SEQ ID NO: 68969 - DNA, 1755 bp, Homo sapiens
ctattgcagtatctttcagcttccagtcttatctgaagaccccggcaccaaagtgaccaggaggcagagaagaacttcagaggagtctcgtcttgggctgcccgtgggtgagtgggagggtccgggactgcagaccggtggcgatggccactctcccagcagcagaaacctggatagacgggggtggaggcgtgggtgcagacgccgtgaacctgaccgcctcgctagctgccggggcggccacgggggcagttgagactgggtggctgcaactgctggaccaagctggcaacctctcctcctccccttccgcgctgggactgcctgtggcttcccccgcgccctcccagccctgggccaacctcaccaaccagttcgtgcagccgtcctggcgcatcgcgctctggtccctggcgtatggtgtggtggtggcagtggcagttttgggaaatctcatcgtcatctggatcatcctggcccacaagcgcatgaggactgtcaccaactacttccttgtgaacctggctttctccgacgcctccatggccgccttcaacacgttggtcaatttcatctacgcgcttcatagcgagtggtactttggcgccaactactgccgcttccagaacttctttcctatcacagctgtgttcgccagcatctactccatgacggccattgcggtggacaggtatatggctattattgatcccttgaaacccagactgtctgctacagcaaccaagattgtcattggaagtatttggattctagcatttctacttgccttccctcagtgtctttattccaaaaccaaagtcatgccaggccgtactctctgctttgtgcaatggccagaaggtcccaaacaacatttcacttaccatattatcgtcattatactggtgtactgtttcccattgctcatcatgggtattacatacaccattgttggaattactctctggggaggagaaatcccaggagatacctgtgacaagtatcatgagcagctaaaggccaaaagaaaggttgtcaaaatgatgattattgttgtcatgacatttgctatctgctggctgccctatcatatttacttcattctcactgcaatctatcaacaactaaatagatggaaatacatccagcaggtctacctggctagcttttggctggcaatgagctcaaccatgtacaatcccatcatctactgctgtctgaataaaagatttcgagctggcttcaagagagcatttcgctggtgtcctttcatcaaagtttccagctatgatgagctagagctcaagaccaccaggtttcatccaaaccggcaaagcagtatgtacaccgtgaccagaatggagtccatgacagtcgtgtttgaccccaacgatgcagacaccaccaggtccagtcggaagaaaagagcaacgccaagagacccaagtttcaatggctgctctcgcaggaattccaaatctgcctccgccacttcaagtttcataagctcaccctatacctctgtggatgaatattcttaattccatttcctgaggtaaaagattagtgtgagaccatcatggtgccagtctaggaccccattctcctatttatcagtcctgtcctatataccctctagaaacagaaagcaatttttaggcagctatggtcaaattgagaaaggtagtgtataaatgtgacaaagacactaataacatgttagcctccacccaaaataaaatgggctttaaattt

SEQ ID NO: 68970 - DNA, 2241 bp, Homo sapiens
tcaacattcaaaactgaccaaggaaccccactagctagacatgtgtagtgattaccagcaaacctcaggccaggctcactcaggactggctacccccaggaaggaggggtggcatgccagtaaggaacctggcctcagcagcaagttgtttttttctgcaagtatcgtgtatttcttctccaaccaattttgttccccttggttcctgggaaccattatatcgttaggttaatggaccattggtttatccacctgtatgttgcctgaattttggccattcaaccatgcattcctggtgattgggtttacaagtactagtttcctaagtccaacatcatgttcagatatctcgtgacgataaattggtgtagtaaccatggtatgtcagcaaagagatggccccactcattaaaaatatgttggtattggaggcttcaaaaacttgtatatttgttactgatatatagaacaaataaatggccaaatacaaaattgtgcagaacccagattatctagtatctaataaagaattaataaagaatatgtattaatgtagatgtctttatttacatattaatggcttttttcaaattggccaaatttttcaaaacaattacatattaaaaattgagatacatggaaattctaacaatagatttatagtcattcttggggtgggcattaacactttttggtaacttctgtaagttaattatagtttaacttcctaattaattaattctgtatgttaatttatagtttaacttcctagacgctttggtgtctttttttaccctcactttaaaatacacacaatagtttaaatatatcacatttggtcaaaagttcaaattattttattatttaaagcatgtagaaaaaatataatagttaaaattcctgtgaaaaattctaatacagaggaatcacatggctatgtttggaaagataatatttctttaaaaatgtgttgttttttatgttttatgtttgcgataagcattactgaagtttgattgaagaacttcatgatttttatgttttactttcttgtattgagaaatagtggtccattgttgggctgtatttaaaattaatgtgtataaaacaagaaatatttaattagagttattaattttccacatttaatatgtgtatttgacctaaatcagtatcttctatcatatcagcctcacatataacaagaataatcgcaaggacaacaacaaatttgaatgtttcctttgtgcctatgctcctatcatgttatattcattcttataaatctaacaactaacaattaatttgaagttagacacacaggatttactcatcagtattagagcattcactgctagccaagaaggttactatccctggtgctgaaactgctctgtgtagtccttgtggttgaagaattaaaacagtttctcttagacatttcctttcattgaaattatgaattggataaatgttcataccttaaaggaagtattaaatttcacatatgttaacatcttaattaatgtaagattaatattctacttatgactatgttttagtattgaaaaatgagtttctgatgagtttcattagtttctagagaaaacaatggtttaaaaaatttcagtacataagacattgaggagtctatgaatgttccagaaatctgaaaacatataccactaatcaaagtttctccattcatgttgactagcatttgccttaggtgtcagaattaatggatttgtgttaaaaataaacacctgaaatctaattccctagctgcattataacacactagattacaagtactaagcttttatttaatgcttataacggctttaaattgtagcaaaatgggcttcccccaagaggactgctttgttgatcctaagatggggtcataagccagaagttaactatgctttcatatattcttgtaagtagaagtacagtgttggtgtaaattctccttagatggataggtaagcccagaggaaataatggtcattggcaccatatgaccgtatgcaattcatatgcatatttatatcaagaaaagaacattataggtctggtgagaccctatttttttctgacagtgtcatctgtatttacgtgtctatttcgggaatttggaagtcaagggattctatgctggattgtgaagcatctgtttctgcttgatgtagctactcaattttgtattcttgactaataaagtcataaacataatgc

SEQ ID NO: 68971 - DNA, 737 bp, Homo sapiens
tggagatgaggcccagcagggggtgattttacactaaagcagtgattctcaatcttgttttaatgccagagaagccactctgtgcttttgtgaacatcttttcagctcaagtgactatattcaaacagattgcttgaggtcagtttgagaccgtcctggccaacatgatgaaagctagtctctactaaaaatacaaaaattagctgggcctggtggcatacccttgtagtctcagctactcgggaggctgaagcaggaaaattgcttgaacctgggaggcagatgttgcagtgagcagagatgccaccactgcagtccagcctgggcaacagacaagagactctgtaaactttactcatatatatatatatatatatatatatatatatatatatatatatatatatatatatatatatatgaaactatgtatcattgttaactatagtcatcctacagtgctatagaacactagaacatgtgcctcctatctagctgtaattttatatcctttaacaaatctctgcctgtccccctcttccccctaccctttccatcctctggtgtcctctgaggaaccctgtcttatacagcttcgtacccctcgaagcataatagtcacccgtggtactcaataagttacctgcctggatggtaaatagctacataaataaaacattgttttccaccatgaagtaataagaagccctttggcaagaagctactattagtacatc

SEQ ID NO: 68972 - DNA, 312 bp, Homo sapiens
aaaagatttgaacagataattcatccaaaaaaaatatgggtgggaaaaaaagcacatgaaaagatgctcaatatcattagacattaagaaatataaattaaaaccacaatgcaatatcacctcgtatctattagaatgtctaatattagcaagactggccatatagagtgttggtgaggatgtgaacaactgaaactcatacacagtgcaggtggaaatgtaaatgatacaatttttttggaaaagagttggctgtttcttcaaaagttaaacattacatctgccatatgatccagacattccactcctaag

SEQ ID NO: 68973 - DNA, 343 bp, Homo sapiens
tttattctctttcaatcccaggaaaatggttgcattcaaacttgatcaagtcatctttcttttttccatttcttttttctacacttgagagtcttgattcttctcatccttctccttgctctcattttccatgattaatcaactaccataataggtcattttaccttttaatccccaactctctgtcatcagctggtacacctgctcatttccatttgtttgggttagcatattacccaataactctttccctatttcttgatgtctctgtgttcaccatgcccactgcaaaaattctgcctgttatctcttctggctttgttctcctccactatcctttttt

SEQ ID NO: 68974 - DNA, 285 bp, Homo sapiens
ccaaaagtcatacaaaaatatttgtagcattcagctattatatttaagtctctcttgatgaccatcatttgcttttgataatttattaaatattctttagcattttgataacacattcaaaacccaccatacaataagtcctcacttaatgtcatcgataggttaacggaaactgtgacttttcagtgaaacaacacactatgtgccatagaaacttaattcttgtttatatcaactaacaaggtaaattgatttctttatagtgtatataatttcacttgaagt

SEQ ID NO: 68975 - DNA, 440 bp, Homo sapiens
agaaaaacccaactaactaacaaatcaccttaattactacctgcagagaaaaagggttggctttatgtttcttttttaattgtgtgtgtttttagctcaatccacaaatgagaaataagtgttggtggaaaaacagagaccagttttgcttatatatggtgtggtgggtggagagaaagggtacatcagattgctacctaacagagcgaggaaatcagttcttattttccattagaaaacaaaacaaatggcaattaatccattcatgtctgaggttgcaggtttttgaatttttgcaatcagaccttggcgatgaccttgagcagtaggatataaataactcccacatgcttagagttccaatgatggaacactaggcataaatgggctaaagacaaaaaaaaaaaaggtggtgattttttggacttcccagggagcac

SEQ ID NO: 68976 - DNA, 2197 bp, Homo sapiens
  misc_feature (771)..(771): n is a, c, g, or t
  misc_feature (925)..(925): n is a, c, g, or t
  misc_feature (927)..(927): n is a, c, g, or t
  misc_feature (1502)..(1502): n is a, c, g, or t
  misc_feature (1993)..(1993): n is a, c, g, or t
  misc_feature (2078)..(2078): n is a, c, g, or t
gcgacatatgccaatgtggccatctcgggtgatttaaaagatttgttaccctctgcgtgcacttatagcccaggtatgtcctgtctcccctggatggctgattggtgatttttaaaagggtttccattgtgctgtgggaacctgaaggcatcagaacgggcttttgcttgtttgctgtgtcatattctgttcatttaaagagtaaaagtgtgtggttggtattgtggcccatgttgagccaaagcaaagagtaagccactgtctgaagcccacctacgttgaatgtaatgaggctgagatgaaaaggatctgctacactgaacacagaacgtggaggtctgggctaaccacacaaaatatgctgtgtgcagtgaacattcacgctgtactcttagccacatcccgcacaaaagacagagagacagctcccaggagatggagcatgtgtggcaaagattttccgcctggttactttgaagaaagcaaaaggaggctgaaactgtgctttgtaagctgcatgggttggtgctggctcctggacgtcagttcagaacactcaggagtgaaggcagaaacctggtgagggactcccaggaggagcttctttctccacctttcagcctctggagttcaaatttcactcaacctgagtgcaccaaaccccaccctcttatttacattgccctggcctttttggcggaatcaaagtccctacatagccaaggagatcttttaccttctacactagtgggaggccaggtgcctgggagngaggtggcacgcccccgccctcctctggcatgccactgtcctgctgtgaaagcctgtgtcaaggaaaactgggctcagaggtgcagactgagagagccgctgggctgttttgaaggaaggtaagcagagagcatttgtgtgtgtgtgtgtgtgngngcgcgtgcatatgtgtatgtgtgtctgtgcctgtgtggtgagtgtgtgtgtgcatgtgtgtggcttctgtaatgctacaaagacctgaaactgagctgtgtgcctgctgagatttaccaacttgccaagacttccagaggaaaagagctggtactagccaggaggagagggcgttatggagtggaataatcagcagaacggatgctttaaccgggcaagaaggaatgtcgctcaggacttgtccaggaatgcctttattggtttgcaagctggaggagtcttaacttactgacttctttttggggaagagtcagtgatggtctgacatgctgtttgcaagctctctggccgcctctgtggccagccggcgtgggtggcctcagataaggccaacaggacctcctcttttcctctgggcttgggcccctgtgttttcagttaggagtgcccaaaagggaactgagctgcccagtcagaggcctgagataggcgcctgctgaatgctgagcctgcaccggcgtgctggtgtgagaggtctgcccggggagccgccctggcctgccctgctgtcagtncggctgtgggggcaccttggcggcgtctgtgacacgcctgccacagccccactcggagcacagtgctcctttatcgccacattccagagcctcacccaggagaccgcgggagcgcttggaatctggcccagctcctgagtcgctcctgctctgcagtgggatgccttcccttcccagagaggcagtgtgtggctgggcaggcgtttctgtgtggaaggttctgctctggttcttgcttttgttaattttttttctgctctatatttctctaagaatttacagtctgcctcatttttagaaagcgtgagcaagcagctcagctttacttcagagggagggattttccagcgccctccggcagtctcagcaaggtgtcctggtgctgccgctgcagcctctttcctgctgggcacctcccctcctggcagctcagagggtgatttgggtttgggggcttgggaaggagttaactctcaaggtgagactgatgnaccaagggagcaatgccttagaatggagttattctgcctaaggagagaaagagttgtccctacagagtagagtttattaccgtcntttattttttgtaaaaacaaaaataaaaaaagaggaaaagggcacatttcatcgcgtcttgaaatatatcaaaatcatagagtatctgatttagtagattaaaagcagtgttctcaaag

SEQ ID NO: 68977 - DNA, 425 bp, Homo sapiens
gatctcccaacttgaggatcctcagtagcctcctgagtaactcacgccggctaagttttttatattttgtcgagatagagtcttactttgttccctaggatggattcctttttctgcttcatctggtaccttaggccactaataatttcttctctctttctgtatttttagcttctccctcgctaccactaactcctttcttctctcatgttaaatttctttcatttaacacaaaatagtccccctagcttcttccctctaattactacctgttactaattactaatctaattattatctttccttccagaagccaggctcttggaagaatagtctattctgcaacctttctcagctctcattctcaccagcttttgcccccaccacatccttgaaactcatctttcaaaagacactaactgcta

SEQ ID NO: 68978 - DNA, 1157 bp, Homo sapiens
aacttttggtccagaggagggaggaggaagggaagaccccagtggtgggaccctggaccaggccatggatgaaggacaaagaccagggcaggtcacgggtttcccaattccccagcaattaagatttcgagcagaatttatctaaatgtgtttcaaggaaacacaatcgctgaaccaaaacgtactgcagccgagccccctccgtccatcctctgcccctccccctggcttctttctcttgggaaaacgggcaaaataattgtgctggattctcacacacacagaaatatcgaccatcaccctcccccgcgtgaactgggatgcaagttgctaaccgatgtgaacgcaaaatgccttgttcattattcctgacgagatcttgaggttgtttgatgctttaaattttttaattatattattttctaggtgtttattggtacattgcagttttttttttgaaatttaaaaatttctgtaaaactttgtcttcaagtaatctgacagcattaaatattgcatttaaaaattatactgtagcaaatacatttaaaaattaatcacaacgttaagatgaaattatatttttggaaaaaaaaaacacttgaagcccagatggaaatacgtttatttcagcagccttaggtttcccctcgctttctcaacacccttccttgtcctggagtatggactgtccgtccaaaagtgagcctatgctataagtttaatgagaaccgaattcagcctgcattcgagaatagctttaagtataatgctgatctgacaattgacgtgtaatttgggaagtcattttgataattttgcttaaaccactcattcgttaaagtgattacaaaaaagttcaagaatgatgtccactgctttctaacaagataataaaccccccccctcttttctttttctttatttttatttcttttagctatttgatcctttctgaagcagttgtttctggaagagtctgtgcgcccatggatggctgagcaccactacgacttagtccgggataagggcctccccagtcctctccgggagatgatttgggaaattttataatgcttgttctgttaactcaccgggaccttgagggtccaatgggaccttgagggttttctctgaaatatacaaacttaaaggac

SEQ ID NO: 68979 - DNA, 618 bp, Homo sapiens
cttggggtgtcatgttcctctggtttccagtctattgaccctgtcactcataacaacctcctctgcacctggggttcctctgcctcacagcctgggtacaggtcctgaagcccagaaaaaggcagtagccacattccctgcctggggacactgccaaagacggaaatgaggcttgcctgccatgaccggctcagccagacaaacctcatttcctttctggcatggtaagaagttccagttctaagaagaaaccagcccttaggaatgtctgaaatcccaccttcctgggaagaaacaagagggaaggagcctggatatgtggcagaaacttggtaaccttcagaatgtggtcaatgtgatcatcctcattccctcccctctccccccacccccacacagctggcctcagtcgagagcagcaaacatgtctcgcccagggaggcgccactcattcacccccaggggcagccgcctccttgggccccttggccctgcctccaaagaacagctgtaggccagtgatttggcacctgggccacgttctcccatggaaaagaggtggtatgtgggggatctggtgattactctcatgattaaggggctctgcttggctcagac

SEQ ID NO: 68980 - DNA, 228 bp, Homo sapiens
ttagcatgcaggcaaactgaagctcattaaagcccaagtcatttgcccaaggtcccagtgacctgccgagtgggaagagccgtggctggccggcctcccagtggcgacgacgacctcgctgtgttcgtggcagcggcactctcaaatctgggcacggtgatgggaaggttatttgttggaatccctttgcctttccaagggaaaataaacacaaaaagtgagaagtct

SEQ ID NO: 68981 - DNA, 285 bp, Homo sapiens
ccaaaggtcacgatgatgcaagagatgggttcccatgatcttgggcagctccactcctgtggctttgcagggtacaggcttcctcctggctgctttcacgggctggtggtcccagtgacctgccgagtgggaagagccgtggctggccggcctcccagtggcgacgacgacctcgctgtgttcgtggcagcggcactctcaaatctgggcacggtgatgggaaggttatttgttggaatccctttgcctttccaagggaaaataaacacaaaaagtgagaagtct

SEQ ID NO: 68982 - DNA, 242 bp, Homo sapiens
gacatgaatggtatcctcctggggtatgagatccgctactggaaagctggggacaaagaagcagctgcggaccgagtgaggacagcagggctggacaccagtgcccgagtcagcggcctgcatcccaacaccaagtaccatgtgaccgtgagggcctacaaccgggctggcactgggcctgccagcccttctgccaacgccacgaccatgaagccccctccgcggcgacctcctggcaacat

SEQ ID NO: 68983 - DNA, 380 bp, Homo sapiens
cttgagaaggtgacatctgggctatgccgggctgcccttctgttttggtagagtcactgccttcactgccccacccttgaaactggcttgcttttgtcacaaccaccggagaggcgttggtgtgagagtgagacccgtcactgtggacgtgttcacacgcatggcgctctggctgtcctctccttccctggagcccgtgcctttgttaagatctctaggacctgctggcatggcagcttgcccgtaaagcctctcagcagggagggctactgttcttgagggtgagagacagaagtggccgccctgtggtctgagcctgcccggcacagccactgactgcacttgtggtgactgtcagttagggctccgatggcttattc

SEQ ID NO: 68984 - DNA, 548 bp, Homo sapiens
cagcgaaggaggaagcaaggtcccctgcagacaaattccctgaaaaggccaaaagccctgtcaaggaggaggtcaagtccccagagaaggcgaaatctcccctgaaggaggatgccaaggcccctgagaaggagatcccaaaaaaggaagaggtgaagtccccctttccaggttctttacggctgtacttcaactctgggccccctgctgctctctaccccaagcttaggcgactccactctgagatccctcccccgtcaagaaaaaaacaagtttcctctacaggaaaaaagtggtgcaggattctggtctgcaagcgctggagactcttagcccttctaagtagcaaggcttccccgccaatgctgccatgctctctcctgcaccccgcaagaaactctattcctctcacccctaccaggctccttcccactacctgctcggtgcttaacgttcctaccttaaatcttccacgtgggggtgggtcaggaccttttcgcatcctttcttcctagagggaaccattactacagtcagttgttgcctgt

SEQ ID NO: 68985 - DNA, 241 bp, Homo sapiens
acttgaacccaggaggtggaggttgcagtgagcaagatcacgccactgcactccagcctgggtgacaaagcgagactctatctcaaaataaataaataaataaataataaaaaatgctgaaagaaaacagtcaacctagaattctatatcctgtaaaacagaggtccccagcccccaggccacagactggtctgggtccgtggcctgttaggagccaggccgcacacagcaggaggtgagt

SEQ ID NO: 68986 - DNA, 4252 bp, Homo sapiens
caggctggaagcggcgccatattggcgtcggccgcgctgtattgtcataaatagagccggttttgtggtgttttcactactcggttggatgcctcagccatagtaagtgggaaagtgagcgagcaagcgagctactagcgaccggaggaaagtgaacagggggagaagggaacagcaagaacaggactccagagcgataaacactcgctggagagggagacgcaggaagcgatgaaagagatgtctgcaaacaccgtgctggacagccagcgtcaacaaaagcattatggaattacctccccaattagtttggcatctcctaaagaaattgatcatatttacacacagaaattaattgacgccatgaaaccatttggagtgtttgaagatgaggaagaattgaaccacaggctggtggttcttggtaaattgaacaatttagtaaaagaatggatttctgatgtcagcgagagtaagaacctcccaccttctgttgtggctactgttggtggtaaaattttcacatttggatcctataggcttggagtacacaccaaaggagctgacattgatgcactttgtgtagctccaagacatgtggaaagatctgatttttttcagtctttttttgaaaaattgaaacatcaagatggcattagaaacttaagagctgtagaagatgcctttgtacctgttataaaatttgaatttgatggtattgaaattgatctagtctttgcaagactggcaatacaaaccatatcagataatttagatctaagagacgactctcgcctgagaagccttgatataaggtgtattcgcagcttaaatggttgtagagttactgatgaaattttgcatttagtgccaaataaagaaacttttagactcaccctaagagctgtcaaattatgggcaaaacgacgtggtatttattccaacatgctaggattccttggtggtgtctcctgggcaatgctagttgcaagaacttgccaattgtatccaaatgcagcagcatctactttagttcataagttctttttagttttttccaagtgggaatggccaaatcctgtgctgctgaagcaaccagaagaaagcaatttgaatttgcctgtctgggatcctcgggtaaatccatcagataggtatcatctcatgcccataatcacccctgcctacccacaacagaattctacgtataatgtgtccacatcaactcgaacagtaatggtagaagaatttaaacaaggtcttgcagtcacagatgaaattcttcaaggaaagtcagattggtccaaactacttgagccaccgaatttctttcaaaagtatagacattatatagtattgactgccagcgcatcaacagaagaaaaccatctagagtgggttggattagtagaatctaaaatccgtgtacttgttggaaacttggaacggaatgaatttattactcttgcccatgtgaatccccagtcattcccagggaataaggaacatcataaagacaacaattacgtatcaatgtggttccttgggataatttttcggagagtagaaaatgcagaaagtgtcaacatagacttgacatatgatatacagtcatttactgatacagtgtacagacaggcaaacaatataaatatgctaaaggagggaatgaaaattgaagcaactcatgtaaagaaaaaacaacttcaccactaccttcctgcagaaattcttcaaaagaagaaaaagcaaagtctctctgatgtcaatcgaagctcgggcggacttcaatccaaaagattgtctctggatagcagttgtctggatagctccagagacactgataatggaacaccttttaattctccagcgtccaagtctgatagcccttctgtaggagaaacagaaaggaatagtgctgagcctgctgctgtaattgtggagaagccactgagtgtaccaccagcccaaggactttccattccagtgattggcgcaaaagttgactctacagtaaaaactgtatcaccccccactgtgtgtaccattcctaccgtagtaggacgaaatgtcattcctagaatcacaacacctcacaaccctgcccagggacaaccgcatctgaatggaatgtcaaatataactaagactgttacacctaagagatcccattccccatccatagatgggactcctaagaggttgaaagacgtagaaaagtttattcgacttgaatcaacatttaaggacccccgcactgctgaagaaagaaaaagaaaatcagtggatgccattggaggagaatctatgcctattccaactattgatacatcacgcaaaaagagactacccagtaaagaactaccagattcatcatctccagttccagcaaacaacatccgtgtcatcaaaaattccattcgactgacccttaatcggtaaaagcagtgcctcctcacttaagtgaacaagcaatcatttagtggcatagatgcagccacttgttttttaaatagaagtggctgtcatacgtgaaataaggtgaaagtgacagccttcagtctaataaccttgaagtggtttttgaactgtcaaactttgacctgtagatgctgtagcattctctcactgattgctacatacacttctctgaggatcacctgctgtcaaattgccatctacagtattacagctttgcatttgggggttttactgccttaactttcaatgcttgttatgggaaccagttcttagccacttggacactgataacaagtcctgaactccttttttgttttgttttttgtgtttttctttttttgtcttatgttgtaatcattgtatagagctaaaaaaattgaaaacaaacaaaaaaattgtcttgtattttccaaatgttaatacatttactttagcattgaagccactttgaaacctgagataaatgaatgtgaggtatcttttctgctttcctcatttgtgtagatgtactgtctgttctgttgatttaaattatttttttccagattggcacatgaaatatttaaacttttttgtgtgcctttctgtccaaatgttgcatagttaccagggaagattagtccagtgattacataagagttgggcaccataaattctctatattttgcctcccatggaggcctttgaaatgcatctttattaaaaatcaaaatataaccaggatactgaaagtcagtatatgaatggtaaaattgttacatatcctatttcatgccattcttgttagttgactggtattttttactgaggagcaactcattccagcatcaacaataagataacctttaagtatggcacacttgtatttttgaggtgtaaaattaacttggcatgataattcctgatcattatttaccccacaacttcaaatagtttcttcacggactaggcatgcagaaataagcagtggattttattgaaacctaaaggcattttgaatgacattgttaccaaccattaattggctcaggacctttgtaatttttatttaactatatgagttgtctttttttacgctgcttttttcaatgcatttcttaatattttttaagtttcatgaatgcatgctcagtttattaaaatccataaccatgtaattcttgtaatatgttgattcagtgttttgtaaatgaagtcgtatgtattttcagagtatttttgtatgtactgtaagataccatcttttcaaagagaaacgtttaaaacctttattgtctctccttagtctaattttttaaatatggattatgcttgaattactatatttaaaatgaaaatgtatagattacacagccaggaatgctagtatctaccaccttctttagatttcactcagcatttagtaggtccagtaggaaaaacccaaaatggtacattgagtagtgtggggaagacacctcgtgtattataggactcacgggatgccatctagcaagtggagaaatagcagtccattttctcttgcaagccctttaccattgagttgaaattcttgaattgccagagagccgtatcctccaggtcccactcctgttcattgccccttaggtctccaaaatgtaaattctaatgtttaccttgtaccatggaaaacatgaaaagagtcttagaagtaaagaacaacaaggaaaaaaatgtttgttctattattccctttttatatagcagcaaaagataagaataaaatcacataaccaagttgaagcttcct

SEQ ID NO: 68987 - DNA, 506 bp, Homo sapiens
gtggtgatctagaggatcctgatgatctgtgcctcctcacttaagtgaacaagcaatcatttagtggcatagatgcagccacttgttttttaaatagaagtggctgtcatacgtgaaataaggtgaaagtgacagccttcagtctaataaccttgaagtggtttttgaactgtcaaactttgacctgtagatgctgtagcattctctcactgattgctacatacacttctctgaggatcacctgctgtcaaattgccatctacagtattacagctttgcatttgggggttttactgccttaactttcaatgcttgttatgggaaccagttcttagccacttggacactgataacaagtcctgaactccttttttgttttgttttttgtgactgactttctagctgggcctttataatatatatgatgtgcttttcctttttcgtttcctctttctttctaatagagactacccagtaaagaactaccagattcatcatctccagta

SEQ ID NO: 68988 - DNA, 4106 bp, Homo sapiens
caggctggaagcggcgccatattggcgtcggccgcgctgtattgtcataaatagagccggttttgtggtgttttcactactcggttggatgcctcagccataaaacaccgtgctggacagccagcgtcaacaaaagcattatggaattacctccccaattagtttggcatctcctaaagaaattgatcatatttacacacagaaattaattgacgccatgaaaccatttggagtgtttgaagatgaggaagaattgaaccacaggctggtggttcttggtaaattgaacaatttagtaaaagaatggatttctgatgtcagcgagagtaagaacctcccaccttctgttgtggctactgttggtggtaaaattttcacatttggatcctataggcttggagtacacaccaaaggagctgacattgatgcactttgtgtagctccaagacatgtggaaagatctgatttttttcagtctttttttgaaaaattgaaacatcaagatggcattagaaacttaagagctgtagaagatgcctttgtacctgttataaaatttgaatttgatggtattgaaattgatctagtctttgcaagactggcaatacaaaccatatcagataatttagatctaagagacgactctcgcctgagaagccttgatataaggtgtattcgcagcttaaatggttgtagagttactgatgaaattttgcatttagtgccaaataaagaaacttttagactcaccctaagagctgtcaaattatgggcaaaacgacgtggtatttattccaacatgctaggattccttggtggtgtctcctgggcaatgctagttgcaagaacttgccaattgtatccaaatgcagcagcatctactttagttcataagttctttttagttttttccaagtgggaatggccaaatcctgtgctgctgaagcaaccagaagaaagcaatttgaatttgcctgtctgggatcctcgggtaaatccatcagataggtatcatctcatgcccataatcacccctgcctacccacaacagaattctacgtataatgtgtccacatcaactcgaacagtaatggtagaagaatttaaacaaggtcttgcagtcacagatgaaattcttcaaggaaagtcagattggtccaaactacttgagccaccgaatttctttcaaaagtatagacattatatagtattgactgccagcgcatcaacagaagaaaaccatctagagtgggttggattagtagaatctaaaatccgtgtacttgttggaaacttggaacggaatgaatttattactcttgcccatgtgaatccccagtcattcccagggaataaggaacatcataaagacaacaattacgtatcaatgtggttccttgggataatttttcggagagtagaaaatgcagaaagtgtcaacatagacttgacatatgatatacagtcatttactgatacagtgtacagacaggcaaacaatataaatatgctaaaggagggaatgaaaattgaagcaactcatgtaaagaaaaaacaacttcaccactaccttcctgcagaaattcttcaaaagaagaaaaagcaaagtctctctgatgtcaatcgaagctcgggcggacttcaatccaaaagattgtctctggatagcagttgtctggatagctccagagacactgataatggaacaccttttaattctccagcgtccaagtctgatagcccttctgtaggagaaacagaaaggaatagtgctgagcctgctgctgtaattgtggagaagccactgagtgtaccaccagcccaaggactttccattccagtgattggcgcaaaagttgactctacagtaaaaactgtatcaccccccactgtgtgtaccattcctaccgtagtaggacgaaatgtcattcctagaatcacaacacctcacaaccctgcccagggacaaccgcatctgaatggaatgtcaaatataactaagactgttacacctaagagatcccattccccatccatagatgggactcctaagaggttgaaagacgtagaaaagtttattcgacttgaatcaacatttaaggacccccgcactgctgaagaaagaaaaagaaaatcagtggatgccattggaggagaatctatgcctattccaactattgatacatcacgcaaaaagagactacccagtaaagaactaccagattcatcatctccagttccagcaaacaacatccgtgtcatcaaaaattccattcgactgacccttaatcggtaaaagcagtgcctcctcacttaagtgaacaagcaatcatttagtggcatagatgcagccacttgttttttaaatagaagtggctgtcatacgtgaaataaggtgaaagtgacagccttcagtctaataaccttgaagtggtttttgaactgtcaaactttgacctgtagatgctgtagcattctctcactgattgctacatacacttctctgaggatcacctgctgtcaaattgccatctacagtattacagctttgcatttgggggttttactgccttaactttcaatgcttgttatgggaaccagttcttagccacttggacactgataacaagtcctgaactccttttttgttttgttttttgtgtttttctttttttgtcttatgttgtaatcattgtatagagctaaaaaaattgaaaacaaacaaaaaaattgtcttgtattttccaaatgttaatacatttactttagcattgaagccactttgaaacctgagataaatgaatgtgaggtatcttttctgctttcctcatttgtgtagatgtactgtctgttctgttgatttaaattatttttttccagattggcacatgaaatatttaaacttttttgtgtgcctttctgtccaaatgttgcatagttaccagggaagattagtccagtgattacataagagttgggcaccataaattctctatattttgcctcccatggaggcctttgaaatgcatctttattaaaaatcaaaatataaccaggatactgaaagtcagtatatgaatggtaaaattgttacatatcctatttcatgccattcttgttagttgactggtattttttactgaggagcaactcattccagcatcaacaataagataacctttaagtatggcacacttgtatttttgaggtgtaaaattaacttggcatgataattcctgatcattatttaccccacaacttcaaatagtttcttcacggactaggcatgcagaaataagcagtggattttattgaaacctaaaggcattttgaatgacattgttaccaaccattaattggctcaggacctttgtaatttttatttaactatatgagttgtctttttttacgctgcttttttcaatgcatttcttaatattttttaagtttcatgaatgcatgctcagtttattaaaatccataaccatgtaattcttgtaatatgttgattcagtgttttgtaaatgaagtcgtatgtattttcagagtatttttgtatgtactgtaagataccatcttttcaaagagaaacgtttaaaacctttattgtctctccttagtctaattttttaaatatggattatgcttgaattactatatttaaaatgaaaatgtatagattacacagccaggaatgctagtatctaccaccttctttagatttcactcagcatttagtaggtccagtaggaaaaacccaaaatggtacattgagtagtgtggggaagacacctcgtgtattataggactcacgggatgccatctagcaagtggagaaatagcagtccattttctcttgcaagccctttaccattgagttgaaattcttgaattgccagagagccgtatcctccaggtcccactcctgttcattgccccttaggtctccaaaatgtaaattctaatgtttaccttgtaccatggaaaacatgaaaagagtcttagaagtaaagaacaacaaggaaaaaaatgtttgttctattattccctttttatatagcagcaaaagataagaataaaatcacataaccaagttgaagcttcct

SEQ ID NO: 68989 - DNA, 4152 bp, Homo sapiens
caggctggaagcggcgccatattggcgtcggccgcgctgtattgtcataaatagagccggttttgtggtgttttcactactcggttggatgcctcagccatagtaagtgggaaagtgagcgagcaagcgagctactagcgaccggaggaaagtgaacagggggagaagggaacagcaagaacaggactccagagcgataaacactcgctggagagggagacgcaggaagcgatgaaagagatgtctgcaaattaattgacgccatgaaaccatttggagtgtttgaagatgaggaagaattgaaccacaggctggtggttcttggtaaattgaacaatttagtaaaagaatggatttctgatgtcagcgagagtaagaacctcccaccttctgttgtggctactgttggtggtaaaattttcacatttggatcctataggcttggagtacacaccaaaggagctgacattgatgcactttgtgtagctccaagacatgtggaaagatctgatttttttcagtctttttttgaaaaattgaaacatcaagatggcattagaaacttaagagctgtagaagatgcctttgtacctgttataaaatttgaatttgatggtattgaaattgatctagtctttgcaagactggcaatacaaaccatatcagataatttagatctaagagacgactctcgcctgagaagccttgatataaggtgtattcgcagcttaaatggttgtagagttactgatgaaattttgcatttagtgccaaataaagaaacttttagactcaccctaagagctgtcaaattatgggcaaaacgacgtggtatttattccaacatgctaggattccttggtggtgtctcctgggcaatgctagttgcaagaacttgccaattgtatccaaatgcagcagcatctactttagttcataagttctttttagttttttccaagtgggaatggccaaatcctgtgctgctgaagcaaccagaagaaagcaatttgaatttgcctgtctgggatcctcgggtaaatccatcagataggtatcatctcatgcccataatcacccctgcctacccacaacagaattctacgtataatgtgtccacatcaactcgaacagtaatggtagaagaatttaaacaaggtcttgcagtcacagatgaaattcttcaaggaaagtcagattggtccaaactacttgagccaccgaatttctttcaaaagtatagacattatatagtattgactgccagcgcatcaacagaagaaaaccatctagagtgggttggattagtagaatctaaaatccgtgtacttgttggaaacttggaacggaatgaatttattactcttgcccatgtgaatccccagtcattcccagggaataaggaacatcataaagacaacaattacgtatcaatgtggttccttgggataatttttcggagagtagaaaatgcagaaagtgtcaacatagacttgacatatgatatacagtcatttactgatacagtgtacagacaggcaaacaatataaatatgctaaaggagggaatgaaaattgaagcaactcatgtaaagaaaaaacaacttcaccactaccttcctgcagaaattcttcaaaagaagaaaaagcaaagtctctctgatgtcaatcgaagctcgggcggacttcaatccaaaagattgtctctggatagcagttgtctggatagctccagagacactgataatggaacaccttttaattctccagcgtccaagtctgatagcccttctgtaggagaaacagaaaggaatagtgctgagcctgctgctgtaattgtggagaagccactgagtgtaccaccagcccaaggactttccattccagtgattggcgcaaaagttgactctacagtaaaaactgtatcaccccccactgtgtgtaccattcctaccgtagtaggacgaaatgtcattcctagaatcacaacacctcacaaccctgcccagggacaaccgcatctgaatggaatgtcaaatataactaagactgttacacctaagagatcccattccccatccatagatgggactcctaagaggttgaaagacgtagaaaagtttattcgacttgaatcaacatttaaggacccccgcactgctgaagaaagaaaaagaaaatcagtggatgccattggaggagaatctatgcctattccaactattgatacatcacgcaaaaagagactacccagtaaagaactaccagattcatcatctccagttccagcaaacaacatccgtgtcatcaaaaattccattcgactgacccttaatcggtaaaagcagtgcctcctcacttaagtgaacaagcaatcatttagtggcatagatgcagccacttgttttttaaatagaagtggctgtcatacgtgaaataaggtgaaagtgacagccttcagtctaataaccttgaagtggtttttgaactgtcaaactttgacctgtagatgctgtagcattctctcactgattgctacatacacttctctgaggatcacctgctgtcaaattgccatctacagtattacagctttgcatttgggggttttactgccttaactttcaatgcttgttatgggaaccagttcttagccacttggacactgataacaagtcctgaactccttttttgttttgttttttgtgtttttctttttttgtcttatgttgtaatcattgtatagagctaaaaaaattgaaaacaaacaaaaaaattgtcttgtattttccaaatgttaatacatttactttagcattgaagccactttgaaacctgagataaatgaatgtgaggtatcttttctgctttcctcatttgtgtagatgtactgtctgttctgttgatttaaattatttttttccagattggcacatgaaatatttaaacttttttgtgtgcctttctgtccaaatgttgcatagttaccagggaagattagtccagtgattacataagagttgggcaccataaattctctatattttgcctcccatggaggcctttgaaatgcatctttattaaaaatcaaaatataaccaggatactgaaagtcagtatatgaatggtaaaattgttacatatcctatttcatgccattcttgttagttgactggtattttttactgaggagcaactcattccagcatcaacaataagataacctttaagtatggcacacttgtatttttgaggtgtaaaattaacttggcatgataattcctgatcattatttaccccacaacttcaaatagtttcttcacggactaggcatgcagaaataagcagtggattttattgaaacctaaaggcattttgaatgacattgttaccaaccattaattggctcaggacctttgtaatttttatttaactatatgagttgtctttttttacgctgcttttttcaatgcatttcttaatattttttaagtttcatgaatgcatgctcagtttattaaaatccataaccatgtaattcttgtaatatgttgattcagtgttttgtaaatgaagtcgtatgtattttcagagtatttttgtatgtactgtaagataccatcttttcaaagagaaacgtttaaaacctttattgtctctccttagtctaattttttaaatatggattatgcttgaattactatatttaaaatgaaaatgtatagattacacagccaggaatgctagtatctaccaccttctttagatttcactcagcatttagtaggtccagtaggaaaaacccaaaatggtacattgagtagtgtggggaagacacctcgtgtattataggactcacgggatgccatctagcaagtggagaaatagcagtccattttctcttgcaagccctttaccattgagttgaaattcttgaattgccagagagccgtatcctccaggtcccactcctgttcattgccccttaggtctccaaaatgtaaattctaatgtttaccttgtaccatggaaaacatgaaaagagtcttagaagtaaagaacaacaaggaaaaaaatgtttgttctattattccctttttatatagcagcaaaagataagaataaaatcacataaccaagttgaagcttcct

SEQ ID NO: 68990 - DNA, 2909 bp, Homo sapiens
aggaggtggaggttgtggtgagctgagattgcgccattgcactccagcctgggcagcaagagtgaaactccatctcaaaaaaagaaaaactagtggattcatgaataggattgtgatgtgatggaagtgtattaaaaatatttgttttgtgagagggttgtgggtgggtgggtggccggtggtgatagtggggagatagtaaaagtatatgcatttcagaaaaattaggcagaacccttggttcagaaagaagtttcccatttaacatattaacattgttacagtgtacagacaggcaaacaatataaatatgctaaaggagggaatgaaaattgaagcaactcatgtaaagaaaaaacaacttcaccactaccttcctgcagaaattcttcaaaagaagaaaaagcaaagtctctctgatgtcaatcgaagctcgggcggacttcaatccaaaagattgtctctggatagcagttgtctggatagctccagagacactgataatggaacaccttttaattctccagcgtccaagtctgatagcccttctgtaggagaaacagaaaggaatagtgctgagcctgctgctgtaattgtggagaagccactgagtgtaccaccagcccaaggactttccattccagtgattggcgcaaaagttgactctacagtaaaaactgtatcaccccccactgtgtgtaccattcctaccgtagtaggacgaaatgtcattcctagaatcacaacacctcacaaccctgcccagggacaaccgcatctgaatggaatgtcaaatataactaagactgttacacctaagagatcccattccccatccatagatgggactcctaagaggttgaaagacgtagaaaagtttattcgacttgaatcaacatttaaggacccccgcactgctgaagaaagaaaaagaaaatcagtggatgccattggaggagaatctatgcctattccaactattgatacatcacgcaaaaagagactacccagtaaagaactaccagattcatcatctccagttccagcaaacaacatccgtgtcatcaaaaattccattcgactgacccttaatcggtaaaagcagtgcctcctcacttaagtgaacaagcaatcatttagtggcatagatgcagccacttgttttttaaatagaagtggctgtcatacgtgaaataaggtgaaagtgacagccttcagtctaataaccttgaagtggtttttgaactgtcaaactttgacctgtagatgctgtagcattctctcactgattgctacatacacttctctgaggatcacctgctgtcaaattgccatctacagtattacagctttgcatttgggggttttactgccttaactttcaatgcttgttatgggaaccagttcttagccacttggacactgataacaagtcctgaactccttttttgttttgttttttgtgtttttctttttttgtcttatgttgtaatcattgtatagagctaaaaaaattgaaaacaaacaaaaaaattgtcttgtattttccaaatgttaatacatttactttagcattgaagccactttgaaacctgagataaatgaatgtgaggtatcttttctgctttcctcatttgtgtagatgtactgtctgttctgttgatttaaattatttttttccagattggcacatgaaatatttaaacttttttgtgtgcctttctgtccaaatgttgcatagttaccagggaagattagtccagtgattacataagagttgggcaccataaattctctatattttgcctcccatggaggcctttgaaatgcatctttattaaaaatcaaaatataaccaggatactgaaagtcagtatatgaatggtaaaattgttacatatcctatttcatgccattcttgttagttgactggtattttttactgaggagcaactcattccagcatcaacaataagataacctttaagtatggcacacttgtatttttgaggtgtaaaattaacttggcatgataattcctgatcattatttaccccacaacttcaaatagtttcttcacggactaggcatgcagaaataagcagtggattttattgaaacctaaaggcattttgaatgacattgttaccaaccattaattggctcaggacctttgtaatttttatttaactatatgagttgtctttttttacgctgcttttttcaatgcatttcttaatattttttaagtttcatgaatgcatgctcagtttattaaaatccataaccatgtaattcttgtaatatgttgattcagtgttttgtaaatgaagtcgtatgtattttcagagtatttttgtatgtactgtaagataccatcttttcaaagagaaacgtttaaaacctttattgtctctccttagtctaattttttaaatatggattatgcttgaattactatatttaaaatgaaaatgtatagattacacagccaggaatgctagtatctaccaccttctttagatttcactcagcatttagtaggtccagtaggaaaaacccaaaatggtacattgagtagtgtggggaagacacctcgtgtattataggactcacgggatgccatctagcaagtggagaaatagcagtccattttctcttgcaagccctttaccattgagttgaaattcttgaattgccagagagccgtatcctccaggtcccactcctgttcattgccccttaggtctccaaaatgtaaattctaatgtttaccttgtaccatggaaaacatgaaaagagtcttagaagtaaagaacaacaaggaaaaaaatgtttgttctattattccctttttatatagcagcaaaagataagaataaaatcacataaccaagttgaagcttcct

SEQ ID NO: 68991 - DNA, 4215 bp, Homo sapiens
tgaggatccccaaccctgccacccacagcggtgttttcactactcggttggatgcctcagccatagtaagtgggaaagtgagcgagcaagcgagctactagcgaccggaggaaagtgaacagggggagaagggaacagcaagaacaggactccagagcgataaacactcgctggagagggagacgcaggaagcgatgaaagagatgtctgcaaacaccgtgctggacagccagcgtcaacaaaagcattatggaattacctccccaattagtttggcatctcctaaagaaattgatcatatttacacacagaaattaattgacgccatgaaaccatttggagtgtttgaagatgaggaagaattgaaccacaggctggtggttcttggtaaattgaacaatttagtaaaagaatggatttctgatgtcagcgagagtaagaacctcccaccttctgttgtggctactgttggtggtaaaattttcacatttggatcctataggcttggagtacacaccaaaggagctgacattgatgcactttgtgtagctccaagacatgtggaaagatctgatttttttcagtctttttttgaaaaattgaaacatcaagatggcattagaaacttaagagctgtagaagatgcctttgtacctgttataaaatttgaatttgatggtattgaaattgatctagtctttgcaagactggcaatacaaaccatatcagataatttagatctaagagacgactctcgcctgagaagccttgatataaggtgtattcgcagcttaaatggttgtagagttactgatgaaattttgcatttagtgccaaataaagaaacttttagactcaccctaagagctgtcaaattatgggcaaaacgacgtggtatttattccaacatgctaggattccttggtggtgtctcctgggcaatgctagttgcaagaacttgccaattgtatccaaatgcagcagcatctactttagttcataagttctttttagttttttccaagtgggaatggccaaatcctgtgctgctgaagcaaccagaagaaagcaatttgaatttgcctgtctgggatcctcgggtaaatccatcagataggtatcatctcatgcccataatcacccctgcctacccacaacagaattctacgtataatgtgtccacatcaactcgaacagtaatggtagaagaatttaaacaaggtcttgcagtcacagatgaaattcttcaaggaaagtcagattggtccaaactacttgagccaccgaatttctttcaaaagtatagacattatatagtattgactgccagcgcatcaacagaagaaaaccatctagagtgggttggattagtagaatctaaaatccgtgtacttgttggaaacttggaacggaatgaatttattactcttgcccatgtgaatccccagtcattcccagggaataaggaacatcataaagacaacaattacgtatcaatgtggttccttgggataatttttcggagagtagaaaatgcagaaagtgtcaacatagacttgacatatgatatacagtcatttactgatacagtgtacagacaggcaaacaatataaatatgctaaaggagggaatgaaaattgaagcaactcatgtaaagaaaaaacaacttcaccactaccttcctgcagaaattcttcaaaagaagaaaaagcaaagtctctctgatgtcaatcgaagctcgggcggacttcaatccaaaagattgtctctggatagcagttgtctggatagctccagagacactgataatggaacaccttttaattctccagcgtccaagtctgatagcccttctgtaggagaaacagaaaggaatagtgctgagcctgctgctgtaattgtggagaagccactgagtgtaccaccagcccaaggactttccattccagtgattggcgcaaaagttgactctacagtaaaaactgtatcaccccccactgtgtgtaccattcctaccgtagtaggacgaaatgtcattcctagaatcacaacacctcacaaccctgcccagggacaaccgcatctgaatggaatgtcaaatataactaagactgttacacctaagagatcccattccccatccatagatgggactcctaagaggttgaaagacgtagaaaagtttattcgacttgaatcaacatttaaggacccccgcactgctgaagaaagaaaaagaaaatcagtggatgccattggaggagaatctatgcctattccaactattgatacatcacgcaaaaagagactacccagtaaagaactaccagattcatcatctccagttccagcaaacaacatccgtgtcatcaaaaattccattcgactgacccttaatcggtaaaagcagtgcctcctcacttaagtgaacaagcaatcatttagtggcatagatgcagccacttgttttttaaatagaagtggctgtcatacgtgaaataaggtgaaagtgacagccttcagtctaataaccttgaagtggtttttgaactgtcaaactttgacctgtagatgctgtagcattctctcactgattgctacatacacttctctgaggatcacctgctgtcaaattgccatctacagtattacagctttgcatttgggggttttactgccttaactttcaatgcttgttatgggaaccagttcttagccacttggacactgataacaagtcctgaactccttttttgttttgttttttgtgtttttctttttttgtcttatgttgtaatcattgtatagagctaaaaaaattgaaaacaaacaaaaaaattgtcttgtattttccaaatgttaatacatttactttagcattgaagccactttgaaacctgagataaatgaatgtgaggtatcttttctgctttcctcatttgtgtagatgtactgtctgttctgttgatttaaattatttttttccagattggcacatgaaatatttaaacttttttgtgtgcctttctgtccaaatgttgcatagttaccagggaagattagtccagtgattacataagagttgggcaccataaattctctatattttgcctcccatggaggcctttgaaatgcatctttattaaaaatcaaaatataaccaggatactgaaagtcagtatatgaatggtaaaattgttacatatcctatttcatgccattcttgttagttgactggtattttttactgaggagcaactcattccagcatcaacaataagataacctttaagtatggcacacttgtatttttgaggtgtaaaattaacttggcatgataattcctgatcattatttaccccacaacttcaaatagtttcttcacggactaggcatgcagaaataagcagtggattttattgaaacctaaaggcattttgaatgacattgttaccaaccattaattggctcaggacctttgtaatttttatttaactatatgagttgtctttttttacgctgcttttttcaatgcatttcttaatattttttaagtttcatgaatgcatgctcagtttattaaaatccataaccatgtaattcttgtaatatgttgattcagtgttttgtaaatgaagtcgtatgtattttcagagtatttttgtatgtactgtaagataccatcttttcaaagagaaacgtttaaaacctttattgtctctccttagtctaattttttaaatatggattatgcttgaattactatatttaaaatgaaaatgtatagattacacagccaggaatgctagtatctaccaccttctttagatttcactcagcatttagtaggtccagtaggaaaaacccaaaatggtacattgagtagtgtggggaagacacctcgtgtattataggactcacgggatgccatctagcaagtggagaaatagcagtccattttctcttgcaagccctttaccattgagttgaaattcttgaattgccagagagccgtatcctccaggtcccactcctgttcattgccccttaggtctccaaaatgtaaattctaatgtttaccttgtaccatggaaaacatgaaaagagtcttagaagtaaagaacaacaaggaaaaaaatgtttgttctattattccctttttatatagcagcaaaagataagaataaaatcacataaccaagttgaagcttcct

SEQ ID NO: 68992 - DNA, 3957 bp, Homo sapiens
tgaggatccccaaccctgccacccacagcggtgttttcactactcggttggatgcctcagccataaaacaccgtgctggacagccagcgtcaacaaaagcattatggaattacctccccaattagtttggcatctcctaaagaaattgatcatatttacacacagaaattaattgacgccatgaaaccatttggagtgtttgaagatgaggaagaattgaaccacaggctggtggttcttggtaaattgaacaatttagtaaaagaatggatttctgatgtcagcgagagtaagaacctcccaccttctgttgtggctactgttggtggtaaaattttcacatttggatcctataggcttggagtacacaccaaaggagctgacattgatgcactttgtgtagctccaagacatgtggaaagatctgatttttttcagtctttttttgaaaaattgaaacatcaagatggcattagaaacttaagagctgtagaagatgcctttgtacctgttataaaatttgaatttgatggtattgaagttgtagagttactgatgaaattttgcatttagtgccaaataaagaaacttttagactcaccctaagagctgtcaaattatgggcaaaacgacgtggtatttattccaacatgctaggattccttggtggtgtctcctgggcaatgctagttgcaagaacttgccaattgtatccaaatgcagcagcatctactttagttcataagttctttttagttttttccaagtgggaatggccaaatcctgtgctgctgaagcaaccagaagaaagcaatttgaatttgcctgtctgggatcctcgggtaaatccatcagataggtatcatctcatgcccataatcacccctgcctacccacaacagaattctacgtataatgtgtccacatcaactcgaacagtaatggtagaagaatttaaacaaggtcttgcagtcacagatgaaattcttcaaggaaagtcagattggtccaaactacttgagccaccgaatttctttcaaaagtatagacattatatagtattgactgccagcgcatcaacagaagaaaaccatctagagtgggttggattagtagaatctaaaatccgtgtacttgttggaaacttggaacggaatgaatttattactcttgcccatgtgaatccccagtcattcccagggaataaggaacatcataaagacaacaattacgtatcaatgtggttccttgggataatttttcggagagtagaaaatgcagaaagtgtcaacatagacttgacatatgatatacagtcatttactgatacagtgtacagacaggcaaacaatataaatatgctaaaggagggaatgaaaattgaagcaactcatgtaaagaaaaaacaacttcaccactaccttcctgcagaaattcttcaaaagaagaaaaagcaaagtctctctgatgtcaatcgaagctcgggcggacttcaatccaaaagattgtctctggatagcagttgtctggatagctccagagacactgataatggaacaccttttaattctccagcgtccaagtctgatagcccttctgtaggagaaacagaaaggaatagtgctgagcctgctgctgtaattgtggagaagccactgagtgtaccaccagcccaaggactttccattccagtgattggcgcaaaagttgactctacagtaaaaactgtatcaccccccactgtgtgtaccattcctaccgtagtaggacgaaatgtcattcctagaatcacaacacctcacaaccctgcccagggacaaccgcatctgaatggaatgtcaaatataactaagactgttacacctaagagatcccattccccatccatagatgggactcctaagaggttgaaagacgtagaaaagtttattcgacttgaatcaacatttaaggacccccgcactgctgaagaaagaaaaagaaaatcagtggatgccattggaggagaatctatgcctattccaactattgatacatcacgcaaaaagagactacccagtaaagaactaccagattcatcatctccagttccagcaaacaacatccgtgtcatcaaaaattccattcgactgacccttaatcggtaaaagcagtgcctcctcacttaagtgaacaagcaatcatttagtggcatagatgcagccacttgttttttaaatagaagtggctgtcatacgtgaaataaggtgaaagtgacagccttcagtctaataaccttgaagtggtttttgaactgtcaaactttgacctgtagatgctgtagcattctctcactgattgctacatacacttctctgaggatcacctgctgtcaaattgccatctacagtattacagctttgcatttgggggttttactgccttaactttcaatgcttgttatgggaaccagttcttagccacttggacactgataacaagtcctgaactccttttttgttttgttttttgtgtttttctttttttgtcttatgttgtaatcattgtatagagctaaaaaaattgaaaacaaacaaaaaaattgtcttgtattttccaaatgttaatacatttactttagcattgaagccactttgaaacctgagataaatgaatgtgaggtatcttttctgctttcctcatttgtgtagatgtactgtctgttctgttgatttaaattatttttttccagattggcacatgaaatatttaaacttttttgtgtgcctttctgtccaaatgttgcatagttaccagggaagattagtccagtgattacataagagttgggcaccataaattctctatattttgcctcccatggaggcctttgaaatgcatctttattaaaaatcaaaatataaccaggatactgaaagtcagtatatgaatggtaaaattgttacatatcctatttcatgccattcttgttagttgactggtattttttactgaggagcaactcattccagcatcaacaataagataacctttaagtatggcacacttgtatttttgaggtgtaaaattaacttggcatgataattcctgatcattatttaccccacaacttcaaatagtttcttcacggactaggcatgcagaaataagcagtggattttattgaaacctaaaggcattttgaatgacattgttaccaaccattaattggctcaggacctttgtaatttttatttaactatatgagttgtctttttttacgctgcttttttcaatgcatttcttaatattttttaagtttcatgaatgcatgctcagtttattaaaatccataaccatgtaattcttgtaatatgttgattcagtgttttgtaaatgaagtcgtatgtattttcagagtatttttgtatgtactgtaagataccatcttttcaaagagaaacgtttaaaacctttattgtctctccttagtctaattttttaaatatggattatgcttgaattactatatttaaaatgaaaatgtatagattacacagccaggaatgctagtatctaccaccttctttagatttcactcagcatttagtaggtccagtaggaaaaacccaaaatggtacattgagtagtgtggggaagacacctcgtgtattataggactcacgggatgccatctagcaagtggagaaatagcagtccattttctcttgcaagccctttaccattgagttgaaattcttgaattgccagagagccgtatcctccaggtcccactcctgttcattgccccttaggtctccaaaatgtaaattctaatgtttaccttgtaccatggaaaacatgaaaagagtcttagaagtaaagaacaacaaggaaaaaaatgtttgttctattattccctttttatatagcagcaaaagataagaataaaatcacataaccaagttgaagcttcct

SEQ ID NO: 68993 - DNA, 4208 bp, Homo sapiens
caggctggaagcggcgccatattggcgtcggccgcgctgtattgtcataaatagagccggttttgtggtgttttcactactcggttggatgcctcagccatagtaagtgggaaagtgagcgagcaagcgagctactagcgaccggaggaaagtgaacagggggagaagggaacagcaagaacaggactccagagcgataaacactcgctggagagggagacgcaggaagcgatgaaagagatgtctgcaaacaccgtgctggacagccagcgtcaacaaaagcattatggaattacctccccaattagtttggcatctcctaaagaaattgatcatatttacacacagaaattaattgacgccatgaaaccatttggagtgtttgaagatgaggaagaattgaaccacaggctggtggttcttggtaaattgaacaatttagtaaaagaatggatttctgatgtcagcgagagtaagaacctcccaccttctgttgtggctactgttggtggtaaaattttcacatttggatcctataggcttggagtacacaccaaaggagctgacattgatgcactttgtgtagctccaagacatgtggaaagatctgatttttttcagtctttttttgaaaaattgaaacatcaagatggcattagaaacttaagagctgtagaagatgcctttgtacctgttataaaatttgaatttgatggtattgaaattgatctagtctttgcaagactggcaatacaaaccatatcagataatttagatctaagagacgactctcgcctgagaagccttgatataaggtgtattcgcagcttaaatggttgtagagttactgatgaaattttgcatttagtgccaaataaagaaacttttagactcaccctaagagctgtcaaattatgggcaaaacgacgtggtatttattccaacatgctaggattccttggtggtgtctcctgggcaatgctagttgcaagaacttgccaattgtatccaaatgcagcagcatctactttagttcataagttctttttagttttttccaagtgggaatggccaaatcctgtgctgctgaagcaaccagaagaaagcaatttgaatttgcctgtctgggatcctcgggtaaatccatcagataggtatcatctcatgcccataatcacccctgcctacccacaacagaattctacgtataatgtgtccacatcaactcgaacagtaatggtagaagaatttaaacaaggtcttgcagtcacagatgaaattcttcaaggaaagtcagattggtccaaactacttgagccaccgaatttctttcaaaagtatagacattatatagtattgactgccagcgcatcaacagaagaaaaccatctagagtgggttggattagtagaatctaaaatccgtgtacttgttggaaacttggaacggaatgaatttattactcttgcccatgtgaatccccagtcattcccagggaataaggaacatcataaagacaacaattacgtatcaatgtggttccttgggataatttttcggagagtagaaaatgcagaaagtgtcaacatagacttgacatatgatatacagtcatttactgatacagtgtacagacaggcaaacaatataaatatgctaaaggagggaatgaaaattgaagcaactcatgtaaagaaaaaacaacttcaccactaccttcctgcagaaattcttcaaaagaagaaaaagcaaagtctctctgatgtcaatcgaagctcgggcggacttcaatccaaaagattgtctctggatagcagttgtctggatagctccagagacactgataatggaacaccttttaattctccagcgtccaagtctgatagcccttctgtaggagaaacagaaaggaatagtgctgagcctgctgctgtaattgtggagaagccactgagtgtaccaccagcccaaggactttccattccagtgattggcgcaaaagttgactctacagtaaaaactgtatcaccccccactgtgtgtaccattcctaccgtagtaggacgaaatgtcattcctagaatcacaacacctcacaaccctgcccagggacaaccgcatctgaatggaatgtcaaatataactaagactgttacacctaagagatcccattccccatccatagatgggactcctaagaggttgaaagacgtagaaaagtttattcgacttgaatcaacatttaaggacccccgcactgctgaagaaagaaaaagaaaatcagtggatgccattggaggagaatctatgcctattccaactattgatacatcacgcaaaaagagactacccagtaaagaactaccagattcatcatctccagttccagcaaacaacatccgtgtcatcaaaaattccattcgactgacccttaatcggtaaaagcaatgcagccacttgttttttaaatagaagtggctgtcatacgtgaaataaggtgaaagtgacagccttcagtctaataaccttgaagtggtttttgaactgtcaaactttgacctgtagatgctgtagcattctctcactgattgctacatacacttctctgaggatcacctgctgtcaaattgccatctacagtattacagctttgcatttgggggttttactgccttaactttcaatgcttgttatgggaaccagttcttagccacttggacactgataacaagtcctgaactccttttttgttttgttttttgtgtttttctttttttgtcttatgttgtaatcattgtatagagctaaaaaaattgaaaacaaacaaaaaaattgtcttgtattttccaaatgttaatacatttactttagcattgaagccactttgaaacctgagataaatgaatgtgaggtatcttttctgctttcctcatttgtgtagatgtactgtctgttctgttgatttaaattatttttttccagattggcacatgaaatatttaaacttttttgtgtgcctttctgtccaaatgttgcatagttaccagggaagattagtccagtgattacataagagttgggcaccataaattctctatattttgcctcccatggaggcctttgaaatgcatctttattaaaaatcaaaatataaccaggatactgaaagtcagtatatgaatggtaaaattgttacatatcctatttcatgccattcttgttagttgactggtattttttactgaggagcaactcattccagcatcaacaataagataacctttaagtatggcacacttgtatttttgaggtgtaaaattaacttggcatgataattcctgatcattatttaccccacaacttcaaatagtttcttcacggactaggcatgcagaaataagcagtggattttattgaaacctaaaggcattttgaatgacattgttaccaaccattaattggctcaggacctttgtaatttttatttaactatatgagttgtctttttttacgctgcttttttcaatgcatttcttaatattttttaagtttcatgaatgcatgctcagtttattaaaatccataaccatgtaattcttgtaatatgttgattcagtgttttgtaaatgaagtcgtatgtattttcagagtatttttgtatgtactgtaagataccatcttttcaaagagaaacgtttaaaacctttattgtctctccttagtctaattttttaaatatggattatgcttgaattactatatttaaaatgaaaatgtatagattacacagccaggaatgctagtatctaccaccttctttagatttcactcagcatttagtaggtccagtaggaaaaacccaaaatggtacattgagtagtgtggggaagacacctcgtgtattataggactcacgggatgccatctagcaagtggagaaatagcagtccattttctcttgcaagccctttaccattgagttgaaattcttgaattgccagagagccgtatcctccaggtcccactcctgttcattgccccttaggtctccaaaatgtaaattctaatgtttaccttgtaccatggaaaacatgaaaagagtcttagaagtaaagaacaacaaggaaaaaaatgtttgttctattattccctttttatatagcagcaaaagataagaataaaatcacataaccaagttgaagcttcct

SEQ ID NO: 68994 - DNA, 233 bp, Homo sapiens
attggcggtagaacagaaaagcatggctggtatctgaaatattctgggattggttccaccactgcttcattccagaagttgaacgatatctctagggcaaaaaccttgctttctgggtcttattaattttggataatgccccagttcattgcacgatgaacttgaaaatgctcaccccaacaaagaagttcttttcatgcccccaatactacatctctcgtccagcccctcag

SEQ ID NO: 68995 - DNA, 4602 bp, Homo sapiens
  misc_feature (3711)..(3711): n is a, c, g, or t
attgagactcaggaccgttttcatggccagagcccacttgtgtgcagcaagaggaaagcacttcgtgtctaacgtagtggaatgagagtaacgtagaagaacaacgaatcccaggtctggcgtttatctcctaggaagggtgtgggagagctgttttccaagggagactctctggaggctgctttgcgcagcaagcagtttttacccagattatatacagtatttcagaccaatttcaaaacctctgcgttttaaaaattgtctttatttacattttacagaaagttgagaaagtgttatttatatggggggtaggggtgctggagattatgagactaataacaaccctcttagctcgcaccctttggcaccactacagcttccaaactctgggactttctcgactagcttccctttgtttagctgtgaaatggaagaagcggtccgggtgtggcggctcatgcctgtaacctgagcactctgggaggcggaggatcgcttgagtccagaagttcaagaccagcttgggcaacatagggtgaccctccaccctccccccgccccaccacatcgctacaaaaaatttttaaaaattagccgggtgtggtggcgcaagcctgtagtctcagcgggagctgagggaggagaatcgcttcagcccgggaggtcgaggctgtagtgagccgagatcgcgctactgcactcctgggcgacagagcgagaccctgtctccaaaaaaaaaaaaaaaagaaaaaagaggaagttgtatccaattcagaaacgcggtccttcgggacctgctagttttataccccggaggatcctccccggcgggctggcacgggaggtggagaaagaggcttgggcggccccgctgtagccgcgtgtgggaggacgcacgggcctgcttcaaagctttgggataacagcgcctccgggggataatgaatgcggagcctccgttttcagtcgacttcagatgtgtctccacttttttccgctgtagccgcaaggcaaggaaacatttctcttcccgtactgaggaggctgaggagtgcactgggtgttcttttctcctctaacccagaactgcgagacagaggctgagtccctgtaaagaacagctccagaaaagccaggagagcgcaggagggcatccgggaggccaggaggggttcgctggggcctcaaccgcacccacatcggtcccacctgcgagggggcgggacctcgtggcgctggaccaatcagcacccacctgcgctcacctggcctcctcccgctggctcccgggggctgcggtgctcaaaggggcaagagctgagcggaacaccggcccgccgtcgcggcagctgcttcacccctctctctgcagccatggggctccctcgtggacctctcgcgtctctcctccttctccaggtttgctggctgcagtgcgcggcctccgagccgtgccgggcggtcttcagggaggctgaagtgaccttggaggcgggaggcgcggagcaggagcccggccaggcgctggggaaagtattcatgggctgccctgggcaagagccagctctgtttagcactgataatgatgacttcactgtgcggaatggcgagacagtccaggaaagaaggtcactgaaggaaaggaatccattgaagatcttcccatccaaacgtatcttacgaagacacaagagagattgggtggttgctccaatatctgtccctgaaaatggcaagggtcccttcccccagagactgaatcagctcaagtctaataaagatagagacaccaagattttctacagcatcacggggccgggggcagacagcccccctgagggtgtcttcgctgtagagaaggagacaggctggttgttgttgaataagccactggaccgggaggagattgccaagtatgagctctttggccacgctgtgtcagagaatggtgcctcagtggaggaccccatgaacatctccatcatcgtgaccgaccagaatgaccacaagcccaagtttacccaggacaccttccgagggagtgtcttagagggagtcctaccaggtacttctgtgatgcaggtgacagccacagatgaggatgatgccatctacacctacaatggggtggttgcttactccatccatagccaagaaccaaaggacccacacgacctcatgttcacaattcaccggagcacaggcaccatcagcgtcatctccagtggcctggaccgggaaaaagtccctgagtacacactgaccatccaggccacagacatggatggggacggctccaccaccacggcagtggcagtagtggagatccttgatgccaatgacaatgctcccatgtttgacccccagaagtacgaggcccatgtgcctgagaatgcagtgggccatgaggtgcagaggctgacggtcactgatctggacgcccccaactcaccagcgtggcgtgccacctaccttatcatgggcggtgacgacggggaccattttaccatcaccacccaccctgagagcaaccagggcatcctgacaaccaggaagggtttggattttgaggccaaaaaccagcacaccctgtacgttgaagtgaccaacgaggccccttttgtgctgaagctcccaacctccacagccaccatagtggtccacgtggaggatgtgaatgaggcacctgtgtttgtcccaccctccaaagtcgttgaggtccaggagggcatccccactggggagcctgtgtgtgtctacactgcagaagaccctgacaaggagaatcaaaagatcagctaccgcatcctgagagacccagcagggtggctagccatggacccagacagtgggcaggtcacagctgtgggcaccctcgaccgtgaggatgagcagtttgtgaggaacaacatctatgaagtcatggtcttggccatggacaatggaagccctcccaccactggcacgggaacccttctgctaacactgattgatgtcaacgaccatggcccagtccctgagccccgtcagatcaccatctgcaaccaaagccctgtgcgccaggtgctgaacatcacggacaaggacctgtctccccacacctcccctttccaggcccagctcacagatgactcagacatctactggacggcagaggtcaacgaggaaggtgacacagtggtcttgtccctgaagaagttcctgaagcaggatacatatgacgtgcacctttctctgtctgaccatggcaacaaagagcagctgacggtgatcagggccactgtgtgcgactgccatggccatgtcgaaacctgccctggaccctggaagggaggtttcatcctccctgtgctgggggctgtcctggctctgctgttcctcctgctggtgctgcttttgttggtgagaaagaagcggaagatcaaggagcccctcctactcccagaagatgacacccgtgacaacgtcttctactatggcgaagaggggggtggcgaagaggaccaggactatgacatcacccagctccaccgaggtctggaggccaggccggaggtggttctccgcaatgacgtggcaccaaccatcatcccgacacccatgtaccgtcctcggccagccaacccagatgaaatcggcaactttataattgaggggaggggagagaggggctcacagagaggaaatggaggcttgcagctggcaagnggcaggacccgccgctcctaactacctgttctctgttgccgcagaacctgaaggcggctaacacagaccccacagccccgccctacgacaccctcttggtgttcgactatgagggcagcggctccgacgccgcgtccctgagctccctcacctcctccgcctccgaccaagaccaagattacgattatctgaacgagtggggcagccgcttcaagaagctggcagacatgtacggtggcggggaggacgactaggcggcctgcctgcagggctggggaccaaacgtcaggccacagagcatctccaaggggtctcagttcccccttcagctgaggacttcggagcttgtcaggaagtggccgtagcaacttggcggagacaggctatgagtctgacgttagagtggttgcttccttagcctttcaggatggaggaatgtgggcagtttgacttcagcactgaaaacctctccacctgggccagggttgcctcagaggccaagtttccagaagcctcttacctgccgtaaaatgctcaaccctgtgtcctgggcctgggcctgctgtgactgacctacagtggactttctctctggaatggaaccttcttaggcctcctggtgcaacttaatttttttttttaatgctatcttcaaaacgttagagaaagttcttcaaaagtgcagcccagagctgctgggcccactggccgtcctgcatttctggtttccagaccccaatgcctcccattcggatggatctctgcgtttttatactgagtgtgcctaggttgccccttattttttattttccctgttgcgttgctatagatgaagggtgaggacaatcgtgtatatgtactagaacttttttattaaagaaacttttccca

SEQ ID NO: 68996 - DNA, 2620 bp, Homo sapiens
aacccaggaggcagaggttgcagtgagtcgagatcacaccattgcactccagcctgggtgatagagtgagacttcatctcaaaaaaaaaaaaaaaaaaaaaaaagaaaagaaaaaaagagttccagaagtagacagggctggagttggaactgggaggaaaagatactcatcccttctctccaggtacttctgtgatgcaggtgacagccacagatgaggatgatgccatctacacctacaatggggtggttgcttactccatccatagccaagaaccaaaggacccacacgacctcatgttcacaattcaccggagcacaggcaccatcagcgtcatctccagtggcctggaccgggaaaaagtccctgagtacacactgaccatccaggccacagacatggatggggacggctccaccaccacggcagtggcagtagtggagatccttgatgccaatgacaatgctcccatgtttgacccccagaagtacgaggcccatgtgcctgagaatgcagtgggccatgaggtgcagaggctgacggtcactgatctggacgcccccaactcaccagcgtggcgtgccacctaccttatcatgggcggtgacgacggggaccattttaccatcaccacccaccctgagagcaaccagggcatcctgacaaccaggaagggtttggattttgaggccaaaaaccagcacaccctgtacgttgaagtgaccaacgaggccccttttgtgctgaagctcccaacctccacagccaccatagtggtccacgtggaggatgtgaatgaggcacctgtgtttgtcccaccctccaaagtcgttgaggtccaggagggcatccccactggggagcctgtgtgtgtctacactgcagaagaccctgacaaggagaatcaaaagatcagctaccgcatcctgagagacccagcagggtggctagccatggacccagacagtgggcaggtcacagctgtgggcaccctcgaccgtgaggatgagcagtttgtgaggaacaacatctatgaagtcatggtcttggccatggacaatggaagccctcccaccactggcacgggaacccttctgctaacactgattgatgtcaacgaccatggcccagtccctgagccccgtcagatcaccatctgcaaccaaagccctgtgcgccaggtgctgaacatcacggacaaggacctgtctccccacacctcccctttccaggcccagctcacagatgactcagacatctactggacggcagaggtcaacgaggaaggtgacacagtggtcttgtccctgaagaagttcctgaagcaggatacatatgacgtgcacctttctctgtctgaccatggcaacaaagagcagctgacggtgatcagggccactgtgtgcgactgccatggccatgtcgaaacctgccctggaccctggaagggaggtttcatcctccctgtgctgggggctgtcctggctctgctgttcctcctgctggtgctgcttttgttggtgagaaagaagcggaagatcaaggagcccctcctactcccagaagatgacacccgtgacaacgtcttctactatggcgaagaggggggtggcgaagaggaccaggactatgacatcacccagctccaccgaggtctggaggccaggccggaggtggttctccgcaatgacgtggcaccaaccatcatcccgacacccatgtaccgtcctcggccagccaacccagatgaaatcggcaactttataattgagaacctgaaggcggctaacacagaccccacagccccgccctacgacaccctcttggtgttcgactatgagggcagcggctccgacgccgcgtccctgagctccctcacctcctccgcctccgaccaagaccaagattacgattatctgaacgagtggggcagccgcttcaagaagctggcagacatgtacggtggcggggaggacgactaggcggcctgcctgcagggctggggaccaaacgtcaggccacagagcatctccaaggggtctcagttcccccttcagctgaggacttcggagcttgtcaggaagtggccgtagcaacttggcggagacaggctatgagtctgacgttagagtggttgcttccttagcctttcaggatggaggaatgtgggcagtttgacttcagcactgaaaacctctccacctgggccagggttgcctcagaggccaagtttccagaagcctcttacctgccgtaaaatgctcaaccctgtgtcctgggcctgggcctgctgtgactgacctacagtggactttctctctggaatggaaccttcttaggcctcctggtgcaacttaatttttttttttaatgctatcttcaaaacgttagagaaagttcttcaaaagtgcagcccagagctgctgggcccactggccgtcctgcatttctggtttccagaccccaatgcctcccattcggatggatctctgcgtttttatactgagtgtgcctaggttgccccttattttttattttccctgttgcgttgctatagatgaagggtgaggacaatcgtgtatatgtactagaacttttttattaaagaaacttttccca

SEQ ID NO: 68997 - DNA, 1430 bp, Homo sapiens
tgcggttgatctagaggatcccacgacaccctcccctttccaggcccagctcacagatgactcagacatctactggacggcagaggtcaacgaggaaggtgacacagtggtcttgtccctgaagaagttcctgaagcaggatacatatgacgtgcacctttctctgtctgaccatggcaacaaagagcagctgacggtgatcagggccactgtgtgcgactgccatggccatgtcgaaacctgccctggaccctggaagggaggtttcatcctccctgtgctgggggctgtcctggctctgctgttcctcctgctggtgctgcttttgttggtgagaaagaagcggaagatcaaggagcccctcctactcccagaagatgacacccgtgacaacgtcttctactatggcgaagaggggggtggcgaagaggaccaggactatgacatcacccagctccaccgaggtctggaggccaggccggaggtggttctccgcaatgacgtggcaccaaccatcatcccgacacccatgtaccgtcctcggccagccaacccagatgaaatcggcaactttataattgagaacctgaaggcggctaacacagaccccacagccccgccctacgacaccctcttggtgttcgactatgagggcagcggctccgacgccgcgtccctgagctccctcacctcctccgcctccgaccaagaccaagattacgattatctgaacgagtggggcagccgcttcaagaagctggcagacatgtacggtggcggggaggacgactaggcggcctgcctgcagggctggggaccaaacgtcaggccacagagcatctccaaggggtctcagttcccccttcagctgaggacttcggagcttgtcaggaagtggccgtagcaacttggcggagacaggctatgagtctgacgttagagtggttgcttccttagcctttcaggatggaggaatgtgggcagtttgacttcagcactgaaaacctctccacctgggccagggttgcctcagaggccaagtttccagaagcctcttacctgccgtaaaatgctcaaccctgtgtcctgggcctgggcctgctgtgactgacctacagtggactttctctctggaatggaaccttcttaggcctcctggtgcaacttaatttttttttttaatgctatcttcaaaacgttagagaaagttcttcaaaagtgcagcccagagctgctgggcccactggccgtcctgcatttctggtttccagaccccaatgcctcccattcggatggatctctgcgtttttatactgagtgtgcctaggttgccccttattttttattttccctgttgcgttgctatagatgaagggtgaggacaatcgtgtatatgtactagaacttttttattaaagaaacttttccca

SEQ ID NO: 68998 - DNA, 4170 bp, Homo sapiens
attgagactcaggaccgttttcatggccagagcccacttgtgtgcagcaagaggaaagcacttcgtgtctaacgtagtggaatgagagtaacgtagaagaacaacgaatcccaggtctggcgtttatctcctaggaagggtgtgggagagctgttttccaagggagactctctggaggctgctttgcgcagcaagcagtttttacccagattatatacagtatttcagaccaatttcaaaacctctgcgttttaaaaattgtctttatttacattttacagaaagttgagaaagtgttatttatatggggggtaggggtgctggagattatgagactaataacaaccctcttagctcgcaccctttggcaccactacagcttccaaactctgggactttctcgactagcttccctttgtttagctgtgaaatggaagaagcggtccgggtgtggcggctcatgcctgtaacctgagcactctgggaggcggaggatcgcttgagtccagaagttcaagaccagcttgggcaacatagggtgaccctccaccctccccccgccccaccacatcgctacaaaaaatttttaaaaattagccgggtgtggtggcgcaagcctgtagtctcagcgggagctgagggaggagaatcgcttcagcccgggaggtcgaggctgtagtgagccgagatcgcgctactgcactcctgggcgacagagcgagaccctgtctccaaaaaaaaaaaaaaaagaaaaaagaggaagttgtatccaattcagaaacgcggtccttcgggacctgctagttttataccccggaggatcctccccggcgggctggcacgggaggtggagaaagaggcttgggcggccccgctgtagccgcgtgtgggaggacgcacgggcctgcttcaaagctttgggataacagcgcctccgggggataatgaatgcggagcctccgttttcagtcgacttcagatgtgtctccacttttttccgctgtagccgcaaggcaaggaaacatttctcttcccgtactgaggaggctgaggagtgcactgggtgttcttttctcctctaacccagaactgcgagacagaggctgagtccctgtaaagaacagctccagaaaagccaggagagcgcaggagggcatccgggaggccaggaggggttcgctggggcctcaaccgcacccacatcggtcccacctgcgagggggcgggacctcgtggcgctggaccaatcagcacccacctgcgctcacctggcctcctcccgctggctcccgggggctgcggtgctcaaaggggcaagagctgagcggaacaccggcccgccgtcgcggcagctgcttcacccctctctctgcagccatggggctccctcgtggacctctcgcgtctctcctccttctccaggtttgctggctgcagtgcgcggcctccgagccgtgccgggcggtcttcagggaggctgaagtgaccttggaggcgggaggcgcggagcaggagcccggccaggcgctggggaaagtattcatgggctgccctgggcaagagccagctctgtttagcactgataatgatgacttcactgtgcggaatggcgagacagtccaggaaagaaggtcactgaaggaaaggaatccattgaagatcttcccatccaaacgtatcttacgaagacacaagagagattgggtggttgctccaatatctgtccctgaaaatggcaagggtcccttcccccagagactgaatcagctcaagtctaataaagatagagacaccaagattttctacagcatcacggggccgggggcagacagcccccctgagggtgtcttcgctgtagagaaggagacaggctggttgttgttgaataagccactggaccgggaggagattgccaagtatgagctctttggccacgctgtgtcagagaatggtgcctcagtggaggaccccatgaacatctccatcatcgtgaccgaccagaatgaccacaagcccaagtttacccaggacaccttccgagggagtgtcttagagggagtcctaccaggtacttctgtgatgcaggtgacagccacagatgaggatgatgccatctacacctacaatggggtggttgcttactccatccatagccaagaaccaaaggacccacacgacctcatgttcacaattcaccggagcacaggcaccatcagcgtcatctccagtggcctggaccgggaaaaagtccctgagtacacactgaccatccaggccacagacatggatggggacggctccaccaccacggcagtggcagtagtggagatccttgatgccaatgacaatgctcccatgtttgacccccagaagtacgaggcccatgtgcctgagaatgcagtgggccatgaggtgcagaggctgacggtcactgatctggacgcccccaactcaccagcgtggcgtgccacctaccttatcatgggcggtgacgacggggaccattttaccatcaccacccaccctgagagcaaccagggcatcctgacaaccaggaagggtttggattttgaggccaaaaaccagcacaccctgtacgttgaagtgaccaacgaggccccttttgtgctgaagctcccaacctccacagccaccatagtggtccacgtggaggatgtgaatgaggcacctgtgtttgtcccaccctccaaagtcgttgaggtccaggagggcatccccactggggagcctgtgtgtgtctacactgcagaagaccctgacaaggagaatcaaaagatcagctaccgcatcctgagagacccagcagggtggctagccatggacccagacagtgggcaggtcacagctgtgggcaccctcgaccgtgaggatgagcagtttgtgaggaacaacatctatgaagtcatggtcttggccatggacaatggaagccctcccaccactggcacgggaacccttctgctaacactgattgatgtcaacgaccatggcccagtccctgagccccgtcagatcaccatctgcaaccaaagccctgtgcgccaggtgctgaacatcacggacaaggacctgtctccccacacctcccctttccaggcccagctcacagatgactcagacatctactggacggcagaggtcaacgaggaaggtgacacagtggtcttgtccctgaagaagttcctgaagcaggatacatatgacgtgcacctttctctgtctgaccatggcaacaaagagcagctgacggtgatcagggccactgtgtgcgactgccatggccatgtcgaaacctgccctggaccctggaagggaggtttcatcctccctgtgctgggggctgtcctggctctgctgttcctcctgctggtgctgcttttgttggtgagaaagaagcggaagatcaaggagcccctcctactcccagaagatgacacccgtgacaacgtcttctactatggcgaagaggggggtggcgaagaggaccaggactatgacatcacccagctccaccgaggtctggaggccaggccggaggtggttctccgcaatgacgtggcaccaaccatcatcccgacacccatgtaccgtcctcggccagccaacccagatgaaatcggcaactttataattgagaacctgaaggcggctaacacagaccccacagccccgccctacgacaccctcttggtgttcgactatgagggcagcggctccgacgccgcgtccctgagctccctcacctcctccgcctccgaccaagaccaagattacgattatctgaacgagtggggcctggcggcggtggggctgtgggcaagagagctgctatgcctcctggtgcaacttaatttttttttttaatgctatcttcaaaacgttagagaaagttcttcaaaagtgcagcccagagctgctgggcccactggccgtcctgcatttctggtttccagaccccaatgcctcccattcggatggatctctgcgtttttatactgagtgtgcctaggttgccccttattttttattttccctgttgcgttgctatagatgaagggtgaggacaatcgtgtatatgtactagaacttttttattaaagaaacttttcccagaggtgcctggggagtgaactgttttctaaatagaaa

SEQ ID NO: 68999 - DNA, 3555 bp, Homo sapiens
attgagactcaggaccgttttcatggccagagcccacttgtgtgcagcaagaggaaagcacttcgtgtctaacgtagtggaatgagagtaacgtagaagaacaacgaatcccaggtctggcgtttatctcctaggaagggtgtgggagagctgttttccaagggagactctctggaggctgctttgcgcagcaagcagtttttacccagattatatacagtatttcagaccaatttcaaaacctctgcgttttaaaaattgtctttatttacattttacagaaagttgagaaagtgttatttatatggggggtaggggtgctggagattatgagactaataacaaccctcttagctcgcaccctttggcaccactacagcttccaaactctgggactttctcgactagcttccctttgtttagctgtgaaatggaagaagcggtccgggtgtggcggctcatgcctgtaacctgagcactctgggaggcggaggatcgcttgagtccagaagttcaagaccagcttgggcaacatagggtgaccctccaccctccccccgccccaccacatcgctacaaaaaatttttaaaaattagccgggtgtggtggcgcaagcctgtagtctcagcgggagctgagggaggagaatcgcttcagcccgggaggtcgaggctgtagtgagccgagatcgcgctactgcactcctgggcgacagagcgagaccctgtctccaaaaaaaaaaaaaaaagaaaaaagaggaagttgtatccaattcagaaacgcggtccttcgggacctgctagttttataccccggaggatcctccccggcgggctggcacgggaggtggagaaagaggcttgggcggccccgctgtagccgcgtgtgggaggacgcacgggcctgcttcaaagctttgggataacagcgcctccgggggataatgaatgcggagcctccgttttcagtcgacttcagatgtgtctccacttttttccgctgtagccgcaaggcaaggaaacatttctcttcccgtactgaggaggctgaggagtgcactgggtgttcttttctcctctaacccagaactgcgagacagaggctgagtccctgtaaagaacagctccagaaaagccaggagagcgcaggagggcatccgggaggccaggaggggttcgctggggcctcaaccgcacccacatcggtcccacctgcgagggggcgggacctcgtggcgctggaccaatcagcacccacctgcgctcacctggcctcctcccgctggctcccgggggctgcggtgctcaaaggggcaagagctgagcggaacaccggcccgccgtcgcggcagctgcttcacccctctctctgcagccatggggctccctcgtggacctctcgcgtctctcctccttctccaggtttgctggctgcagtgcgcggcctccgagccgtgccgggcggtcttcagggaggctgaagtgaccttggaggcgggaggcgcggagcaggagcccggccaggcgctggggaaagtattcatgggctgccctgggcaagagccagctctgtttagcactgataatgatgacttcactgtgcggaatggcgagacagtccaggaaagaaggtcactgaaggaaaggaatccattgaagatcttcccatccaaacgtatcttacgaagacacaagagagattgggtggttgctccaatatctgtccctgaaaatggcaagggtcccttcccccagagactgaatcagctcaagtctaataaagatagagacaccaagattttctacagcatcacggggccgggggcagacagcccccctgagggtgtcttcgctgtagagaaggagacaggctggttgttgttgaataagccactggaccgggaggagattgccaagtatgagctctttggccacgctgtgtcagagaatggtgcctcagtggaggaccccatgaacatctccatcatcgtgaccgaccagaatgaccacaagcccaagtttacccaggacaccttccgagggagtgtcttagagggagtcctaccaggtacttctgtgatgcaggtgacagccacagatgaggatgatgccatctacacctacaatggggtggttgcttactccatccatagccaagaaccaaaggacccacacgacctcatgttcacaattcaccggagcacaggcaccatcagcgtcatctccagtggcctggaccgggaaaaagtccctgagtacacactgaccatccaggccacagacatggatggggacggctccaccaccacggcagtggcagtagtggagatccttgatgccaatgacaatgctcccatgtttgacccccagaagtacgaggcccatgtgcctgagaatgcagtgggccatgaggtgcagaggctgacggtcactgatctggacgcccccaactcaccagcgtggcgtgccacctaccttatcatgggcggtgacgacggggaccattttaccatcaccacccaccctgagagcaaccagggcatcctgacaaccaggaagggtttggattttgaggccaaaaaccagcacaccctgtacgttgaagtgaccaacgaggccccttttgtgctgaagctcccaacctccacagccaccatagtggtccacgtggaggatgtgaatgaggcacctgtgtttgtcccaccctccaaagtcgttgaggtccaggagggcatccccactggggagcctgtgtgtgtctacactgcagaagaccctgacaaggagaatcaaaagatcagctaccgcatcctgagagacccagcagggtggctagccatggacccagacagtgggcaggtcacagctgtgggcaccctcgaccgtgaggatgagcagtttgtgaggaacaacatctatgaagtcatggtcttggccatggacaatggaagccctcccaccactggcacgggaacccttctgctaacactgattgatgtcaacgaccatggcccagtccctgagccccgtcagatcaccatctgcaaccaaagccctgtgcgccaggtgctgaacatcacggacaaggacctgtctccccacacctcccctttccaggcccagctcacagatgactcagacatctactggacggcagaggtcaacgaggaaggtgacacagtggtcttgtccctgaagaagttcctgaagcaggatacatatgacgtgcacctttctctgtctgaccatggcaacaaagagcagctgacggtgatcagggccactgtgtgcgactgccatggccatgtcgaaacctgccctggaccctggaagggaggtttcatcctccctgtgctgggggctgtcctggctctgctgttcctcctgctggtgctgcttttgttggtgagaaagaagcggaagatcaaggagcccctcctactcccagaagatgacacccgtgacaacgtcttctactatggcgaagaggggggtggcgaagaggaccagacctagcgccataggatcctctagatcagcctcagcaacactccc

SEQ ID NO: 69000 - DNA, 3209 bp, Homo sapiens
attgagactcaggaccgttttcatggccagagcccacttgtgtgcagcaagaggaaagcacttcgtgtctaacgtagtggaatgagagtaacgtagaagaacaacgaatcccaggtctggcgtttatctcctaggaagggtgtgggagagctgttttccaagggagactctctggaggctgctttgcgcagcaagcagtttttacccagattatatacagtatttcagaccaatttcaaaacctctgcgttttaaaaattgtctttatttacattttacagaaagttgagaaagtgttatttatatggggggtaggggtgctggagattatgagactaataacaaccctcttagctcgcaccctttggcaccactacagcttccaaactctgggactttctcgactagcttccctttgtttagctgtgaaatggaagaagcggtccgggtgtggcggctcatgcctgtaacctgagcactctgggaggcggaggatcgcttgagtccagaagttcaagaccagcttgggcaacatagggtgaccctccaccctccccccgccccaccacatcgctacaaaaaatttttaaaaattagccgggtgtggtggcgcaagcctgtagtctcagcgggagctgagggaggagaatcgcttcagcccgggaggtcgaggctgtagtgagccgagatcgcgctactgcactcctgggcgacagagcgagaccctgtctccaaaaaaaaaaaaaaaagaaaaaagaggaagttgtatccaattcagaaacgcggtccttcgggacctgctagttttataccccggaggatcctccccggcgggctggcacgggaggtggagaaagaggcttgggcggccccgctgtagccgcgtgtgggaggacgcacgggcctgcttcaaagctttgggataacagcgcctccgggggataatgaatgcggagcctccgttttcagtcgacttcagatgtgtctccacttttttccgctgtagccgcaaggcaaggaaacatttctcttcccgtactgaggaggctgaggagtgcactgggtgttcttttctcctctaacccagaactgcgagacagaggctgagtccctgtaaagaacagctccagaaaagccaggagagcgcaggagggcatccgggaggccaggaggggttcgctggggcctcaaccgcacccacatcggtcccacctgcgagggggcgggacctcgtggcgctggaccaatcagcacccacctgcgctcacctggcctcctcccgctggctcccgggggctgcggtgctcaaaggggcaagagctgagcggaacaccggcccgccgtcgcggcagctgcttcacccctctctctgcagccatggggctccctcgtggacctctcgcgtctctcctccttctccaggtttgctggctgcagtgcgcggcctccgagccgtgccgggcggtcttcagggaggctgaagtgaccttggaggcgggaggcgcggagcaggagcccggccaggcgctggggaaagtattcatgggctgccctgggcaagagccagctctgtttagcactgataatgatgacttcactgtgcggaatggcgagacagtccaggaaagaaggtcactgaaggaaaggaatccattgaagatcttcccatccaaacgtatcttacgaagacacaagagagattgggtggttgctccaatatctgtccctgaaaatggcaagggtcccttcccccagagactgaatcagctcaagtctaataaagatagagacaccaagattttctacagcatcacggggccgggggcagacagcccccctgagggtgtcttcgctgtagagaaggagacaggctggttgttgttgaataagccactggaccgggaggagattgccaagtatgagctctttggccacgctgtgtcagagaatggtgcctcagtggaggaccccatgaacatctccatcatcgtgaccgaccagaatgaccacaagcccaagtttacccaggacaccttccgagggagtgtcttagagggagtcctaccaggtacttctgtgatgcaggtgacagccacagatgaggatgatgccatctacacctacaatggggtggttgcttactccatccatagccaagaaccaaaggacccacacgacctcatgttcacaattcaccggagcacaggcaccatcagcgtcatctccagtggcctggaccgggaaaaagtccctgagtacacactgaccatccaggccacagacatggatggggacggctccaccaccacggcagtggcagtagtggagatccttgatgccaatgacaatgctcccatgtttgacccccagaagtacgaggcccatgtgcctgagaatgcagtgggccatgaggtgcagaggctgacggtcactgatctggacgcccccaactcaccagcgtggcgtgccacctaccttatcatgggcggtgacgacggggaccattttaccatcaccacccaccctgagagcaaccagggcatcctgacaaccaggaagggtttggattttgaggccaaaaaccagcacaccctgtacgttgaagtgaccaacgaggccccttttgtgctgaagctcccaacctccacagccaccatagtggtccacgtggaggatgtgaatgaggcacctgtgtttgtcccaccctccaaagtcgttgaggtccaggagggcatccccactggggagcctgtgtgtgtctacactgcagaagaccctgacaaggagaatcaaaagatcagggttgcctcagaggccaagtttccagaagcctcttacctgccgtaaaatgctcaaccctgtgtcctgggcctgggcctgctgtgactgacctacagtggactttctctctggaatggaaccttcttaggcctcctggtgcaacttaatttttttttttaatgctatcttcaaaacgttagagaaagttcttcaaaagtgcagcccagagctgctgggcccactggccgtcctgcatttctggtttccagaccccaatgcctcccattcggatggatctctgcgtttttatactgagtgtgcctaggttgccccttattttttattttccctgttgcgttgctatagatgaagggtgaggacaatcgtgtatatgtactagaacttttttattaaagaaacttttccca

SEQ ID NO: 69001 - DNA, 3037 bp, Homo sapiens
attgagactcaggaccgttttcatggccagagcccacttgtgtgcagcaagaggaaagcacttcgtgtctaacgtagtggaatgagagtaacgtagaagaacaacgaatcccaggtctggcgtttatctcctaggaagggtgtgggagagctgttttccaagggagactctctggaggctgctttgcgcagcaagcagtttttacccagattatatacagtatttcagaccaatttcaaaacctctgcgttttaaaaattgtctttatttacattttacagaaagttgagaaagtgttatttatatggggggtaggggtgctggagattatgagactaataacaaccctcttagctcgcaccctttggcaccactacagcttccaaactctgggactttctcgactagcttccctttgtttagctgtgaaatggaagaagcggtccgggtgtggcggctcatgcctgtaacctgagcactctgggaggcggaggatcgcttgagtccagaagttcaagaccagcttgggcaacatagggtgaccctccaccctccccccgccccaccacatcgctacaaaaaatttttaaaaattagccgggtgtggtggcgcaagcctgtagtctcagcgggagctgagggaggagaatcgcttcagcccgggaggtcgaggctgtagtgagccgagatcgcgctactgcactcctgggcgacagagcgagaccctgtctccaaaaaaaaaaaaaaaagaaaaaagaggaagttgtatccaattcagaaacgcggtccttcgggacctgctagttttataccccggaggatcctccccggcgggctggcacgggaggtggagaaagaggcttgggcggccccgctgtagccgcgtgtgggaggacgcacgggcctgcttcaaagctttgggataacagcgcctccgggggataatgaatgcggagcctccgttttcagtcgacttcagatgtgtctccacttttttccgctgtagccgcaaggcaaggaaacatttctcttcccgtactgaggaggctgaggagtgcactgggtgttcttttctcctctaacccagaactgcgagacagaggctgagtccctgtaaagaacagctccagaaaagccaggagagcgcaggagggcatccgggaggccaggaggggttcgctggggcctcaaccgcacccacatcggtcccacctgcgagggggcgggacctcgtggcgctggaccaatcagcacccacctgcgctcacctggcctcctcccgctggctcccgggggctgcggtgctcaaaggggcaagagctgagcggaacaccggcccgccgtcgcggcagctgcttcacccctctctctgcagccatggggctccctcgtggacctctcgcgtctctcctccttctccaggtttgctggctgcagtgcgcggcctccgagccgtgccgggcggtcttcagggaggctgaagtgaccttggaggcgggaggcgcggagcaggagcccggccaggcgctggggaaagtattcatgggctgccctgggcaagagccagctctgtttagcactgataatgatgacttcactgtgcggaatggcgagacagtccaggaaagaaggtcactgaaggaaaggaatccattgaagatcttcccatccaaacgtatcttacgaagacacaagagagattgggtggttgctccaatatctgtccctgaaaatggcaagggtcccttcccccagagactgaatcagctcaagtctaataaagatagagacaccaagattttctacagcatcacggggccgggggcagacagcccccctgagggtgtcttcgctgtagagaaggagacaggctggttgttgttgaataagccactggaccgggaggagattgccaagtatgagctctttggccacgctgtgtcagagaatggtgcctcagtggaggaccccatgaacatctccatcatcgtgaccgaccagaatgaccacaagcccaagtttacccaggacaccttccgagggagtgtcttagagggagtcctaccaggtacttctgtgatgcaggtgacagccacagatgaggatgatgccatctacacctacaatggggtggttgcttactccatccatagccaagaaccaaaggacccacacgacctcatgttcacaattcaccggagcacaggcaccatcagcgtcatctccagtggcctggaccgggaaaaagtccctgagtacacactgaccatccaggccacagacatggatggggacggctccaccaccacggcagtggcagtagtggagatccttgatgccaatgacaatgctcccatgtttgacccccagaagtacgaggcccatgtgcctgagaatgcagtgggccatgaggtgcagaggctgacggtcactgatctggacgcccccaactcaccagcgtggcgtgccacctaccttatcatgggcggtgacgacggggaccattttaccatcaccacccaccctgagagcaaccagggcatcctgacaaccaggaagggtttggattttgaggccaaaaaccagcacaccctgtacgttgaagtgaccaacgaggccccttttgtgctgaagctcccaacctccacagccaccatagtggtccacgtggaggatgtgaatgaggcacctgtgtttgcctgggcctgctgtgactgacctacagtggactttctctctggaatggaaccttcttaggcctcctggtgcaacttaatttttttttttaatgctatcttcaaaacgttagagaaagttcttcaaaagtgcagcccagagctgctgggcccactggccgtcctgcatttctggtttccagaccccaatgcctcccattcggatggatctctgcgtttttatactgagtgtgcctaggttgccccttattttttattttccctgttgcgttgctatagatgaagggtgaggacaatcgtgtatatgtactagaacttttttattaaagaaacttttccca

SEQ ID NO: 69002 - DNA, 4504 bp, Homo sapiens
attgagactcaggaccgttttcatggccagagcccacttgtgtgcagcaagaggaaagcacttcgtgtctaacgtagtggaatgagagtaacgtagaagaacaacgaatcccaggtctggcgtttatctcctaggaagggtgtgggagagctgttttccaagggagactctctggaggctgctttgcgcagcaagcagtttttacccagattatatacagtatttcagaccaatttcaaaacctctgcgttttaaaaattgtctttatttacattttacagaaagttgagaaagtgttatttatatggggggtaggggtgctggagattatgagactaataacaaccctcttagctcgcaccctttggcaccactacagcttccaaactctgggactttctcgactagcttccctttgtttagctgtgaaatggaagaagcggtccgggtgtggcggctcatgcctgtaacctgagcactctgggaggcggaggatcgcttgagtccagaagttcaagaccagcttgggcaacatagggtgaccctccaccctccccccgccccaccacatcgctacaaaaaatttttaaaaattagccgggtgtggtggcgcaagcctgtagtctcagcgggagctgagggaggagaatcgcttcagcccgggaggtcgaggctgtagtgagccgagatcgcgctactgcactcctgggcgacagagcgagaccctgtctccaaaaaaaaaaaaaaaagaaaaaagaggaagttgtatccaattcagaaacgcggtccttcgggacctgctagttttataccccggaggatcctccccggcgggctggcacgggaggtggagaaagaggcttgggcggccccgctgtagccgcgtgtgggaggacgcacgggcctgcttcaaagctttgggataacagcgcctccgggggataatgaatgcggagcctccgttttcagtcgacttcagatgtgtctccacttttttccgctgtagccgcaaggcaaggaaacatttctcttcccgtactgaggaggctgaggagtgcactgggtgttcttttctcctctaacccagaactgcgagacagaggctgagtccctgtaaagaacagctccagaaaagccaggagagcgcaggagggcatccgggaggccaggaggggttcgctggggcctcaaccgcacccacatcggtcccacctgcgagggggcgggacctcgtggcgctggaccaatcagcacccacctgcgctcacctggcctcctcccgctggctcccgggggctgcggtgctcaaaggggcaagagctgagcggaacaccggcccgccgtcgcggcagctgcttcacccctctctctgcagccatggggctccctcgtggacctctcgcgtctctcctccttctccaggtttgctggctgcagtgcgcggcctccgagccgtgccgggcggtcttcagggaggctgaagtgaccttggaggcgggaggcgcggagcaggagcccggccaggcgctggggaaagtattcatgggctgccctgggcaagagccagctctgtttagcactgataatgatgacttcactgtgcggaatggcgagacagtccaggaaagaaggtcactgaaggaaaggaatccattgaagatcttcccatccaaacgtatcttacgaagacacaagagagattgggtggttgctccaatatctgtccctgaaaatggcaagggtcccttcccccagagactgaatcagctcaagtctaataaagatagagacaccaagattttctacagcatcacggggccgggggcagacagcccccctgagggtgtcttcgctgtagagaaggagacaggctggttgttgttgaataagccactggaccgggaggagattgccaagtatgagctctttggccacgctgtgtcagagaatggtgcctcagtggaggaccccatgaacatctccatcatcgtgaccgaccagaatgaccacaagcccaagtttacccaggacaccttccgagggagtgtcttagagggagtcctaccaggtacttctgtgatgcaggtgacagccacagatgaggatgatgccatctacacctacaatggggtggttgcttactccatccatagccaagaaccaaaggacccacacgacctcatgttcacaattcaccggagcacaggcaccatcagcgtcatctccagtggcctggaccgggaaaaagtccctgagtacacactgaccatccaggccacagacatggatggggacggctccaccaccacggcagtggcagtagtggagatccttgatgccaatgacaatgctcccatgtttgacccccagaagtacgaggcccatgtgcctgagaatgcagtgggccatgaggtgcagaggctgacggtcactgatctggacgcccccaactcaccagcgtggcgtgccacctaccttatcatgggcggtgacgacggggaccattttaccatcaccacccaccctgagagcaaccagggcatcctgacaaccaggaagggtttggattttgaggccaaaaaccagcacaccctgtacgttgaagtgaccaacgaggccccttttgtgctgaagctcccaacctccacagccaccatagtggtccacgtggaggatgtgaatgaggcacctgtgtttgtcccaccctccaaagtcgttgaggtccaggagggcatccccactggggagcctgtgtgtgtctacactgcagaagaccctgacaaggagaatcaaaagatcagctaccgcatcctgagagacccagcagggtggctagccatggacccagacagtgggcaggtcacagctgtgggcaccctcgaccgtgaggatgagcagtttgtgaggaacaacatctatgaagtcatggtcttggccatggacaatggaagccctcccaccactggcacgggaacccttctgctaacactgattgatgtcaacgaccatggcccagtccctgagccccgtcagatcaccatctgcaaccaaagccctgtgcgccaggtgctgaacatcacggacaaggacctgtctccccacacctcccctttccaggcccagctcacagatgactcagacatctactggacggcagaggtcaacgaggaaggtgacacagtggtcttgtccctgaagaagttcctgaagcaggatacatatgacgtgcacctttctctgtctgaccatggcaacaaagagcagctgacggtgatcagggccactgtgtgcgactgccatggccatgtcgaaacctgccctggaccctggaagggaggtttcatcctccctgtgctgggggctgtcctggctctgctgttcctcctgctggtgctgcttttgttggtgagaaagaagcggaagatcaaggagcccctcctactcccagaagatgacacccgtgacaacgtcttctactatggcgaagaggggggtggcgaagaggaccaggactatgacatcacccagctccaccgaggtctggaggccaggccggaggtggttctccgcaatgacgtggcaccaaccatcatcccgacacccatgtaccgtcctcggccagccaacccagatgaaatcggcaactttataattgagaacctgaaggcggctaacacagaccccacagccccgccctacgacaccctcttggtgttcgactatgagggcagcggctccgacgccgcgtccctgagctccctcacctcctccgcctccgaccaagaccaagattacgattatctgaacgagtggggcagccgcttcaagaagctggcagacatgtacggtggcggggaggacgactaggcggcctgcctgcagggctggggaccaaacgtcaggccacagagcatctccaaggggtctcagttcccccttcagctgaggacttcggagcttgtcaggaagtggccgtagcaacttggcggagacaggctatgagtctgacgttagagtggttgcttccttagcctttcaggatggaggaatgtgggcagtttgacttcagcactgaaaacctctccacctgggccagggttgcctcagaggccaagtttccagaagcctcttacctgccgtaaaatgctcaaccctgtgtcctgggcctgggcctgctgtgactgacctacagtggactttctctctggaatggaaccttcttaggcctcctggtgcaacttaatttttttttttaatgctatcttcaaaacgttagagaaagttcttcaaaagtgcagcccagagctgctgggcccactggccgtcctgcatttctggtttccagaccccaatgcctcccattcggatggatctctgcgtttttatactgagtgtgcctaggttgccccttattttttattttccctgttgcgttgctatagatgaagggtgaggacaatcgtgtatatgtactagaacttttttattaaagaaacttttccca

SEQ ID NO: 69003 - DNA, 4541 bp, Homo sapiens
attgagactcaggaccgttttcatggccagagcccacttgtgtgcagcaagaggaaagcacttcgtgtctaacgtagtggaatgagagtaacgtagaagaacaacgaatcccaggtctggcgtttatctcctaggaagggtgtgggagagctgttttccaagggagactctctggaggctgctttgcgcagcaagcagtttttacccagattatatacagtatttcagaccaatttcaaaacctctgcgttttaaaaattgtctttatttacattttacagaaagttgagaaagtgttatttatatggggggtaggggtgctggagattatgagactaataacaaccctcttagctcgcaccctttggcaccactacagcttccaaactctgggactttctcgactagcttccctttgtttagctgtgaaatggaagaagcggtccgggtgtggcggctcatgcctgtaacctgagcactctgggaggcggaggatcgcttgagtccagaagttcaagaccagcttgggcaacatagggtgaccctccaccctccccccgccccaccacatcgctacaaaaaatttttaaaaattagccgggtgtggtggcgcaagcctgtagtctcagcgggagctgagggaggagaatcgcttcagcccgggaggtcgaggctgtagtgagccgagatcgcgctactgcactcctgggcgacagagcgagaccctgtctccaaaaaaaaaaaaaaaagaaaaaagaggaagttgtatccaattcagaaacgcggtccttcgggacctgctagttttataccccggaggatcctccccggcgggctggcacgggaggtggagaaagaggcttgggcggccccgctgtagccgcgtgtgggaggacgcacgggcctgcttcaaagctttgggataacagcgcctccgggggataatgaatgcggagcctccgttttcagtcgacttcagatgtgtctccacttttttccgctgtagccgcaaggcaaggaaacatttctcttcccgtactgaggaggctgaggagtgcactgggtgttcttttctcctctaacccagaactgcgagacagaggctgagtccctgtaaagaacagctccagaaaagccaggagagcgcaggagggcatccgggaggccaggaggggttcgctggggcctcaaccgcacccacatcggtcccacctgcgagggggcgggacctcgtggcgctggaccaatcagcacccacctgcgctcacctggcctcctcccgctggctcccgggggctgcggtgctcaaaggggcaagagctgagcggaacaccggcccgccgtcgcggcagctgcttcacccctctctctgcagccatggggctccctcgtggacctctcgcgtctctcctccttctccaggtttgctggctgcagtgcgcggcctccgagccgtgccgggcggtcttcagggaggctgaagtgaccttggaggcgggaggcgcggagcaggagcccggccaggcgctggggaaagtattcatgggctgccctgggcaagagccagctctgtttagcactgataatgatgacttcactgtgcggaatggcgagacagtccaggaaagaaggtcactgaaggaaaggaatccattgaagatcttcccatccaaacgtatcttacgaagacacaagagagattgggtggttgctccaatatctgtccctgaaaatggcaagggtcccttcccccagagactgaatcagctcaagtctaataaagatagagacaccaagattttctacagcatcacggggccgggggcagacagcccccctgagggtgtcttcgctgtagagaaggagacaggctggttgttgttgaataagccactggaccgggaggagattgccaagtatgagctctttggccacgctgtgtcagagaatggtgcctcagtggaggaccccatgaacatctccatcatcgtgaccgaccagaatgaccacaagcccaagtttacccaggacaccttccgagggagtgtcttagagggagtcctaccaggtacttctgtgatgcaggtgacagccacagatgaggatgatgccatctacacctacaatggggtggttgcttactccatccatagccaagaaccaaaggacccacacgacctcatgttcacaattcaccggagcacaggcaccatcagcgtcatctccagtggcctggaccgggaaaaagtccctgagtacacactgaccatccaggccacagacatggatggggacggctccaccaccacggcagtggcagtagtggagatccttgatgccaatgacaatgctcccatgtttgacccccagaagtacgaggcccatgtgcctgagaatgcagtgggccatgaggtgcagaggctgacggtcactgatctggacgcccccaactcaccagcgtggcgtgccacctaccttatcatgggcggtgacgacggggaccattttaccatcaccacccaccctgagagcaaccagggcatcctgacaaccaggaagggtttggattttgaggccaaaaaccagcacaccctgtacgttgaagtgaccaacgaggccccttttgtgctgaagctcccaacctccacagccaccatagtggtccacgtggaggatgtgaatgaggcacctgtgtttgtcccaccctccaaagtcgttgaggtccaggagggcatccccactggggagcctgtgtgtgtctacactgcagaagaccctgacaaggagaatcaaaagatcagctaccgcatcctgagagacccagcagggtggctagccatggacccagacagtgggcaggtcacagctgtgggcaccctcgaccgtgaggatgagcagtttgtgaggaacaacatctatgaagtcatggtcttggccatggacaatggaagccctcccaccactggcacgggaacccttctgctaacactgattgatgtcaacgaccatggcccagtccctgagccccgtcagatcaccatctgcaaccaaagccctgtgcgccaggtgctgaacatcacggacaaggacctgtctccccacacctcccctttccaggcccagctcacagatgactcagacatctactggacggcagaggtcaacgaggaaggtgacacagtggtcttgtccctgaagaagttcctgaagcaggatacatatgacgtgcacctttctctgtctgaccatggcaacaaagagcagctgacggtgatcagggccactgtgtgcgactgccatggccatgtcgaaacctgccctggaccctggaagggaggtttcatcctccctgtgctgggggctgtcctggctctgctgttcctcctgctggtgctgcttttgttggtgagaaagaagcggaagatcaaggagcccctcctactcccagaagatgacacccgtgacaacgtcttctactatggcgaagaggggggtggcgaagaggaccaggactatgacatcacccagctccaccgaggtctggaggccaggccggaggtggttctccgcaatgacgtggcaccaaccatcatcccgacacccatgtaccgtcctcggccagccaacccagatgaaatcggcaactttataattgagaacctgaaggcggctaacacagaccccacagccccgccctacgacaccctcttggtgttcgactatgagggcagcggctccgacgccgcgtccctgagctccctcacctcctccgcctccgaccaagaccaagattacgattatctgaacgagtggggcagccgcttcaagaagctggcagacatgtacggtggcggggaggacgactaggcggcctgcctgcagggctggggaccaaacgtcaggccacagagcatctccaaggggtctcagttcccccttcagctgaggacttcggagcttgtcaggaagtggccgtagcaacttggcggagacaggctatgagtctgacgttagagtggttgcttccttagcctttcaggatggaggaatgtgggcagtttgacttcagcactgaaaacctctccacctgggccagggttgcctcagaggccaagtttccagaagcctcttacctgccgtaaaatgctcaaccctgtgtcctgggcctgggcctgctgtgactgacctacagtggactttctctctggaatggaaccttcttaggcctcctggtgcaacttaatttttttttttaatgctatcttcaaaacgttagagaaagttcttcaaaagtgcagcccagagctgctgggcccactggccgtcctgcatttctggtttccagaccccaatgcctcccattcggatggatctctgcgtttttatactgagtgtgcctaggttgccccttattttttattttccctgttgcgttgctatagatgaagggtgaggacaatcgtgtatatgtactagaacttttttattaaagaaacttttcccagaggtgcctggggagtgaactgttttctaaatagaaa

SEQ ID NO: 69004 - DNA, 1541 bp, Homo sapiens
  misc_feature (650)..(650): n is a, c, g, or t
taggacagtgccagcacagtggttcccgaccctgcctgcgtgttggaatcacctgggcaccttcagaaaccactgatgcctcagctcacctccaaagattgtgatataattgaactgggtgtggcctgggcttcagaatttataaaagattctccagataatttaagtttcggaactactgacctagcatgtagcgcttattagataatgatagctattgttgcgaggtgctattctaataactgctttacaggtatttactcatttactcattcatctgttcctttaaaactatacggaggcacatgtcctcagtacctcccgaggctgtgtcacaggcatgcatcctttaaaaaaggaagaaaaaaactattgtcattttacagacaaggaaacaggcatagagcggttaagggactcgcccaaggccacaaagctagtgtgtggtgtgagttctggcccgggctgtctgatttcagtccttgcccttaccccctggcctgtgttgcactgagcacttgctgtctgctggtccctgagtgaatgaattctgcatgaataacgcattctttcatttctacctccaaaacctttaggggaggggagagaggggctcacagagaggaaatggaggcttgcagctggcaagnggcaggacccgccgctcctaactacctgttctctgttgccgcagaacctgaaggcggctaacacagaccccacagccccgccctacgacaccctcttggtgttcgactatgagggcagcggctccgacgccgcgtccctgagctccctcacctcctccgcctccgaccaagaccaagattacgattatctgaacgagtggggcagccgcttcaagaagctggcagacatgtacggtggcggggaggacgactaggcggcctgcctgcagggctggggaccaaacgtcaggccacagagcatctccaaggggtctcagttcccccttcagctgaggacttcggagcttgtcaggaagtggccgtagcaacttggcggagacaggctatgagtctgacgttagagtggttgcttccttagcctttcaggatggaggaatgtgggcagtttgacttcagcactgaaaacctctccacctgggccagggttgcctcagaggccaagtttccagaagcctcttacctgccgtaaaatgctcaaccctgtgtcctgggcctgggcctgctgtgactgacctacagtggactttctctctggaatggaaccttcttaggcctcctggtgcaacttaatttttttttttaatgctatcttcaaaacgttagagaaagttcttcaaaagtgcagcccagagctgctgggcccactggccgtcctgcatttctggtttccagaccccaatgcctcccattcggatggatctctgcgtttttatactgagtgtgcctaggttgccccttattttttattttccctgttgcgttgctatagatgaagggtgaggacaatcgtgtatatgtactagaacttttttattaaagaaacttttccca

SEQ ID NO: 69005 - DNA, 4814 bp, Homo sapiens
attgagactcaggaccgttttcatggccagagcccacttgtgtgcagcaagaggaaagcacttcgtgtctaacgtagtggaatgagagtaacgtagaagaacaacgaatcccaggtctggcgtttatctcctaggaagggtgtgggagagctgttttccaagggagactctctggaggctgctttgcgcagcaagcagtttttacccagattatatacagtatttcagaccaatttcaaaacctctgcgttttaaaaattgtctttatttacattttacagaaagttgagaaagtgttatttatatggggggtaggggtgctggagattatgagactaataacaaccctcttagctcgcaccctttggcaccactacagcttccaaactctgggactttctcgactagcttccctttgtttagctgtgaaatggaagaagcggtccgggtgtggcggctcatgcctgtaacctgagcactctgggaggcggaggatcgcttgagtccagaagttcaagaccagcttgggcaacatagggtgaccctccaccctccccccgccccaccacatcgctacaaaaaatttttaaaaattagccgggtgtggtggcgcaagcctgtagtctcagcgggagctgagggaggagaatcgcttcagcccgggaggtcgaggctgtagtgagccgagatcgcgctactgcactcctgggcgacagagcgagaccctgtctccaaaaaaaaaaaaaaaagaaaaaagaggaagttgtatccaattcagaaacgcggtccttcgggacctgctagttttataccccggaggatcctccccggcgggctggcacgggaggtggagaaagaggcttgggcggccccgctgtagccgcgtgtgggaggacgcacgggcctgcttcaaagctttgggataacagcgcctccgggggataatgaatgcggagcctccgttttcagtcgacttcagatgtgtctccacttttttccgctgtagccgcaaggcaaggaaacatttctcttcccgtactgaggaggctgaggagtgcactgggtgttcttttctcctctaacccagaactgcgagacagaggctgagtccctgtaaagaacagctccagaaaagccaggagagcgcaggagggcatccgggaggccaggaggggttcgctggggcctcaaccgcacccacatcggtcccacctgcgagggggcgggacctcgtggcgctggaccaatcagcacccacctgcgctcacctggcctcctcccgctggctcccgggggctgcggtgctcaaaggggcaagagctgagcggaacaccggcccgccgtcgcggcagctgcttcacccctctctctgcagccatggggctccctcgtggacctctcgcgtctctcctccttctccaggtttgctggctgcagtgcgcggcctccgagccgtgccgggcggtcttcagggaggctgaagtgaccttggaggcgggaggcgcggagcaggagcccggccaggcgctggggaaagtattcatgggctgccctgggcaagagccagctctgtttagcactgataatgatgacttcactgtgcggaatggcgagacagtccaggaaagaaggtcactgaaggaaaggaatccattgaagatcttcccatccaaacgtatcttacgaagacacaagagagattgggtggttgctccaatatctgtccctgaaaatggcaagggtcccttcccccagagactgaatcagctcaagtctaataaagatagagacaccaagattttctacagcatcacggggccgggggcagacagcccccctgagggtgtcttcgctgtagagaaggagacaggctggttgttgttgaataagccactggaccgggaggagattgccaagtatgagctctttggccacgctgtgtcagagaatggtgcctcagtggaggaccccatgaacatctccatcatcgtgaccgaccagaatgaccacaagcccaagtttacccaggacaccttccgagggagtgtcttagagggagtcctaccaggtacttctgtgatgcaggtgacagccacagatgaggatgatgccatctacacctacaatggggtggttgcttactccatccatagccaagaaccaaaggacccacacgacctcatgttcacaattcaccggagcacaggcaccatcagcgtcatctccagtggcctggaccgggaaaaagtccctgagtacacactgaccatccaggccacagacatggatggggacggctccaccaccacggcagtggcagtagtggagatccttgatgccaatgacaatgctcccatgtttgacccccagaagtacgaggcccatgtgcctgagaatgcagtgggccatgaggtgcagaggctgacggtcactgatctggacgcccccaactcaccagcgtggcgtgccacctaccttatcatgggcggtgacgacggggaccattttaccatcaccacccaccctgagagcaaccagggcatcctgacaaccaggaagggtttggattttgaggccaaaaaccagcacaccctgtacgttgaagtgaccaacgaggccccttttgtgctgaagctcccaacctccacagccaccatagtggtccacgtggaggatgtgaatgaggcacctgtgtttgtcccaccctccaaagtcgttgaggtccaggagggcatccccactggggagcctgtgtgtgtctacactgcagaagaccctgacaaggagaatcaaaagatcagctaccgcatcctgagagacccagcagggtggctagccatggacccagacagtgggcaggtcacagctgtgggcaccctcgaccgtgaggatgagcagtttgtgaggaacaacatctatgaagtcatggtcttggccatggacaatggaagccctcccaccactggcacgggaacccttctgctaacactgattgatgtcaacgaccatggcccagtccctgagccccgtcagatcaccatctgcaaccaaagccctgtgcgccaggtgctgaacatcacggacaaggacctgtctccccacacctcccctttccaggcccagctcacagatgactcagacatctactggacggcagaggtcaacgaggaaggtgacacagtggtcttgtccctgaagaagttcctgaagcaggatacatatgacgtgcacctttctctgtctgaccatggcaacaaagagcagctgacggtgatcagggccactgtgtgcgactgccatggccatgtcgaaacctgccctggaccctggaagggaggtttcatcctccctgtgctgggggctgtcctggctctgctgttcctcctgctggtgctgcttttgttggtgagaaagaagcggaagatcaaggagcccctcctactcccagaagatgacacccgtgacaacgtcttctactatggcgaagaggggggtggcgaagaggaccaggactatgacatcacccagctccaccgaggtctggaggccaggccggaggtggttctccgcaatgacgtggcaccaaccatcatcccgacacccatgtaccgtcctcggccagccaacccagatgaaatcggcaactttataattgaggttttattgctctgcaggtctccaccctggcaggaagctcttgccaccggctacagtctggatccagcctggccagttccacctttcccacctacaacacctggcaagaccaagacacagcctttccacaaatacatgagtccatgagcacgtggggtggacaagccatccaatcagtcctcactgactctgagctgggacacctgccttctgcccttaaacatcagaactccagggtctctcgccttttgactctgggatttgtaccagcagccccccagtgttctcaggccttcagcctgggactgaaagtcttggattgggcaatgctaccagcttcctggttctccagcttgtagatggcttatcctaggacttctcagcctccataatcccatgagtcaatttccctaataagtcccctctcatctctctctgtatatatcctattgttctgttcttgggagaaccctgactaatacactgtgtaacatcaggccaatccctttacttctctgtgagtctctgcttccaaatctgtaaaatggtcacgcctgtagacctagcactttgggaggccgagacgagtggatcacttgaggccaggggttcacaactagcctaggcaacataatgagtcctcatctctaataaaaaacaaacagggctcggtgcggtggctcatgcctgtaatcccagcactttcagaagccaaggtgggtagatcacctgaggtcaggagttctagaccagcctggccaacatggtgaaaccccatctgtactaaaaataaaaaaattagccaggcgtggtagtgcatgcctgtaatcccagctactcaggagactgagacaggagaatcgcttgaaatcggaaggcggaggttgcaatgagccgagatcacgccactgcactccagcctgggagaaagagcaaaactccatctccaaaaacaacaacaacaaaaccccaaaatctgtacaatgtatgtatgtattatagcaaacggctgtatgaagactggtgagacaatgcgtactatagtgcactccaataaatagtagctatcacttttatcatacattataatgcaattattggcatccagcacaaagcctgatacataattggctttcaataaataataaataaaacga

SEQ ID NO: 69006 - DNA, 3319 bp, Homo sapiens
attgagactcaggaccgttttcatggccagagcccacttgtgtgcagcaagaggaaagcacttcgtgtctaacgtagtggaatgagagtaacgtagaagaacaacgaatcccaggtctggcgtttatctcctaggaagggtgtgggagagctgttttccaagggagactctctggaggctgctttgcgcagcaagcagtttttacccagattatatacagtatttcagaccaatttcaaaacctctgcgttttaaaaattgtctttatttacattttacagaaagttgagaaagtgttatttatatggggggtaggggtgctggagattatgagactaataacaaccctcttagctcgcaccctttggcaccactacagcttccaaactctgggactttctcgactagcttccctttgtttagctgtgaaatggaagaagcggtccgggtgtggcggctcatgcctgtaacctgagcactctgggaggcggaggatcgcttgagtccagaagttcaagaccagcttgggcaacatagggtgaccctccaccctccccccgccccaccacatcgctacaaaaaatttttaaaaattagccgggtgtggtggcgcaagcctgtagtctcagcgggagctgagggaggagaatcgcttcagcccgggaggtcgaggctgtagtgagccgagatcgcgctactgcactcctgggcgacagagcgagaccctgtctccaaaaaaaaaaaaaaaagaaaaaagaggaagttgtatccaattcagaaacgcggtccttcgggacctgctagttttataccccggaggatcctccccggcgggctggcacgggaggtggagaaagaggcttgggcggccccgctgtagccgcgtgtgggaggacgcacgggcctgcttcaaagctttgggataacagcgcctccgggggataatgaatgcggagcctccgttttcagtcgacttcagatgtgtctccacttttttccgctgtagccgcaaggcaaggaaacatttctcttcccgtactgaggaggctgaggagtgcactgggtgttcttttctcctctaacccagaactgcgagacagaggctgagtccctgtaaagaacagctccagaaaagccaggagagcgcaggagggcatccgggaggccaggaggggttcgctggggcctcaaccgcacccacatcggtcccacctgcgagggggcgggacctcgtggcgctggaccaatcagcacccacctgcgctcacctggcctcctcccgctggctcccgggggctgcggtgctcaaaggggcaagagctgagcggaacaccggcccgccgtcgcggcagctgcttcacccctctctctgcagccatggggctccctcgtggacctctcgcgtctctcctccttctccaggtttgctggctgcagtgcgcggcctccgagccgtgccgggcggtcttcagggaggctgaagtgaccttggaggcgggaggcgcggagcaggagcccggccaggcgctggggaaagtattcatgggctgccctgggcaagagccagctctgtttagcactgataatgatgacttcactgtgcggaatggcgagacagtccaggaaagaaggtcactgaaggaaaggaatccattgaagatcttcccatccaaacgtatcttacgaagacacaagagagattgggtggttgctccaatatctgtccctgaaaatggcaagggtcccttcccccagagactgaatcagctcaagtctaataaagatagagacaccaagattttctacagcatcacggggccgggggcagacagcccccctgagggtgtcttcgctgtagagaaggagacaggctggttgttgttgaataagccactggaccgggaggagattgccaagtatgagctctttggccacgctgtgtcagagaatggtgcctcagtggaggaccccatgaacatctccatcatcgtgaccgaccagaatgaccacaagcccaagtttacccaggacaccttccgagggagtgtcttagagggagtcctaccaggtacttctgtgatgcaggtgacagccacagatgaggatgatgccatctacacctacaatggggtggttgcttactccatccatagccaagaaccaaaggacccacacgacctcatgttcacaattcaccggagcacaggcaccatcagcgtcatctccagtggcctggaccgggaaaaagtccctgagtacacactgaccatccaggccacagacatggatggggacggctccaccaccacggcagtggcagtagtggagatccttgatgccaatgacaatgctcccatgtttgacccccagaagtacgaggcccatgtgcctgagaatgcagtgggccatgaggtgcagaggctgacggtcactgatctggacgcccccaactcaccagcgtggcgtgccacctaccttatcatgggcggtgacgacggggaccattttaccatcaccacccaccctgagagcaaccagggcatcctgacaaccaggaagggtttggattttgaggccaaaaaccagcacaccctgtacgttgaagtgaccaacgaggccccttttgtgctgaagctcccaacctccacagccaccatagtggtccacgtggaggatgtgaatgaggcacctgtgtttgtcccaccctccaaagtcgttgaggtccaggagggcatccccactggggagcctgtgtgtgtctacactgcagaagaccctgacaaggagaatcaaaagatcagctaccgcatcctgagagacccagcagggtggctagccatggacccagacagtgggcaggtcacagctgtgggcaccctcgaccgtgaggatgagcagtttgtgaggaacaacatctatgaagtcatggtcttggccatggacaatggaagccctcccaccactggcacgggaacccttgcctgggcctgctgtgactgacctacagtggactttctctctggaatggaaccttcttaggcctcctggtgcaacttaatttttttttttaatgctatcttcaaaacgttagagaaagttcttcaaaagtgcagcccagagctgctgggcccactggccgtcctgcatttctggtttccagaccccaatgcctcccattcggatggatctctgcgtttttatactgagtgtgcctaggttgccccttattttttattttccctgttgcgttgctatagatgaagggtgaggacaatcgtgtatatgtactagaacttttttattaaagaaacttttccca

SEQ ID NO: 69007 - DNA, 1957 bp, Homo sapiens
  misc_feature (974)..(974): n is a, c, g, or t
  misc_feature (1342)..(1342): n is a, c, g, or t
  misc_feature (1604)..(1604): n is a, c, g, or t
accaagttgcttaacttcgttgagcctctttaggggatgatccatgccctaagctgcctgactgcccaaaagcagaacaatgatgagcaatcatttagacgagataagcacctggagctccaggcattgcctaataaccctgaattattcaatccttcatttcacagacattgattgactgggatttaaaacaatttaaaaatgaatgtgacactggccctgccctcaaagagcttaagagccatctaggtacacaggacatgcccatgcacagctgcaaaataaggcagggtgtgtataatgtatgctgggggtggaagaaccagggaaagttgtcttggcagaggtggcatggcagaaataagcagggaggctactccaactggaggagatggctggagcagggtttgctcctgagtgacgagtagatgaggttggctggagcagatctttggaaggacctgggaagggtttgggggcgggggtggactacagagttggagctaggtggtaaggggccttaaatgtcaggctaagtagccaagatttaatttagcaagtagcgggaagtcatgaagatgtttgagtcagagattcaggtcagtaacctgaccaggactgggctttaggaagaaagtcctctagcatcataagggacagattggtgggggagggtggatttgaggtaggaagaccagttgggagtgatgtaattaagtgaacaagatctaggactaggattcccaaactttgagcataagattcccctgaagtgcccaactttggagatcaattgagaggtcttgcatttgccccctaggaaatggcttttttttttttttttttttttttgagatggattctcactctgttgcccaggctggagtccagtggcatgatctcagctcaccgcaacctctgcttcccaggttcaagtgattcttctgcctcagcctcccaagtagctgggattnctggtgcccaccaccacgcccggctaatttttgtatttttagtagggacggggttttgtcatgttggccaggcttggtcttgaactcctggcctcaagtgatctgcctgccacagcctcttaaagtgctgggattacaggtgtaagccactgcgcccggccaggaagctacattttgataggcaccccaggtgattctgaggcaagtgattgaggaacattgccctacggcaacttgaggtggcgggtggagagcaggatgtgtcggacacctgtggaaatagatttagtagccttggtgttggatccatgccctaagctgcctaagccctaagctgacatggatgtgtccagagtggctgggagaangtggggcggataactgggttgggccatcacaaggagatactggtgggtgggttggtgggagggcaaagtgtgaaaccagtaagctcaaacgcttagaaagagccctgtggggagaaagtactcttgcctgtccagatcttgacagcagagtagaaactggccaggcagcagtcccaatatcaggaggaaccccaaggcttccctgcagagacctccagccccttccttcccctcctgctggccctggggcagaggagcaganggagcagtttttcctgggcagtgtttctgggatgcggtggtggttactcttctgccgatcccacagccttgaaagagccccgtggtggcgggactgaaggtagcaaagctggcgatgtttcaagtgctcaggggagggaagcagagcagggagggaggccccggggagatagaaggctgggattgttcccacagtaaccatctgcgtggccttggggtgggcagggtggggttcagactgaagtcagggacagagcagcaggcatcttggatgtcagagccatgtttttcaggccgggacctgagcaaaccaaaggaaccctcctaattcttcccttttgatggtctcagtcc

SEQ ID NO: 69008 - DNA, 254 bp, Homo sapiens
atcgtgccactgcactgcagcctgggcgacagaggaagactccatctcaaaaacagaaaaaaaaaaaaagtgcagctctctaattgggctcttttacttactatttatataataaaagccacgttcctaggctgtataatggggttaatcatagtaagtaccttgtaaagttacagtgataaccaaataagtgaacataagtaaagcattttacatgtgtgcagcttaataagttggagttgtgactattattt

SEQ ID NO: 69009 - DNA, 560 bp, Homo sapiens
tattatttatcagctaagtacttgataatgattcctgctgtttggtgggactctcaagggaagtaaaaatggtcccaggccaactataataaaactaaggtaaattatattcaaactaaaacttccgacaacactgtgcaaacgggaaatgtcttggtctaaaattcacttatgacggagaatcgctaaggtatgaaatgtttaacaaaatacaagaaatcttattcctgtgaactttctctgctcatctttacatggtaaagtggcctggaaaatttgtttaaatgacctctctaattcagacctcatgtcaccttcatctctattcccaggacccactgagagttatcattgtttaccccaccttgttttttctttgacaacataagcaacaaaagcatttttataaataggtgaagtggctgggaaggagtctacctatatgctgttgtgatgtcgcagactataaaccatcaaacataggcagaataattgtttggtatactggaaggaggataataaaagcacttccactacgaaagaaaattaaatgtgagatg

SEQ ID NO: 69010 - DNA, 384 bp, Homo sapiens
atgaatcattaaatatatcattttaattataaaatttaattatgatgtgaactgttcatatgtagttataaagtcgtctttgtaacttatttatagttgtttagtcataaagcaaaatagtaagattttatgttggggagcagtcaaaatgaagcactttagaatgatgagtggtttttttttttaaggaattccatattctactttgagaactctacctctgattttcatttgatttattttttgaatactcgaagatcccagtgctttcaaccctgagaactgaaatgtgtgatgcatggaatatatctcgagacaataaaatgaaagagttttttacaagggggtttgtggagaaaatatttttgatttgtaaatgctgtg

SEQ ID NO: 69011 - DNA, 214 bp, Homo sapiens
taaaccctttttttcagagtcctcgtatgagtaaaattatgagatcatgaagtatttgtctttctgtgtatgacatttcacttaacatgatatcctcttggtccacccatgttgttgcaaatagcagaattttttttttttttgagatggagtcttgctctgttgcccaggctggagtgcaatggtacgatcttggctcactgcaacctctgcc

SEQ ID NO: 69012 - DNA, 468 bp, Homo sapiens
agccagttaaaggttgggagaggctgagagggctgccctgggactatcacattcccctttgtgaagaaatttaaacagaagctagataaaggcttaaggaggatgttgtggagacttgtagattcgggatagggttggcataggtggctgtgaagtccctccatcctgagattctgtgaaagactttcttcaggccttgcttagaattgctaccagttagtatttagggcaaggattagaacccaggaagagatgttaattatctctttacctctcttagtttttctaacagccttgaatacattcaatatattcccactgcctttcaaatgttcctagtgtgtttgaaaagcatgtgtattatccattgttggcaatctatattttatatgtgatcatttgataaaacttgataaatgtgttgttcaaattttaatttcttgcctgttcaatctgtcaattgtttta

SEQ ID NO: 69013 - DNA, 1127 bp, Homo sapiens
ccggtcaggaaacttccaccttcctccgatttacgtgggctgcatgagcctacttctcttcttattctagtgccagtggcctctggagtcttggtccttcttactggaagtagccctcctctcctgttacagaggcaataattctccagccttccggtcgccgccaaagcctcctgcctaatcacttcctgtattgtctccctgcggctctttgcacagaccttgggctctgtcgtctctggattcttactgatctcttcctcttctcccaaccgccttgtcatgtctctttgagctatgtcaggaggaacggaagggcactttcttactacttttgttagccaaacggacaaactgtcccctcccctttgttgtaaccacacattcaaggcttccttcagtccagccccatctcccttttcgttgcctccctttcactactccaaatgagcttgccatactttaaacgggtcttgtactttcttatcccttctctggaatgtcatttctactgaagaaaatcctactcttccctcaagacccttctttaatcccctcttgccatggaaacttgagattttcattgaggagctaagttggaaaatataaactagagctgagtctctaccctggcactattgacatttggggccagattattcttggttggggagactgttctgtgcactgtaggatgtggagcagcctcccaggcctctacctgccaaaagcacactcccctttccccaagtggtgacaaccaactgtttccagacattgccagatgtcctgaggtgggagtgagggtgaacagaattgcctcccagctgggggctgctggactaatcaacaagaagtggcaaggactgcaggcaaattgcctcagcacttagatttagcactgcaaggccacttcgacaggtggtagtgatttgtgcgtctcatttcctattcttgattgtgacaaggttctggaggatggagacagctacccctgccacagttcccacaggctatgttgtacatagggcttcatatttaacatgtgagtgaatgaaacacatgagcccgagtgctcttcaggacggcaaggcctacatcaagatggtaaaccttcagttcttaaa

SEQ ID NO: 69014 - DNA, 206 bp, Homo sapiens
ggcccctgtggttcccacagggccatgtgtggtctccagggctgagatggctggtgtgggccgccctgacctggtgggtttgggggaacctggccccataggagagtggacagcgccgcggaggaggctgcctacctgccttcctggcccttcctgctctggctggctcagcaggttgagcgcaggtggtggctgtggccctgcca

SEQ ID NO: 69015 - DNA, 986 bp, Homo sapiens
gcttcttctaaatattatctacatttccgaaccaggtccactgaagtcagggggacaaaatgccaaagggtgggacagaagaagggcttaacagttttgagccaagctggaaaaactccaggaggttacaaattggggctctgtgtgacccagggctgtgtgaccctgggcaagcttcttaacctctctgagcctccatgaacctgtctggaaaacgggaatgtctgtcccgtctctatttcctccttggactgtggccagcgtgtaatgtacttagcagcagcggaataaagctccctagtttgatattgttattaatatttccatcttgagcggggagctatgagggaaggcaagggaggtcaacatgtcccaaaagtcctaccagtgcatgggaagggggtgcttcctgagttgtcttcccattttctcatgacccagggcaggtcagagttgacaataccccccacacccaccccaggtgctgggagaggttaaaagcacagagagcttatcatgaatctcaggccttgatgccttggatgtttctagtttccctttcaagtgccctccgtaaagaggtgtaagagaaaggcacccctagatctgtattatactatggggtgggtaggtaggtgtgtgtgtgggggggggggggtgacaaaaggggacgatggtcaggacatgggcctgggcacagactgcagcccaccaggatggggacaccagagagctaggacctgtcacctgggcctccccgggagagctgacaccgcggcctctgaccccacctcccgggaagttcagctgctcagaaccacaaagcaaaacaaaggggcgcggagaggaagaagccgcagtgcctcccaatcaccgccggcgcccgagcccgagcctagctctcccgcggctccttgcccggtcctcccggctggccgcgcaccaaggcccaagcagcccctggtccctcgtctccccgcggccgc

SEQ ID NO: 69016 - DNA, 776 bp, Homo sapiens
tttaaaatagaatatttctgttcagaatatctaattcaacgttatgaaatcaatattttggagttttacttcattcattcagttggtaaatgcttgaccctgacctactgccagattctttgctgagtgctgtggaaacagtgatgtgtaagatactaatggaacttagagaatgttgtgggagacaataatcagataaatattaagatatataagttctaaaagattttaaaaagtactttgaagaagccaactatgatgaaatctgcaggtagacctaatttcaataggtgcaggataatataagctgaagccaaaaagttggaaaagaatattccggcagagcttaggtctgtacttcctgtgtctgggaaatgtccagtgaacaaagaaacaaatgaagcccagtgtggcagaaacttcatgaaagaggggtagaagcaagaggtaaggttgaagaagagggccggagcacggtgtgcagggccttctggcatatgttagagaactagtattttacgttgagtgcaaagagaaatgattaaagacttttaaacaggggggagaggttatttctgaaggactattttataaaaataggcaaaaatggaaattttataaggatgcaataaatggaaaaatttcaaaattctgtcaatactggcctgtctgttgtggcagtgaaggccttggccatagtgaattaataaattaaactaatttgggatatattttggagataggttgataaaacttgatgatgaattaaatgtgtg

SEQ ID NO: 69017 - DNA, 506 bp, Homo sapiens
taaacggagtcttactctgttgcccaggctggaatgcagtggcacgatcttggctcactacaacctccaactcctgggttcaagtgattctcatgcctcagcctcccaagtagctgggattataggtgtgcgccatcatgcctggctaatttttgtatttttagtagacacagggtttcaccatgttggccaggctagcctcgaactcctgacctcaggtgatctgcctgcctcggcctcccaaagtgctgggatcataggcgtgagtgacggtgcctggccctaaatctgaatttaaatgaccataaactggtagtcatcctcaacgaagcaaccaccatgtgcaaagcactataaaagctcctatagggagttaaaaaaagaggcaataacaaacataatcctacaagcaacccataatctacaccatgcctggccaccagctccagaaagccataaaccagcttccccatagaataatcttagccaagcttttgtcattccca

SEQ ID NO: 69018 - DNA, 782 bp, Homo sapiens
  misc_feature (432)..(432): n is a, c, g, or t
cgacagggtctcgctctgtcactagggctagtctcgacctcctagcctcaagcaatcttcctgcctcagtctcccaaagtgccatgattacaggcatgagccactgcccctagcctgcacatattatttttaaaccatacagtggccttgcaaatgtgtgttttcgtccccattttacagatgtagaaactgagggtcaggccaggtgcagtggctcacgcctgtaatcccagcactttgggaggctgaggcaggcagataacctgagatcaggagttcttgaccagcctggccaacatggtaaaaccccatctctactaaaaatacaaaaattagccaggcatggtggcacgtccctgtaatcccagctactggggaggctgaggcaggagaatcgcttgaacctgggaggcagaggctgcagtgagctgngatcgcacgactgcactccagcctgggccacagagcgagactgtgtctaaaaaaaaaataaaaaaagaaaagaaaagaaaaaaaaaaacccaacccggggaacaaattcaaaaaatttcccgaggaaaaatcggggcccggggggctaccactttggagaacccttgcgctccgggtaagataacctctttacttacaatatacttaacccacaacagctctttacatttttcaccaagtttactcagttaaaacttgttttgcaggagatccctggagacccttattaaagggcgtttcctgaatacagggagccgggagtggggccctgagagtcatgaattattaca

SEQ ID NO: 69019 - DNA, 2271 bp, Homo sapiens
  misc_feature (1678)..(1678): n is a, c, g, or t
  misc_feature (1921)..(1921): n is a, c, g, or t
agacgccacgagtcggcggcgctaccgaggggctgtgggcgcgcagctggaacctccggctgtcagtgcgcttacagttcctaaccccgaccctgcgcgcagcccgcactatggcagccccgccgcagctaagggctctgctcgtagtcgtcaacgcactgctgcgcaagcgccgctaccacgctgcgttggccgtgcttaagggcttccggaacggggctgtctatggagccaaaatccgggcccctcacgcgctggtcatgacctttctcttccggaatggcagcctccaggagaagctgtgggccatactgcaggccacatatatccactcctggaacctggcacggtttgtgttcacctacaagggtctccgtgccctgcagtcctacatacaaggcaagacctacccagcacacgcattcctggcggccttcctcgggggtatcctggtgtttggagaaaacaataacatcaacagccagatcaacatgtacctgttgtcacgcgtcctgtttgccctgagccgcctggctgtagagaagggctacatccctgaacccaggtgggacccgttcccgctgctcactgcggtggtgtgggggctggtgctgtggctctttgagtatcaccgatccaccctgcagccctcgctgcagtcctccatgacctacctctatgaggacagcaatgtatggcacgacatctcagacttcctcgtctataacaagagccgtccctccaattaatgcagccctgaggtgtctggctgtggctcaagatttggccccatgcagaccctcccaaaggatactgccttctcaagatcataggcctcagactccaactggtgttatcccagggttccgtttgctgaagtaaaaacactgattttaaaatcccagtgggtacctttgtatggtggcacaagtggccgaatcaggctgaggaatctacggcttggttccagctgtgcagctgacttctgtgagactggggccagccacactactctctaggcctcaggggtcaaggagctcagaggagggccctgaggtctctttccggtgggtatgttcattcttcaactgttcttatgtcacagagggctccttgctggtgggcagtgggttgtaaatactttttaaaaaacactaagttccttatctcagatgctgttctactggagaagttctagattcccactgtccaatagaaacacgtgagccatatatgtaattaaaatgtttctagtagctgcattacaaaaaagaagcctgggcactgtggctcactcctgtaatctcagaactttgggaggctgaggcaggtggatcacttgagctcaggagcttgagaccagcctgggcaacatggtgaaacccagtttctacaaaaaatacaaaaaattagccgggttccatcacctgtggttccagctgaggtgggaggatcacttgagcctatgaggtcgaggctacagtgagcaaagatcacgccactgcactccagcctgggcgacagtgagaccctgtctcaccaaagaaaaaaaaaaaggtgagattaatcttcactatatattttaacacaaatttctaaaagttatttcaacatataattaacatcattagatattttgtactcttttttgtattaagtattcaaaattgggtgtatnttttgccacccacattttcaggacccagtagccacatgtggctagtggctgctgtgacgggcaacacagataacctgagatcaggagttcttgaccagcctggccaacatggtaaaaccccatctctactaaaaatacaaaaattagccaggcatggtggcacgtccctgtaatcccagctactggggaggctgaggcaggagaatcgcttgaacctgggaggcagaggctgcagtgagctgngatcgcacgactgcactccagcctgggccacagagcgagactgtgtctaaaaaaaaaataaaaaaagaaaagaaaagaaaaaaaaaaacccaacccggggaacaaattcaaaaaatttcccgaggaaaaatcggggcccggggggctaccactttggagaacccttgcgctccgggtaagataacctctttacttacaatatacttaacccacaacagctctttacatttttcaccaagtttactcagttaaaacttgttttgcaggagatccctggagacccttattaaagggcgtttcctgaatacagggagccgggagtggggccctgagagtcatgaattattaca

SEQ ID NO: 69020 - DNA, 2072 bp, Homo sapiens
  misc_feature (1479)..(1479): n is a, c, g, or t
  misc_feature (1722)..(1722): n is a, c, g, or t
agacgccacgagtcggcggcgctaccgaggggctgtgggcgcgcagctggaacctccggctgtcagtgcgcttacagttcctaaccccgaccctgcgcgcagcccgcactatggcagccccgccgcagctaagggctctgctcgtagtcgtcaacgcactgctgcgcaagcgccgctaccacgctgcgttggccgtgcttaagggcttccggaacggggctgtctatggagccaaaatccgggcccctcacgcgctggtcatgacctttctcttccggaatggcagatcaacatgtacctgttgtcacgcgtcctgtttgccctgagccgcctggctgtagagaagggctacatccctgaacccaggtgggacccgttcccgctgctcactgcggtggtgtgggggctggtgctgtggctctttgagtatcaccgatccaccctgcagccctcgctgcagtcctccatgacctacctctatgaggacagcaatgtatggcacgacatctcagacttcctcgtctataacaagagccgtccctccaattaatgcagccctgaggtgtctggctgtggctcaagatttggccccatgcagaccctcccaaaggatactgccttctcaagatcataggcctcagactccaactggtgttatcccagggttccgtttgctgaagtaaaaacactgattttaaaatcccagtgggtacctttgtatggtggcacaagtggccgaatcaggctgaggaatctacggcttggttccagctgtgcagctgacttctgtgagactggggccagccacactactctctaggcctcaggggtcaaggagctcagaggagggccctgaggtctctttccggtgggtatgttcattcttcaactgttcttatgtcacagagggctccttgctggtgggcagtgggttgtaaatactttttaaaaaacactaagttccttatctcagatgctgttctactggagaagttctagattcccactgtccaatagaaacacgtgagccatatatgtaattaaaatgtttctagtagctgcattacaaaaaagaagcctgggcactgtggctcactcctgtaatctcagaactttgggaggctgaggcaggtggatcacttgagctcaggagcttgagaccagcctgggcaacatggtgaaacccagtttctacaaaaaatacaaaaaattagccgggttccatcacctgtggttccagctgaggtgggaggatcacttgagcctatgaggtcgaggctacagtgagcaaagatcacgccactgcactccagcctgggcgacagtgagaccctgtctcaccaaagaaaaaaaaaaaggtgagattaatcttcactatatattttaacacaaatttctaaaagttatttcaacatataattaacatcattagatattttgtactcttttttgtattaagtattcaaaattgggtgtatnttttgccacccacattttcaggacccagtagccacatgtggctagtggctgctgtgacgggcaacacagataacctgagatcaggagttcttgaccagcctggccaacatggtaaaaccccatctctactaaaaatacaaaaattagccaggcatggtggcacgtccctgtaatcccagctactggggaggctgaggcaggagaatcgcttgaacctgggaggcagaggctgcagtgagctgngatcgcacgactgcactccagcctgggccacagagcgagactgtgtctaaaaaaaaaataaaaaaagaaaagaaaagaaaaaaaaaaacccaacccggggaacaaattcaaaaaatttcccgaggaaaaatcggggcccggggggctaccactttggagaacccttgcgctccgggtaagataacctctttacttacaatatacttaacccacaacagctctttacatttttcaccaagtttactcagttaaaacttgttttgcaggagatccctggagacccttattaaagggcgtttcctgaatacagggagccgggagtggggccctgagagtcatgaattattaca

SEQ ID NO: 69021 - DNA, 1550 bp, Homo sapiens
agacgccacgagtcggcggcgctaccgaggggctgtgggcgcgcagctggaacctccggctgtcagtgcgcttacagttcctaaccccgaccctgcgcgcagcccgcactatggcagccccgccgcagctaagggctctgctcgtagtcgtcaacgcactgctgcgcaagcgccgctaccacgctgcgttggccgtgcttaagggcttccggaacggggctgtctatggagccaaaatccgggcccctcacgcgctggtcatgacctttctcttccggaatggcagcctccaggagaagctgtgggccatactgcaggccacatatatccactcctggaacctggcacggtttgtgttcacctacaagggtctccgtgccctgcagtcctacatacaaggcaagacctacccagcacacgcattcctggcggccttcctcgggggtatcctggtgtttggagaaaacaataacatcaacagccagatcaacatgtacctgttgtcacgcgtcctgtttgccctgagccgcctggctgtagagaagggctacatccctgaacccaggtgggacccgttcccgctgctcactgcggtggtgtgggggctggtgctgtggctctttgagtatcaccgatccaccctgcagccctcgctgcagtcctccatgacctacctctatgaggacagcaatgtatggcacgacatctcagacttcctcgtctataacaagagccgtccctccaattaatgcagccctgaggtgtctggctgtggctcaagatttggccccatgcagaccctcccaaaggatactgccttctcaagatcataggcctcagactccaactggtgttatcccagggttccgtttgctgaagtaaaaacactgattttaaaatcccagtgggtacctttgtatggtggcacaagtggccgaatcaggctgaggaatctacggcttggttccagctgtgcagctgacttctgtgagactggggccagccacactactctctaggcctcaggggtcaaggagctcagaggagggccctgaggtctctttccggtgggtatgttcattcttcaactgttcttatgtcacagagggctccttgctggtgggcagtgggttgtaaatactttttaaaaaacactaagttccttatctcagatgctgttctactggagaagttctagattcccactgtccaatagaaacacgtgagccatatatgtaattaaaatgtttctagtagctgcattacaaaaaagaagcctgggcacttggctcacgcctgtaatcccagcactttgggaggctgaggcaggcagataacctgagatcaggagttcttgaccagcctggccaacatggtaaaaccccatctctactaaaaatacaaaaattagctggacatggtggcaggcacctgtaattccagctacttgggaggctgaggtgggagaatctcttgaacctggggggctgctgtgagccgagatagttccattacacttcagcctgggtgacagagtaagactctgtctc

SEQ ID NO: 69022 - DNA, 2401 bp, Homo sapiens
  misc_feature (1808)..(1808): n is a, c, g, or t
  misc_feature (2051)..(2051): n is a, c, g, or t
agacgccacgagtcggcggcgctaccgaggggctgtgggcgcgcagctggaacctccggctgtcagtgcgcttacagttcctaaccccgaccctgcgcgcagcccgcactatggcagccccgccgcagctaagggctctgctcgtagtcgtcaacgcactgctgcgcaagcgccgctaccacgctgcgttggccgtgcttaagggcttccggaacggggctgtgtgagtggggccgtcgggccgggctggggctgagggatgtcctgcctggggtcagaggcgcgagttcgaagtccgatgccgcggtgctgtttgccctggagcagtcctcgtgtgtctctaagtctcggagctatggagccaaaatccgggcccctcacgcgctggtcatgacctttctcttccggaatggcagcctccaggagaagctgtgggccatactgcaggccacatatatccactcctggaacctggcacggtttgtgttcacctacaagggtctccgtgccctgcagtcctacatacaaggcaagacctacccagcacacgcattcctggcggccttcctcgggggtatcctggtgtttggagaaaacaataacatcaacagccagatcaacatgtacctgttgtcacgcgtcctgtttgccctgagccgcctggctgtagagaagggctacatccctgaacccaggtgggacccgttcccgctgctcactgcggtggtgtgggggctggtgctgtggctctttgagtatcaccgatccaccctgcagccctcgctgcagtcctccatgacctacctctatgaggacagcaatgtatggcacgacatctcagacttcctcgtctataacaagagccgtccctccaattaatgcagccctgaggtgtctggctgtggctcaagatttggccccatgcagaccctcccaaaggatactgccttctcaagatcataggcctcagactccaactggtgttatcccagggttccgtttgctgaagtaaaaacactgattttaaaatcccagtgggtacctttgtatggtggcacaagtggccgaatcaggctgaggaatctacggcttggttccagctgtgcagctgacttctgtgagactggggccagccacactactctctaggcctcaggggtcaaggagctcagaggagggccctgaggtctctttccggtgggtatgttcattcttcaactgttcttatgtcacagagggctccttgctggtgggcagtgggttgtaaatactttttaaaaaacactaagttccttatctcagatgctgttctactggagaagttctagattcccactgtccaatagaaacacgtgagccatatatgtaattaaaatgtttctagtagctgcattacaaaaaagaagcctgggcactgtggctcactcctgtaatctcagaactttgggaggctgaggcaggtggatcacttgagctcaggagcttgagaccagcctgggcaacatggtgaaacccagtttctacaaaaaatacaaaaaattagccgggttccatcacctgtggttccagctgaggtgggaggatcacttgagcctatgaggtcgaggctacagtgagcaaagatcacgccactgcactccagcctgggcgacagtgagaccctgtctcaccaaagaaaaaaaaaaaggtgagattaatcttcactatatattttaacacaaatttctaaaagttatttcaacatataattaacatcattagatattttgtactcttttttgtattaagtattcaaaattgggtgtatnttttgccacccacattttcaggacccagtagccacatgtggctagtggctgctgtgacgggcaacacagataacctgagatcaggagttcttgaccagcctggccaacatggtaaaaccccatctctactaaaaatacaaaaattagccaggcatggtggcacgtccctgtaatcccagctactggggaggctgaggcaggagaatcgcttgaacctgggaggcagaggctgcagtgagctgngatcgcacgactgcactccagcctgggccacagagcgagactgtgtctaaaaaaaaaataaaaaaagaaaagaaaagaaaaaaaaaaacccaacccggggaacaaattcaaaaaatttcccgaggaaaaatcggggcccggggggctaccactttggagaacccttgcgctccgggtaagataacctctttacttacaatatacttaacccacaacagctctttacatttttcaccaagtttactcagttaaaacttgttttgcaggagatccctggagacccttattaaagggcgtttcctgaatacagggagccgggagtggggccctgagagtcatgaattattaca

SEQ ID NO: 69023 - DNA, 353 bp, Homo sapiens
  misc_feature (173)..(173): n is a, c, g, or t
tctttttacaggggactattgtatgcccttcgtctgacatcagatgaaattaatgttgagatcctactatgtgctagcacttgatggccttaattaaaaatcaggcatttgaattcccaaggactcaggcaaaggtccatgtatcattaagggtgcaagtaacaaaacctagncttgaagaagtgtaaatactagggacacttatttatatttatttcttttatgtttcaagacagagtcttgctctggagtgcagtggcacaatcacggctcactgtaccctctacctcccaagctcaagtgatcctcccacttcagtctcccaagtagctgggactacaggtgtgtgccac

SEQ ID NO: 69024 - DNA, 152 bp, Homo sapiens
cgtcgaccctgcacagctcagcgggagagtgaggatcgggctctttgaggatctcttttatgcctccaatggtcagtgcacttcctgtggtgagagggggctttcgaggtgggtataggatcatggaaagtctttgcaatactgatgctttt

SEQ ID NO: 69025 - DNA, 375 bp, Homo sapiens
aaatggcaattgtctgactggatttgaagtcagatcactgggctttgaagctaatttctggttgaaatatggctgccccatttttagatgtgtgactctgggcaggttaccctatcttcccatcttcaattttcctatctgtaaaatggaactaataacagtacttgctttataattaaatgagctaaaacatgtaatgtactcagaacagtgtctgataaataatacgtgttcagcaaatgttagttttaaaaagtctgctgtcatctgttttatgacctcagtaaagtcatttaacagttcaaagcttctatttcctcatctataaaatggaactactaccacttacttaccctttccaggattaagagactc

SEQ ID NO: 69026 - DNA, 1472 bp, Homo sapiens
gggaaaccagacaccaggaattggtttctctgccttttggcaaaggaataagactacattgacttcatctatgaagacaactgccaactatttcctttgtaaattgctaattttgtgtagtgaggaaaggagcgatgggcgacgtgatttttatggattagactggtgagttctgctgaaagtttgacatctttaggatcttacattttcttcaagttgagctaatgaaaacaggctcgtgactatttatcacctgatttctaagtggatattgggttgaacaccacatatccatgactattaaggaggcttcatggtgtagtttgacaaaggctctctccttgaccaaacttcagtcaggccctaagtcctctttttaaccaggcctccaccttggcccccattcttgatgggcctatacagcccagctttagcaagaatcctgctaagctagtttagagagaatcccacatccccaatatctatgaaatttctcatcccctacttttgatgtgtaagtccttggcctcccttcaacgagaagcctgttaagttcattttgcaagaactctactcttgatatctcctcttagtaatttcctaatcactgaccccctcactctgcccattagttataaacccccacatgttctggttgtattcagagctgagcctgatctcttcctcttgttgggatagttttaaaacctgcgatagttttaaaacctatcactgtagtcctgaattaagtcttccttaccttaacaagtgtcaaaataaatttttctttaacatgttgaagcatgaacttgagaatctagagcaggagtccacaaagtatggcccatgggccatatccagcccgctgccggtttcggtaccactcatgacttaaaaatgggtcttacaattctgagtgattgaaaaaaaatcaaaagaaggataatatttagtgacccatgaaccttatatggcaatcaaatttcagtgtccataaataaagttacattggatgacagccatgcccatttgtttctgtgttgtctgtggctgctcgtgtgctacaatggcagagttgagcagtggtgacaaaccatgtgactcacaaaggcctaaaatatttagcgtctggcccttcgagaaaatgttagctgcccctggtctagagtaggtaaaaggctgagattggaagctgcttgttcaaattctgtgattggaaccgaatgatgtggctcattgtacagctcatggtgaattgcttcagtaccatggttttgttttttccttttgaaaagttggtctataaatgtaaaggaaaaatctaagataccaaaatatgttttctggcttagaatgttttatttccttgtatacattttaagagagtggcaaggagaaaagataatgtatcattttatttgggtttagaataaataatacattttatttatgatcatcatgtttaaaatatt

SEQ ID NO: 69027 - DNA, 373 bp, Homo sapiens
cccattcaacaacatatatcagaatcccctactaccgctagtatttgccaaaaaagaaaagaaacccaccctaagggaagcattggtaacaatcgttgttataaacatggcttgggtatcacatctctccatcttgccatctcttacctgtaagaacggtgactattacaacagtgactattattatatccaaataatctcagcatttgctggagtttgaaccagagctgaatacatggaattttaatgtagaaatttaggcaaaactccaagccattttttcttctcctctggccaaaacgttatttcctcaaacagggaaatatgagtctctatggggccaggttataggagcaaatgtgaacaacctgag

SEQ ID NO: 69028 - DNA, 751 bp, Homo sapiens
acagctgggcctgcagaggccgccatgcgggaggcagaggccgggcctcctcaagtcggcctctccagacccacttgcagcctcccggcgtcctctccgggcccagctcttcctcccggctgcgtctccaggcccgactccggcctcccaacaacctctttggactcagctcctgcccagctcccagtggccctggtaggcccacaacttcctgaagccaagctccccaggcccaggtcaggcctcacggtggcctcgccaggctcagctcctgccctccgatggcatctccaggtcccaaacggcctccggtcggtgggctcctctaggcccagcttgggcctcccggcggcctctgcaggcccaaatcgtcctgaagtcggcctctccaggcccagctccagcctcccggcagcctctgcaggcctaagttgtcctcaagtcggcctggaagtgggcctggaagagctgcaagttggcctccctgggcccagctccgtcctcttggcctctccaggtgcaaaacttcctcgagtcagcctctccaggcccagctcctcctgcctcccagtggcctcttttggcccagcccagctcatggctctcagcagccttcccaggccccgcttttgacttttggtggcctcttcaggcccagaacttgacctccagtcggcctttgcaggcccggcttcctgcctctcgaaggcctgcacgggcccagcctcagcctcacagcggactctccacg

SEQ ID NO: 69029 - DNA, 912 bp, Homo sapiens
acagctgggcctgcagaggccgccatgcgggaggcagaggccgggcctcctcaagtcggcctctccagacccacttgcagcctcccggcgtcctctccgggcccagctcttcctcccggctgcgtctccaggcccgactgctgcctcccaacaacctctttggactcagcgcctgcgatctcctggcggccttggtcggcccacagcttcctcaagccaagctccccaggcccaggtcaggcctcacggtggcctctccaggatcagctcttcctcccggctgcgtctctaggcccgactccggcctcccaacaacctctttggactcagctcctgcccagctcccagtggccctggtaggcccacaacttcctgaagccaagctccccaggcccaggtcaggcctcacggtggcctcgccaggctcagctcctgccctccgatggcatctccaggtcccaaacggcctccggtcggtgggctcctctaggcccagcttgggcctcccggcggcctctgcaggcccaaatcgtcctgaagtcggcctctccaggcccagctccagcctcccggcagcctctgcaggcctaagttgtcctcaagtcggcctggaagtgggcctggaagagctgcaagttggcctccctgggcccagctccgtcctcttggcctctccaggtgcaaaacttcctcgagtcagcctctccaggcccagctcctcctgcctcccagtggcctcttttggcccagcccagctcatggctctcagcagccttcccaggccccgcttttgacttttggtggcctcttcaggcccagaacttgacctccagtcggcctttgcaggcccggcttcctgcctctcgaaggcctgcacgggcccagcctcagcctcacagcggactctccacg

SEQ ID NO: 69030 - DNA, 149 bp, Homo sapiens
gtaatgacactcctgccactgatgataacaccatatatttgcatagagcgttctagtttacaaatattgacttgcccagtgttgctcacaggtcagactctttagacacagatctgattctaaggctacaaggttatagctcatttaag

SEQ ID NO: 69031 - DNA, 677 bp, Homo sapiens
acctggctaattttttgtatttttagtagagaaggggtttcaccatgttagccaggatggtcttgatctcctgacctggtgatccacccgcctcagcctcccaaagtgctgggattacaggcgtgagccaccacgcccagcctgatttgagtgtattttctaaataaaaattgaattgctatttaggttattccagtaccagcatgtgggctgttaaatctttagatatggccttttaaggtttttttttaaatatgttattctatcaattagtatttttcaaactgatcaaaaactaaaacagtttcagatttcctatctaaagtttacattttttatatataccaggtggttgtgagagctttgatcaaaacaaccttacccactttgaatgtgtttcttgtctgcctgatgatctggctgatttttagtatcatgggagtagacttatttgctggcagattctatgaatgcattgacccaacaagtggagaaaggtttccttcatctgaagtcatgaataagagtcggtgtgaaagccttctgtttaacgaatccatgctatgggaaaatgcaaaaatgaactttgataatgttggaaatggtttcctttctctgcttcaagtagtaagtacacttttgacttttccttattaattatatattcatccatattg

SEQ ID NO: 69032 - DNA, 5389 bp, Homo sapiens
gcggccgcgcaagtcctccaccatgtgaatgccaacatggccaggtcattagagctgagggaaaactagtgcccaaagatatgaaaagagtgtggatcttctggagaagtgctgttgttcaacaggtacaaaattggaaatgttggcttcaccagaacctaagggccttgttcccttcactaaagagtcttttgaacttataaaacagcatattgctaaaacacataatgaagaccatgaagaagaagacttaaagccaaatcctgatttggaagttggcaaaaagcttccatttatttatggaaacctttctcaaggaatggtgtcagagcccttggaagatgtggacccatattactacaagaaaaaaaatactttcatagtattaaataaaaatagaacaatcttcagattcaatgcggcttccatcttgtgtacattgtctcctttcaattgtattagaagaacaactatcaaggttttggtacatccctttttccaactgtttattctaattagtgtcctgattgattgcgtattcatgtccctgactaatttgccaaaatggagaccagtattagagaatactttgcttggaatttacacatttgaaatacttgtaaaactctttgcaagaggtgtctgggcaggatcattttccttcctcggtgatccatggaactggctcgatttcagcgtaactgtgtttgaggttattataagatactcacctctggacttcattccaacgcttcaaactgcaagaactttgagaattttaaaaattattcctttaaatcaaggtctgaaatcccttgtaggggtcctgatccactgcttgaagcagcttattggtgtcattatcctaactctgttttttctgagcatattttctctaattgggatggggctcttcatgggcaacttgaaacacaaatgttttcgatggccccaagagaatgaaaatgaaaccctgcacaacagaactggaaacccatattatattcgagaaacagaaaacttttattatttggaaggagaaagatatgctctcctttgtggcaacaggacagatgctggtcagtgtcctgaaggatatgtgtgtgtaaaagctggcataaatcctgatcaaggcttcacaaattttgacagttttggctgggccttatttgccctatttcggttaatggctcaggattaccctgaagtactttatcacctgatactttatgcttctgggaaggtctacatgatattttttgtggtggtaagttttttgttttccttttatatggcaagtttgttcttaggcatacttgccatggcctatgaagaagaaaagcagagagttggtgaaatatctaagaagattgaaccaaaatttcaacagactggaaaagaacttcaagaaggaaatgaaacagatgaggccaagaccatacaaatagaaatgaagaaaaggtcaccaatttccacagacacatcattggatgtgttggaagatgctactctcagacataaggaagaacttgaaaaatccaagaagatatgcccattatactggtataagtttgctaaaactttcttgatctggaattgttctccctgttggttaaaattgaaagagtttgtccataggattataatggcaccatttactgatcttttccttatcatatgcataattttaaacgtatgttttctgaccttggagcattatccaatgagtaaacaaactaacactcttctcaacattggaaacctggttttcattggaattttcacagcagaaatgatttttaaaataattgcaatgcatccatatgggtatttccaagtaggttggaacatttttgatagcatgatagtgttccatggtttaatagaactttgtctagcaaatgttgcaggaatggctcttcttcgattattcaggatgttaagaattttcaagttgggaaagtattggccaacattccagattttgatgtggtctcttagtaactcatgggtggccctgaaagacttggtcctgttgttgttcacattcatcttcttttctgctgcattcggcatgaagctgtttggtaagaattatgaagaatttgtctgccacatagacaaagactgtcaactcccacgctggcacatgcatgactttttccactccttcctgaatgtgttccgaattctctgtggagagtgggtagagaccttgtgggactgtatggaggttgcaggccaatcctggtgtattcctttttacctgatggtcattttaattggaaatttactggtactttacctgtttctggcattggtgagctcatttagttcatgcaaggatgtaacagctgaagagaataatgaagcaaaaaatctccagcttgcagtggcaagaattaaaaaaggaataaactatgtgcttcttaaaatactatgcaaaacacaaaatgtcccaaaggacacaatggaccatgtaaatgaggtatatgttaaagaagatatttctgaccataccctttctgaattgagcaacacccaagattttctcaaagataaggaaaaaagcagtggcacagagaaaaacgctactgaaaatgagagccaatcacttatccccagtcctagtgtctcagaaactgtaccaattgcttcaggagaatctgatatagaaaatctggataataaggagattcagagtaagtctggtgatggaggcagcaaagagaaaataaagcaatctagctcatctgaatgcagtactgttgatattgctatctctgaagaagaagaaatgttctatggaggtgaaagatcaaagcatctgaaaaatggttgcagacgcggatcttcacttggtcaaatcagtggagcatccaagaaaggaaaaatctggcagaacatcaggaaaacctgctgcaagattgtagagaacaattggtttaagtgttttattgggcttgttactctgctcagcactggcactctggcttttgaagatatatatattgatcagagaaagacaattaaaattttattagaatatgctgacatgatctttacttatatcttcattctggaaatgcttctaaaatggatggcatatggttttaaggcctatttctctaatggctggtacaggctggacttcgtggttgttattgtgttttgtcttagcttaataggcaaaactcgggaagaactaaaacctcttatttccatgaaattccttcggcccctcagagttctatctcaatttgaaagaatgaaggtggttgtgagagctttgatcaaaacaaccttacccactttgaatgtgtttcttgtctgcctgatgatctggctgatttttagtatcatgggagtagacttatttgctggcagattctatgaatgcattgacccaacaagtggagaaaggtttccttcatctgaagtcatgaataagagtcggtgtgaaagccttctgtttaacgaatccatgctatgggaaaatgcaaaaatgaactttgataatgttggaaatggtttcctttctctgcttcaagtagcaacatttaatggatggatcactattatgaattcagcaattgattctgttgctgttaatatacagcctcattttgaagtcaacatctacatgtattgttactttatcaactttattatatttggagtatttctccctctgagtatgctgattactgttattattgataatttcaacaagcataaaataaagctgggaggctcaaatatctttataacggttaaacagagaaaacagtaccgcaggctgaagaagctaatgtatgaggattctcaaagaccagtacctcgcccattaaacaagctccaaggattcatctttgatgtggtaacaagccaagcttttaatgtcattgttatggttcttatatgtttccaagcaatagccatgatgatagacactgatgttcagagtctacaaatgtccattgctctctactggattaactcaatttttgttatgctatatactatggaatgtatactgaagctcatcgctttccgttgtttttatttcaccattgcgtggaacatttttgattttatggtggttattttctccatcacaggactatgtctgcctatgacagtaggatcctaccttgtgcctccttcacttgtgcaactgatacttctctcacggatcattcacatgctgcgtcttggaaaaggaccaaaggtgtttcataatctgatgcttcctttgatgctgtccctcccagcattattgaacatcattcttctcatcttcctggtcatgttcatctatgccgtatttggaatgtataattttgcctatgttaaaaaagaagctggaattaatgatgtgtctaattttgaaacctttggcaacagtatgctctgtctttttcaagttgcaatatttgctggttgggatgggatgcttgatgcaattttcaacagtaaatggtctgactgtgatcctgataaaattaaccctgggactcaagttagaggagattgtgggaacccctctgttgggattttttattttgtcagttatatcctcatatcatggctgatcattgtaaatatgtacattgttgttgtcatggagtttttaaatattgcttctaagaagaaaaacaagaccttgagtgaagatgattttaggaaattctttcaggtatggaaaaggtttgatcctgataggacccagtacatagactctagcaagctttcagattttgcagctgctcttgatcctcctcttttcatggcaaaaccaaacaagggccagctcattgctttggacctccccatggctgttggggacagaattcattgcctcgatatcttacttgcttttacaaagagagttatgggtcaagatgtgaggatggagaaagttgtttcagaaatagaatcagggtttttgttagccaacccttttaagatcacatgtgagccaattacgactactttgaaacgaaaacaagaggcagtttcagcaaccatcattcaacgtgcttataaaaattaccgcttgaggcgaaatgacaaaaatacatcagatattcatatgatagatggtgacagagatgttcatgctactaaagaaggtgcctattttgacaaagctaaggaaaagtcacctattcaaagccagatctaataccacttaccacctcttttcatatttcttcacatatctgaaaaatgttgaaagcctaagccaggaataaaagaaaagtagagataataatcagttctttacaaccgatggtaattaagcttgtattcacaagacttcatgccaaattcactttttagcattatatctaacaaatcaagagaatccttaatattgctgcag

SEQ ID NO: 69033 - DNA, 484 bp, Homo sapiens
aattaaacttcatctccatttcccataggaagaaactgaggacaggaggggccaaacaagttacagtttcatccctccagagagccaacagagtattttgcacgaagttgaagctaaacaggtattatgtcctatctctggactgaatgactagatgctactcagcttctgaactagaggaagcctgggaccttgaccgcactaatgctgatgacagcggatttgcaagtggctagaggtaccagatttagcaaatcaaaatataggacgtcaagttaaatttaagtgtaagataagctacgaataccttttctagtattagtacgtcccatgcaatatactagaaatgttattcgttatttatgttaaatttaattttattagggcatcctatattttacctgtcaatccaacccatgacctaggcagacactgtagaaaaacaaaaggagaattaaggagataaatgaaacacagggtgagc

SEQ ID NO: 69034 - DNA, 136 bp, Homo sapiens
ccaaatgcccggatgcaacaatcagttcttagaaaggcatgtgaaccaatccaagccaaaaatatgcaatcctctgacgttactggaaactgttagaaaaaggaggtatggtctggacttaaactcaagaaaatat

SEQ ID NO: 69035 - DNA, 1404 bp, Homo sapiens
tttgtttgtttttgagaacagggtcttgctctgttgcccaggttggagtgcagtggctcgatcacagctcacttcagcctccacctcctggacttaagagattctcccacctcagcctgttgagtagctgggactacagatgtgcatgccaccaacactctgctaatttttctactttttatagagatgagatttcaccaagttgcccaggctggtctcgaacctctgggctcaaagaattagggctcaagcagttctcccacctcagcctcctgaagtggtgggattacaggcaaagaaaagatagtctggaaaagttacttgctaaaaggcttgattaaactaaatgtgtcctctttgttaacctttgattgtttgattatatttttcttaaaatttatctttttaaaataattttttaaaaattttaatagatatgaggtctctctctgttgcacaagctggtctcgaactcctgaactcaggtaatcctctcacctcagcctcccgaagtgctaggattgcagatgtgagccaccacacccagccaaaatttcttaactacatataaattatcttaatgatctaggtattttgttaggggaatacatacagtcaggataggataagaggggaagtaatgagtggtttactaaatatataagacaaacatttcaagtaaaaatttcaggagaaaatttttttttaggtttctaagaaatatatttgtggatgtggaatttttctgtcagatgacgtaagagcaaagttgaagatagctaatacttggggattcatatggaggtaattttttatttaaaatgagcaagaaggaccctagccttttattgtggtcttggaaactcattccccaccagtatcattccttgaagaaatggttggttctaggtctggggcaggaaatatatgagataagctgaaacatcttgactatcagcaaagattttatcaaacgatgctagggttgtgtcagaaggactcagcagccaactgaagacgttcccactggccaaaatagggcacattgagtatctgtaaagataactgcatggatcaaaacacatcaaaagctgggcacagtggctcatacctgtaatcccagcactttgggaatctgaggcgggtgtgttgcttgagtccaggagtttgagaccagcctggggaacatggtgggaccccctctctaccaaaaaaaaaaaaaaaaaaaaaaaaaaattagccagacatggtggctcttggttatcccaagagttagttagctctttgtcccaagagttactcaagaggttgaggtgggaggatttcttgagcctgggaggtggaggttgcggtgagctgggattgtgccactgtactccagcctggatgagaccacatctcaca

SEQ ID NO: 69036 - DNA, 181 bp, Homo sapiens
tgcctttcggccacttcggcaggtccagctcctgcctgccagtggcctctttaggcccagctcattcctcacgtcggccattccaggccccgtttttcccttccggcagcctcttggcctctaatttgtttatcttttgtgtataaatcccaaaatattgaattttggaatatttccacca

SEQ ID NO: 69037 - DNA, 452 bp, Homo sapiens
caacacaataacctaagtatctatgtggcaggatatctcttttagagtatcacagcgtttaatccttacatttttttctataaaacattttttatgattacttggaaaaagatacaaaagaacataatttggtgtaattatttcaatgaagctaatgagatttcctgccacacagatgaatacagagcattaccttcataactgttataacctgttgtggcagatgacatctggagtatttgtcctggtctgagcaatacattataaaattggtttagaaaaatttgcagcagagattagtatggctagatctgcctggaaaatgacctgtgaaggaaagttaagaaaaaaatgtatgtttaacttgggaaaaaaaaaattttggaagcagggcctgtgatacagtttggatatttgtccctgcccaaatctcatgttgaattgtaatcccc

SEQ ID NO: 69038 - DNA, 221 bp, Homo sapiens
atctttaggaaacattctctaaactgtctacatactcctgatccagctgaaatgcttcatagattcaagcccatttgctgggatttggacctaagattattgaggtgagggattcccagggaaggtgaactctgttatgtgctgataaggtctggccctagtagtaagacatttgcctagagtgctattctttaaaaattccaaccccaaacatcagcagt

SEQ ID NO: 69039 - DNA, 395 bp, Homo sapiens
tgttcaaggacatcaacttcaggaggctggaggcaaacatgctggagccccctttctgtcctgatcctcatgccgtttactgtaaggacgtcctggatatcgagcagttctcggcggtgaaagggatctacctggacaccgcagatgaagacttctatgctcggtttgctaccgggtgtgtctccatcccctggcagaatgagggctgcctgaccatggtccccagtgagaaggaagtggaacccaagcaatgctgagcaccccggtgcggaccacagagcagaccctggcgccaggaaggagcatgtgttagcgtctcgtcccacctggaattgtaataaatacatctaaataaaacatgccttgggagtgtacagacctttctgcactaatac

SEQ ID NO: 69040 - DNA, 353 bp, Homo sapiens
ggggacttggctgtctgatctatgaaatgattcagggacattctccattcaaaaaatacaaagagaaagtcaaatgggaggaggtcgatcaaagaatcaagaatgataccgaggagtattctgagaagttttcagaggatgccaaatctatctgcaggatgggctgcctgaccatggtccccagtgagaaggaagtggaacccaagcaatgctgagcaccccggtgcggaccacagagcagaccctggcgccaggaaggagcatgtgttagcgtctcgtcccacctggaattgtaataaatacatctaaataaaacatgccttgggagtgtacagacctttctgcactaatac

SEQ ID NO: 69041 - DNA, 1105 bp, Homo sapiens
gattggctataagaggagcttgatcgtgggtgcaccctggaccccaccatggctcaccggccccccagccctgccctggcgtccgtgctgctggccttgctgctgagcggtgctgcccgagctgcggagatcgtgggcgggcacgaggcgcagccacactcccggccctacatggcctccctgcagatgcgggggaacccgggcagccacttctgcggaggcaccttgatccaccccagcttcgtgctgacggccgcgcactgcctgcgggacataccccagcgcctggtgaacgtggtgctcggagcccacaacgtgcggacgcaggagcccacccagcagcacttctcggtggctcaggtgtttctgaacaactacgacgcggagaacaaactgaacgacgttctcctcatccagctgagcagcccagccaacctcagtgcctccgtcgccacagtccagctgccacagcaggaccagccagtgccccacggcacccagtgcctggccatgggctggggccgcgtgggtgcccacgaccccccagcccaggtcctgcaggagctcaatgtcaccgtggtcaccttcttctgccggccacataacatttgcactttcgtccctcgccgcaaggccggcatctgcttcggagactcaggtggccccctgatctgtgatggcatcatccaaggaatagactccttcgtgatctggggatgtgccacccgccttttccctgacttcttcacgcgggtagccctctacgtggactggatccgttccacgctgcgccgtgtggaggccaagggccgcccctgaaccgcccctcccacagcgctggccgggaccccgagcctggctccaaaccctcgaggcggatctttggacagaagcagctcttccccgaacactgtggcgtccgggacggccccacccgtccccccacactccctcccacggggctccgggagacaggccggccctgcacctcaccccaccgtgacctcaataaacgttgaaactccccctggctcctgtctgtccttcccatatagggaggggagggggaactgcccaccgtgacctcaataaacgttgaaactcc

SEQ ID NO: 69042 - DNA, 11595 bp, Homo sapiens
gggcgggaggactcgactcggtgggagccgctagagccgggcgcccggggacgtagcctgtagggccaccgggtccccgtcagaggcggcggcgggagcagcggggactgcaggccggggtgcagcgaacgcgaccccgcgggctgcggcccggtgtgtgcggagcgtggcgggcgcagcttaccgggcggaggtgagcgcggcgccggctcctcctgcggcggactttgggtgcgacttgacgagcggtggttcgacaagtggccttgcgggccggatcgtcccagtggaagagttgtaaatttgcttctggccttcccctacggattatacctggccttcccctacggattatactcaacttactgtttagaaaatgtggcccacgagacgcctggttactatcaaaaggagcggggtcgacggtccccactttcccctgagcctcagcacctgcttgtttggaaggggtattgaatgtgacatccgtatccagcttcctgttgtgtcaaaacaacattgcaaaattgaaatccatgagcaggaggcaatattacataatttcagttccacaaatccaacacaagtaaatgggtctgttattgatgagcctgtacggctaaaacatggagatgtaataactattattgatcgttccttcaggtatgaaaatgaaagtcttcagaatggaaggaagtcaactgaatttccaagaaaaatacgtgaacaggagccagcacgtcgtgtctcaagatctagcttctcttctgaccctgatgagagtgagggaatacctttgaaaagaaggcgtgtgtcctttggtgggcacctaagacctgaactatttgatgaaaacttgcctcctaatacgcctctcaaaaggggagaagccccaaccaaaagaaagtctctggtaatgcacactccacctgtcctgaagaaaatcatcaaggaacagcctcaaccatcaggaaaacaagagtcaggttcagaaatccatgtggaagtgaaggcacaaagcttggttataagccctccagctcctagtcctaggaaaactccagttgccagtgatcaacgccgtaggtcctgcaaaacagcccctgcttccagcagcaaatctcagacagaggttcctaagagaggaggagaaagagtggcaacctgccttcaaaagagagtgtctatcagccgaagtcaacatgatattttacagatgatatgttccaaaagaagaagtggtgcttcggaagcaaatctgattgttgcaaaatcatgggcagatgtagtaaaacttggtgcaaaacaaacacaaactaaagtcataaaacatggtcctcaaaggtcaatgaacaaaaggcaaagaagacctgctactccaaagaagcctgtgggcgaagttcacagtcaatttagtacaggccacgcaaactctccttgtaccataataatagggaaagctcatactgaaaaagtacatgtgcctgctcgaccctacagagtgctcaacaacttcatttccaaccaaaaaatggactttaaggaagatctttcaggaatagctgaaatgttcaagaccccagtgaaggagcaaccgcagttgacaagcacatgtcacatcgctatttcaaattcagagaatttgcttggaaaacagtttcaaggaactgattcaggagaagaacctctgctccccacctcagagagttttggaggaaatgtgttcttcagtgcacagaatgcagcaaaacagccatctgataaatgctctgcaagccctcccttaagacggcagtgtattagagaaaatggaaacgtagcaaaaacgcccaggaacacctacaaaatgacttctctggagacaaaaacttcagatactgagacagagccttcaaaaacagtatccactgtaaacaggtcaggaaggtctacagagttcaggaatatacagaagctacctgtggaaagtaagagtgaagaaacaaatacagaaattgttgagtgcatcctaaaaagaggtcagaaggcaacactactacaacaaaggagagaaggagagatgaaggaaatagaaagaccttttgagacatataaggaaaatattgaattaaaagaaaacgatgaaaagatgaaagcaatgaagagatcaagaacttgggggcagaaatgtgcaccaatgtctgacctgacagacctcaagagcttgcctgatacagaactcatgaaagacacggcacgtggccagaatctcctccaaacccaagatcatgccaaggcaccaaagagtgagaaaggcaaaatcactaaaatgccctgccagtcattacaaccagaaccaataaacaccccaacacacacaaaacaacagttgaaggcatccctggggaaagtaggtgtgaaagaagagctcctagcagtcggcaagttcacacggacgtcaggggagaccacgcacacgcacagagagccagcaggagatggcaagagcatcagaacgtttaaggagtctccaaagcagatcctggacccagcagcccgtgtaactggaatgaagaagtggccaagaacgcctaaggaagaggcccagtcactagaagacctggctggcttcaaagagctcttccagacaccaggtccctctgaggaatcaatgactgatgagaaaactaccaaaatagcctgcaaatctccaccaccagaatcagtggacactccaacaagcacaaagcaatggcctaagagaagtctcaggaaagcagatgtagaggaagaattcttagcactcaggaaactaacaccatcagcagggaaagccatgcttacgcccaaaccagcaggaggtgatgagaaagacattaaagcatttatgggaactccagtgcagaaactggacctggcaggaactttacctggcagcaaaagacagctacagactcctaaggaaaaggcccaggctctagaagacctggctggctttaaagagctcttccagactcctggtcacaccgaggaattagtggctgctggtaaaaccactaaaataccctgcgactctccacagtcagacccagtggacaccccaacaagcacaaagcaacgacccaagagaagtatcaggaaagcagatgtagagggagaactcttagcgtgcaggaatctaatgccatcagcaggcaaagccatgcacacgcctaaaccatcagtaggtgaagagaaagacatcatcatatttgtgggaactccagtgcagaaactggacctgacagagaacttaaccggcagcaagagacggccacaaactcctaaggaagaggcccaggctctggaagacctgactggctttaaagagctcttccagacccctggtcatactgaagaagcagtggctgctggcaaaactactaaaatgccctgcgaatcttctccaccagaatcagcagacaccccaacaagcacaagaaggcagcccaagacacctttggagaaaagggacgtacagaaggagctctcagccctgaagaagctcacacagacatcaggggaaaccacacacacagataaagtaccaggaggtgaggataaaagcatcaacgcgtttagggaaactgcaaaacagaaactggacccagcagcaagtgtaactggtagcaagaggcacccaaaaactaaggaaaaggcccaacccctagaagacctggctggcttgaaagagctcttccagacaccagtatgcactgacaagcccacgactcacgagaaaactaccaaaatagcctgcagatcacaaccagacccagtggacacaccaacaagctccaagccacagtccaagagaagtctcaggaaagtggacgtagaagaagaattcttcgcactcaggaaacgaacaccatcagcaggcaaagccatgcacacacccaaaccagcagtaagtggtgagaaaaacatctacgcatttatgggaactccagtgcagaaactggacctgacagagaacttaactggcagcaagagacggctacaaactcctaaggaaaaggcccaggctctagaagacctggctggctttaaagagctcttccagacacgaggtcacactgaggaatcaatgactaacgataaaactgccaaagtagcctgcaaatcttcacaaccagacccagacaaaaacccagcaagctccaagcgacggctcaagacatccctggggaaagtgggcgtgaaagaagagctcctagcagttggcaagctcacacagacatcaggagagactacacacacacacacagagccaacaggagatggtaagagcatgaaagcatttatggagtctccaaagcagatcttagactcagcagcaagtctaactggcagcaagaggcagctgagaactcctaagggaaagtctgaagtccctgaagacctggccggcttcatcgagctcttccagacaccaagtcacactaaggaatcaatgactaacgaaaaaactaccaaagtatcctacagagcttcacagccagacctagtggacaccccaacaagctccaagccacagcccaagagaagtctcaggaaagcagacactgaagaagaatttttagcatttaggaaacaaacgccatcagcaggcaaagccatgcacacacccaaaccagcagtaggtgaagagaaagacatcaacacgtttttgggaactccagtgcagaaactggaccagccaggaaatttacctggcagcaatagacggctacaaactcgtaaggaaaaggcccaggctctagaagaactgactggcttcagagagcttttccagacaccatgcactgataaccccacgactgatgagaaaactaccaaaaaaatactctgcaaatctccgcaatcagacccagcggacaccccaacaaacacaaagcaacggcccaagagaagcctcaagaaagcagacgtagaggaagaatttttagcattcaggaaactaacaccatcagcaggcaaagccatgcacacgcctaaagcagcagtaggtgaagagaaagacatcaacacatttgtggggactccagtggagaaactggacctgctaggaaatttacctggcagcaagagacggccacaaactcctaaagaaaaggccaaggctctagaagatctggctggcttcaaagagctcttccagacaccaggtcacactgaggaatcaatgaccgatgacaaaatcacagaagtatcctgcaaatctccacaaccagacccagtcaaaaccccaacaagctccaagcaacgactcaagatatccttggggaaagtaggtgtgaaagaagaggtcctaccagtcggcaagctcacacagacgtcagggaagaccacacagacacacagagagacagcaggagatggaaagagcatcaaagcgtttaaggaatctgcaaagcagatgctggacccagcaaactatggaactgggatggagaggtggccaagaacacctaaggaagaggcccaatcactagaagacctggccggcttcaaagagctcttccagacaccagaccacactgaggaatcaacaactgatgacaaaactaccaaaatagcctgcaaatctccaccaccagaatcaatggacactccaacaagcacaaggaggcggcccaaaacacctttggggaaaagggatatagtggaagagctctcagccctgaagcagctcacacagaccacacacacagacaaagtaccaggagatgaggataaaggcatcaacgtgttcagggaaactgcaaaacagaaactggacccagcagcaagtgtaactggtagcaagaggcagccaagaactcctaagggaaaagcccaacccctagaagacttggctggcttgaaagagctcttccagacaccaatatgcactgacaagcccacgactcatgagaaaactaccaaaatagcctgcagatctccacaaccagacccagtgggtaccccaacaatcttcaagccacagtccaagagaagtctcaggaaagcagacgtagaggaagaatccttagcactcaggaaacgaacaccatcagtagggaaagctatggacacacccaaaccagcaggaggtgatgagaaagacatgaaagcatttatgggaactccagtgcagaaattggacctgccaggaaatttacctggcagcaaaagatggccacaaactcctaaggaaaaggcccaggctctagaagacctggctggcttcaaagagctcttccagacaccaggcactgacaagcccacgactgatgagaaaactaccaaaatagcctgcaaatctccacaaccagacccagtggacaccccagcaagcacaaagcaacggcccaagagaaacctcaggaaagcagacgtagaggaagaatttttagcactcaggaaacgaacaccatcagcaggcaaagccatggacacaccaaaaccagcagtaagtgatgagaaaaatatcaacacatttgtggaaactccagtgcagaaactggacctgctaggaaatttacctggcagcaagagacagccacagactcctaaggaaaaggctgaggctctagaggacctggttggcttcaaagaactcttccagacaccaggtcacactgaggaatcaatgactgatgacaaaatcacagaagtatcctgtaaatctccacagccagagtcattcaaaacctcaagaagctccaagcaaaggctcaagatacccctggtgaaagtggacatgaaagaagagcccctagcagtcagcaagctcacacggacatcaggggagactacgcaaacacacacagagccaacaggagatagtaagagcatcaaagcgtttaaggagtctccaaagcagatcctggacccagcagcaagtgtaactggtagcaggaggcagctgagaactcgtaaggaaaaggcccgtgctctagaagacctggttgacttcaaagagctcttctcagcaccaggtcacactgaagagtcaatgactattgacaaaaacacaaaaattccctgcaaatctcccccaccagaactaacagacactgccacgagcacaaagagatgccccaagacacgtcccaggaaagaagtaaaagaggagctctcagcagttgagaggctcacgcaaacatcagggcaaagcacacacacacacaaagaaccagcaagcggtgatgagggcatcaaagtattgaagcaacgtgcaaagaagaaaccaaacccagtagaagaggaacccagcaggagaaggccaagagcacctaaggaaaaggcccaacccctggaagacctggccggcttcacagagctctctgaaacatcaggtcacactcaggaatcactgactgctggcaaagccactaaaataccctgcgaatctcccccactagaagtggtagacaccacagcaagcacaaagaggcatctcaggacacgtgtgcagaaggtacaagtaaaagaagagccttcagcagtcaagttcacacaaacatcaggggaaaccacggatgcagacaaagaaccagcaggtgaagataaaggcatcaaagcattgaaggaatctgcaaaacagacaccggctccagcagcaagtgtaactggcagcaggagacggccaagagcacccagggaaagtgcccaagccatagaagacctagctggcttcaaagacccagcagcaggtcacactgaagaatcaatgactgatgacaaaaccactaaaataccctgcaaatcatcaccagaactagaagacaccgcaacaagctcaaagagacggcccaggacacgtgcccagaaagtagaagtgaaggaggagctgttagcagttggcaagctcacacaaacctcaggggagaccacgcacaccgacaaagagccggtaggtgagggcaaaggcacgaaagcatttaagcaacctgcaaagcggaagctggacgcagaagatgtaattggcagcaggagacagccaagagcacctaaggaaaaggcccaacccctggaagatctggccagcttccaagagctctctcaaacaccaggccacactgaggaactggcaaatggtgctgctgatagctttacaagcgctccaaagcaaacacctgacagtggaaaacctctaaaaatatccagaagagttcttcgggcccctaaagtagaacccgtgggagacgtggtaagcaccagagaccctgtaaaatcacaaagcaaaagcaacacttccctgcccccactgcccttcaagaggggaggtggcaaagatggaagcgtcacgggaaccaagaggctgcgctgcatgccagcaccagaggaaattgtggaggagctgccagccagcaagaagcagagggttgctcccagggcaagaggcaaatcatccgaacccgtggtcatcatgaagagaagtttgaggacttctgcaaaaagaattgaacctgcggaagagctgaacagcaacgacatgaaaaccaacaaagaggaacacaaattacaagactcggtccctgaaaataagggaatatccctgcgctccagacgccaaaataagactgaggcagaacagcaaataactgaggtctttgtattagcagaaagaatagaaataaacagaaatgaaaagaagcccatgaagacctccccagagatggacattcagaatccagatgatggagcccggaaacccatacctagagacaaagtcactgagaacaaaaggtgcttgaggtctgctagacagaatgagagctcccagcctaaggtggcagaggagagcggagggcagaagagtgcgaaggttctcatgcagaatcagaaagggaaaggagaagcaggaaattcagactccatgtgcctgagatcaagaaagacaaaaagccagcctgcagcaagcactttggagagcaaatctgtgcagagagtaacgcggagtgtcaagaggtgtgcagaaaatccaaagaaggctgaggacaatgtgtgtgtcaagaaaataagaaccagaagtcatagggacagtgaagatatttgacagaaaaatcgaactgggaaaaatataataaagttagttttgtgataagttctagtgcagtttttgtcataaattacaagtgaattctgtaagtaaggctgtcagtctgcttaagggaagaaaactttggatttgctgggtctgaatcggcttcataaactccactgggagcactgctgggctcctggactgagaatagttgaacaccgggggctttgtgaaggagtctgggccaaggtttgccctcagctttgcagaatgaagccttgaggtctgtcaccacccacagccaccctacagcagccttaactgtgacacttgccacactgtgtcgtcgtttgtttgcctatgtcctccagggcacggtggcaggaacaactatcctcgtctgtcccaacactgagcaggcactcggtaaacacgaatgaatggatgagcgcacggatgaatggagcttacaagatctgtctttccaatggccgggggcatttggtccccaaattaaggctattggacatctgcacaggacagtcctatttttgatgtcctttcctttctgaaaataaagttttgtgctttggagaatgactcgtgagcacatctttagggaccaagagtgactttctgtaaggagtgactcgtggcttgccttggtctcttgggaatacttttctaactagggttgctctcacctgagacattctccacccgcggaatctcagggtcccaggctgtgggccatcacgacctcaaactggctcctaatctccagctttcctgtcattgaaagcttcggaagtttactggctctgctcccgcctgttttctttctgactctatctggcagcccgatgccacccagtacaggaagtgacaccagtactctgtaaagcatcatcatccttggagagactgagcactcagcaccttcagccacgatttcaggatcgcttccttgtgagccgctgcctccgaaatctcctttgaagcccagacatctttctccagcttcagacttgtagatataactcgttcatcttcatttactttccactttgccccctgtcctctctgtgttccccaaatcagagaatagcccgccatcccccaggtcacctgtctggattcctccccattcacccaccttgccaggtgcaggtgaggatggtgcaccagacagggtagctgtcccccaaaatgtgccctgtgcgggcagtgccccgtctccacgtttgtttccccagtgtctggcggggagccaggtgacatcataaatacttgctgaatgaatgcagaaatcagcggtactgacttgtactatattggctgccatgatagggttctcacagcgtcatccatgatcgtaagggagaatgacattctgcttgagggagggaatagaaaggggcagggaggggacatctgagggcttcacagggctgcaaagggtacagggattgcaccagggcagaacaggggagggtgttcaaggaagagtggctcttagcagaggcactttggaaggtgtgaggcataaatgcttccttctacgtaggccaacctcaaaactttcagtaggaatgttgctatgatcaagttgttctaacactttagacttagtagtaattatgaacctcacatagaaaaatttcatccagccatatgcctgtggagtggaatattctgtttagtagaaaaatcctttagagttcagctctaaccagaaatcttgctgaagtatgtcagcaccttttctcaccctggtaagtacagtatttcaagagcacgctaagggtggttttcattttacagggctgttgatgatgggttaaaaatgttcatttaagggctacccccgtgtttaatagatgaacaccacttctacacaaccctccttggtactgggggagggagagatctgacaaatactgcccattcccctaggctgactggatttgagaacaaatacccacccatttccaccatggtatggtaacttctctgagcttcagtttccaagtgaatttccatgtaataggacattcccattaaatacaagctgtttttactttttcgcctcccagggcctgtgggatctggtcccccagcctctcttgggctttcttacactaactctgtacctaccatctcctgcctcccttaggcaggcacctccaaccaccacacactccctgctgttttccctgcctggaactttccctcctgccccaccaagatcatttcatccagtcctgagctcagcttaagggaggcttcttgcctgtgggttccctcacccccatgcctgtcctccaggctggggcaggttcttagtttgcctggaattgttctgtacctctttgtagcacgtagtgttgtggaaactaagccactaattgagtttctggctcccctcctggggttgtaagttttgttcattcatgagggccgactgcatttcctggttactctatcccagtgaccagccacaggagatgtccaataaagtatgtgatgaaatggtctta

SEQ ID NO: 69043 - DNA, 9049 bp, Homo sapiens
  misc_feature (1)..(1): n is a, c, g, or t
  misc_feature (8)..(8): n is a, c, g, or t
  misc_feature (11)..(12): n is a, c, g, or t
ncagaggnttnncaaaagtgcactcttctatatctgcccagtcactagaagacctggctggcttcaaagagctcttccagacaccaggtccctctgaggaatcaatgactgatgagaaaactaccaaaatagcctgcaaatctccaccaccagaatcagtggacactccaacaagcacaaagcaatggcctaagagaagtctcaggaaagcagatgtagaggaagaattcttagcactcaggaaactaacaccatcagcagggaaagccatgcttacgcccaaaccagcaggaggtgatgagaaagacattaaagcatttatgggaactccagtgcagaaactggacctggcaggaactttacctggcagcaaaagacagctacagactcctaaggaaaaggcccaggctctagaagacctggctggctttaaagagctcttccagactcctggtcacaccgaggaattagtggctgctggtaaaaccactaaaataccctgcgactctccacagtcagacccagtggacaccccaacaagcacaaagcaacgacccaagagaagtatcaggaaagcagatgtagagggagaactcttagcgtgcaggaatctaatgccatcagcaggcaaagccatgcacacgcctaaaccatcagtaggtgaagagaaagacatcatcatatttgtgggaactccagtgcagaaactggacctgacagagaacttaaccggcagcaagagacggccacaaactcctaaggaagaggcccaggctctggaagacctgactggctttaaagagctcttccagacccctggtcatactgaagaagcagtggctgctggcaaaactactaaaatgccctgcgaatcttctccaccagaatcagcagacaccccaacaagcacaagaaggcagcccaagacacctttggagaaaagggacgtacagaaggagctctcagccctgaagaagctcacacagacatcaggggaaaccacacacacagataaagtaccaggaggtgaggataaaagcatcaacgcgtttagggaaactgcaaaacagaaactggacccagcagcaagtgtaactggtagcaagaggcacccaaaaactaaggaaaaggcccaacccctagaagacctggctggcttgaaagagctcttccagacaccagtatgcactgacaagcccacgactcacgagaaaactaccaaaatagcctgcagatcacaaccagacccagtggacacaccaacaagctccaagccacagtccaagagaagtctcaggaaagtggacgtagaagaagaattcttcgcactcaggaaacgaacaccatcagcaggcaaagccatgcacacacccaaaccagcagtaagtggtgagaaaaacatctacgcatttatgggaactccagtgcagaaactggacctgacagagaacttaactggcagcaagagacggctacaaactcctaaggaaaaggcccaggctctagaagacctggctggctttaaagagctcttccagacacgaggtcacactgaggaatcaatgactaacgataaaactgccaaagtagcctgcaaatcttcacaaccagacccagacaaaaacccagcaagctccaagcgacggctcaagacatccctggggaaagtgggcgtgaaagaagagctcctagcagttggcaagctcacacagacatcaggagagactacacacacacacacagagccaacaggagatggtaagagcatgaaagcatttatggagtctccaaagcagatcttagactcagcagcaagtctaactggcagcaagaggcagctgagaactcctaagggaaagtctgaagtccctgaagacctggccggcttcatcgagctcttccagacaccaagtcacactaaggaatcaatgactaacgaaaaaactaccaaagtatcctacagagcttcacagccagacctagtggacaccccaacaagctccaagccacagcccaagagaagtctcaggaaagcagacactgaagaagaatttttagcatttaggaaacaaacgccatcagcaggcaaagccatgcacacacccaaaccagcagtaggtgaagagaaagacatcaacacgtttttgggaactccagtgcagaaactggaccagccaggaaatttacctggcagcaatagacggctacaaactcgtaaggaaaaggcccaggctctagaagaactgactggcttcagagagcttttccagacaccatgcactgataaccccacgactgatgagaaaactaccaaaaaaatactctgcaaatctccgcaatcagacccagcggacaccccaacaaacacaaagcaacggcccaagagaagcctcaagaaagcagacgtagaggaagaatttttagcattcaggaaactaacaccatcagcaggcaaagccatgcacacgcctaaagcagcagtaggtgaagagaaagacatcaacacatttgtggggactccagtggagaaactggacctgctaggaaatttacctggcagcaagagacggccacaaactcctaaagaaaaggccaaggctctagaagatctggctggcttcaaagagctcttccagacaccaggtcacactgaggaatcaatgaccgatgacaaaatcacagaagtatcctgcaaatctccacaaccagacccagtcaaaaccccaacaagctccaagcaacgactcaagatatccttggggaaagtaggtgtgaaagaagaggtcctaccagtcggcaagctcacacagacgtcagggaagaccacacagacacacagagagacagcaggagatggaaagagcatcaaagcgtttaaggaatctgcaaagcagatgctggacccagcaaactatggaactgggatggagaggtggccaagaacacctaaggaagaggcccaatcactagaagacctggccggcttcaaagagctcttccagacaccagaccacactgaggaatcaacaactgatgacaaaactaccaaaatagcctgcaaatctccaccaccagaatcaatggacactccaacaagcacaaggaggcggcccaaaacacctttggggaaaagggatatagtggaagagctctcagccctgaagcagctcacacagaccacacacacagacaaagtaccaggagatgaggataaaggcatcaacgtgttcagggaaactgcaaaacagaaactggacccagcagcaagtgtaactggtagcaagaggcagccaagaactcctaagggaaaagcccaacccctagaagacttggctggcttgaaagagctcttccagacaccaatatgcactgacaagcccacgactcatgagaaaactaccaaaatagcctgcagatctccacaaccagacccagtgggtaccccaacaatcttcaagccacagtccaagagaagtctcaggaaagcagacgtagaggaagaatccttagcactcaggaaacgaacaccatcagtagggaaagctatggacacacccaaaccagcaggaggtgatgagaaagacatgaaagcatttatgggaactccagtgcagaaattggacctgccaggaaatttacctggcagcaaaagatggccacaaactcctaaggaaaaggcccaggctctagaagacctggctggcttcaaagagctcttccagacaccaggcactgacaagcccacgactgatgagaaaactaccaaaatagcctgcaaatctccacaaccagacccagtggacaccccagcaagcacaaagcaacggcccaagagaaacctcaggaaagcagacgtagaggaagaatttttagcactcaggaaacgaacaccatcagcaggcaaagccatggacacaccaaaaccagcagtaagtgatgagaaaaatatcaacacatttgtggaaactccagtgcagaaactggacctgctaggaaatttacctggcagcaagagacagccacagactcctaaggaaaaggctgaggctctagaggacctggttggcttcaaagaactcttccagacaccaggtcacactgaggaatcaatgactgatgacaaaatcacagaagtatcctgtaaatctccacagccagagtcattcaaaacctcaagaagctccaagcaaaggctcaagatacccctggtgaaagtggacatgaaagaagagcccctagcagtcagcaagctcacacggacatcaggggagactacgcaaacacacacagagccaacaggagatagtaagagcatcaaagcgtttaaggagtctccaaagcagatcctggacccagcagcaagtgtaactggtagcaggaggcagctgagaactcgtaaggaaaaggcccgtgctctagaagacctggttgacttcaaagagctcttctcagcaccaggtcacactgaagagtcaatgactattgacaaaaacacaaaaattccctgcaaatctcccccaccagaactaacagacactgccacgagcacaaagagatgccccaagacacgtcccaggaaagaagtaaaagaggagctctcagcagttgagaggctcacgcaaacatcagggcaaagcacacacacacacaaagaaccagcaagcggtgatgagggcatcaaagtattgaagcaacgtgcaaagaagaaaccaaacccagtagaagaggaacccagcaggagaaggccaagagcacctaaggaaaaggcccaacccctggaagacctggccggcttcacagagctctctgaaacatcaggtcacactcaggaatcactgactgctggcaaagccactaaaataccctgcgaatctcccccactagaagtggtagacaccacagcaagcacaaagaggcatctcaggacacgtgtgcagaaggtacaagtaaaagaagagccttcagcagtcaagttcacacaaacatcaggggaaaccacggatgcagacaaagaaccagcaggtgaagataaaggcatcaaagcattgaaggaatctgcaaaacagacaccggctccagcagcaagtgtaactggcagcaggagacggccaagagcacccagggaaagtgcccaagccatagaagacctagctggcttcaaagacccagcagcaggtcacactgaagaatcaatgactgatgacaaaaccactaaaataccctgcaaatcatcaccagaactagaagacaccgcaacaagctcaaagagacggcccaggacacgtgcccagaaagtagaagtgaaggaggagctgttagcagttggcaagctcacacaaacctcaggggagaccacgcacaccgacaaagagccggtaggtgagggcaaaggcacgaaagcatttaagcaacctgcaaagcggaagctggacgcagaagatgtaattggcagcaggagacagccaagagcacctaaggaaaaggcccaacccctggaagatctggccagcttccaagagctctctcaaacaccaggccacactgaggaactggcaaatggtgctgctgatagctttacaagcgctccaaagcaaacacctgacagtggaaaacctctaaaaatatccagaagagttcttcgggcccctaaagtagaacccgtgggagacgtggtaagcaccagagaccctgtaaaatcacaaagcaaaagcaacacttccctgcccccactgcccttcaagaggggaggtggcaaagatggaagcgtcacgggaaccaagaggctgcgctgcatgccagcaccagaggaaattgtggaggagctgccagccagcaagaagcagagggttgctcccagggcaagaggcaaatcatccgaacccgtggtcatcatgaagagaagtttgaggacttctgcaaaaagaattgaacctgcggaagagctgaacagcaacgacatgaaaaccaacaaagaggaacacaaattacaagactcggtccctgaaaataagggaatatccctgcgctccagacgccaaaataagactgaggcagaacagcaaataactgaggtctttgtattagcagaaagaatagaaataaacagaaatgaaaagaagcccatgaagacctccccagagatggacattcagaatccagatgatggagcccggaaacccatacctagagacaaagtcactgagaacaaaaggtgcttgaggtctgctagacagaatgagagctcccagcctaaggtggcagaggagagcggagggcagaagagtgcgaaggttctcatgcagaatcagaaagggaaaggagaagcaggaaattcagactccatgtgcctgagatcaagaaagacaaaaagccagcctgcagcaagcactttggagagcaaatctgtgcagagagtaacgcggagtgtcaagaggtgtgcagaaaatccaaagaaggctgaggacaatgtgtgtgtcaagaaaataagaaccagaagtcatagggacagtgaagatatttgacagaaaaatcgaactgggaaaaatataataaagttagttttgtgataagttctagtgcagtttttgtcataaattacaagtgaattctgtaagtaaggctgtcagtctgcttaagggaagaaaactttggatttgctgggtctgaatcggcttcataaactccactgggagcactgctgggctcctggactgagaatagttgaacaccgggggctttgtgaaggagtctgggccaaggtttgccctcagctttgcagaatgaagccttgaggtctgtcaccacccacagccaccctacagcagccttaactgtgacacttgccacactgtgtcgtcgtttgtttgcctatgtcctccagggcacggtggcaggaacaactatcctcgtctgtcccaacactgagcaggcactcggtaaacacgaatgaatggatgagcgcacggatgaatggagcttacaagatctgtctttccaatggccgggggcatttggtccccaaattaaggctattggacatctgcacaggacagtcctatttttgatgtcctttcctttctgaaaataaagttttgtgctttggagaatgactcgtgagcacatctttagggaccaagagtgactttctgtaaggagtgactcgtggcttgccttggtctcttgggaatacttttctaactagggttgctctcacctgagacattctccacccgcggaatctcagggtcccaggctgtgggccatcacgacctcaaactggctcctaatctccagctttcctgtcattgaaagcttcggaagtttactggctctgctcccgcctgttttctttctgactctatctggcagcccgatgccacccagtacaggaagtgacaccagtactctgtaaagcatcatcatccttggagagactgagcactcagcaccttcagccacgatttcaggatcgcttccttgtgagccgctgcctccgaaatctcctttgaagcccagacatctttctccagcttcagacttgtagatataactcgttcatcttcatttactttccactttgccccctgtcctctctgtgttccccaaatcagagaatagcccgccatcccccaggtcacctgtctggattcctccccattcacccaccttgccaggtgcaggtgaggatggtgcaccagacagggtagctgtcccccaaaatgtgccctgtgcgggcagtgccccgtctccacgtttgtttccccagtgtctggcggggagccaggtgacatcataaatacttgctgaatgaatgcagaaatcagcggtactgacttgtactatattggctgccatgatagggttctcacagcgtcatccatgatcgtaagggagaatgacattctgcttgagggagggaatagaaaggggcagggaggggacatctgagggcttcacagggctgcaaagggtacagggattgcaccagggcagaacaggggagggtgttcaaggaagagtggctcttagcagaggcactttggaaggtgtgaggcataaatgcttccttctacgtaggccaacctcaaaactttcagtaggaatgttgctatgatcaagttgttctaacactttagacttagtagtaattatgaacctcacatagaaaaatttcatccagccatatgcctgtggagtggaatattctgtttagtagaaaaatcctttagagttcagctctaaccagaaatcttgctgaagtatgtcagcaccttttctcaccctggtaagtacagtatttcaagagcacgctaagggtggttttcattttacagggctgttgatgatgggttaaaaatgttcatttaagggctacccccgtgtttaatagatgaacaccacttctacacaaccctccttggtactgggggagggagagatctgacaaatactgcccattcccctaggctgactggatttgagaacaaatacccacccatttccaccatggtatggtaacttctctgagcttcagtttccaagtgaatttccatgtaataggacattcccattaaatacaagctgtttttactttttcgcctcccagggcctgtgggatctggtcccccagcctctcttgggctttcttacactaactctgtacctaccatctcctgcctcccttaggcaggcacctccaaccaccacacactccctgctgttttccctgcctggaactttccctcctgccccaccaagatcatttcatccagtcctgagctcagcttaagggaggcttcttgcctgtgggttccctcacccccatgcctgtcctccaggctggggcaggttcttagtttgcctggaattgttctgtacctctttgtagcacgtagtgttgtggaaactaagccactaattgagtttctggctcccctcctggggttgtaagttttgttcattcatgagggccgactgcatttcctggttactctatcccagtgaccagccacaggagatgtccaataaagtatgtgatgaaatggtctta

SEQ ID NO: 69044 - DNA, 11443 bp, Homo sapiens
gggcgggaggactcgactcggtgggagccgctagagccgggcgcccggggacgtagcctgtagggccaccgggtccccgtcagaggcggcggcgggagcagcggggactgcaggccggggtgcagcgaacgcgaccccgcgggctgcggcccggtgtgtgcggagcgtggcgggcgcagcttaccgggcggaggtgagcgcggcgccggctcctcctgcggcggactttgggtgcgacttgacgagcggtggttcgacaagtggccttgcgggccggatcgtcccagtggaagagttgtaaatttgcttctggccttcccctacggattatacctggccttcccctacggattatactcaacttactgtttagaaaatgtggcccacgagacgcctggttactatcaaaaggagcggggtcgacggtccccactttcccctgagcctcagcacctgcttgtttggaaggggtattgaatgtgacatccgtatccagcttcctgttgtgtcaaaacaacattgcaaaattgaaatccatgagcaggaggcaatattacataatttcagttccacaaatccaacacaagtaaatgggtctgttattgatgagcctgtacggctaaaacatggagatgtaataactattattgatcgttccttcaggtatgaaaatgaaagtcttcagaatggaaggaagtcaactgaatttccaagaaaaatacgtgaacaggagccagcacgtcgtgtctcaagatctagcttctcttctgaccctgatgagaaagctcaagattccaaggcctattcaaaaatcactgaaggaaaagtttcaggaaatcctcaggtacatatcaagaatgtcaaagaagacagtaccgcagatgactcaaaagacagtgttgctcagggaacaactaatgttcattcctcagaacatgctggacgtaatggcagaaatgcagctgatcccatttctggggattttaaagaaatttccagcgttaaattagtgagccgttatggagaattgaagtctgttcccactacacaatgtcttgacaatagcaaaaaaaatgaatctcccttttggaagctttatgagtcagtgaagaaagagttggatgtaaaatcacaaaaagaaaatgtcctacagtattgtagaaaatctggattacaaactgattacgcaacagagaaagaaagtgctgatggtttacagggggagacccaactgttggtctcgcgtaagtcaagaccaaaatctggtgggagcggccacgctgtggcagagcctgcttcacctgaacaagagcttgaccagaacaaggggaagggaagagacgtggagtctgttcagactcccagcaaggctgtgggcgccagctttcctctctatgagccggctaaaatgaagacccctgtacaatattcacagcaacaaaattctccacaaaaacataagaacaaagacctgtatactactggtagaagagaatctgtgaatctgggtaaaagtgaaggcttcaaggctggtgataaaactcttactcccaggaagctttcaactagaaatcgaacaccagctaaagttgaagatgcagctgactctgccactaagccagaaaatctctcttccaaaaccagaggaagtattcctacagatgtggaagttctgcctacggaaactgaaattcacaatgagccatttttaactctgtggctcactcaagttgagaggaagatccaaaaggattccctcagcaagcctgagaaattgggcactacagctggacagatgtgctctgggttacctggtcttagttcagttgatatcaacaactttggtgattccattaatgagagtgagggaatacctttgaaaagaaggcgtgtgtcctttggtgggcacctaagacctgaactatttgatgaaaacttgcctcctaatacgcctctcaaaaggggagaagccccaaccaaaagaaagtctctggtaatgcacactccacctgtcctgaagaaaatcatcaaggaacagcctcaaccatcaggaaaacaagagtcaggttcagaaatccatgtggaagtgaaggcacaaagcttggttataagccctccagctcctagtcctaggaaaactccagttgccagtgatcaacgccgtaggtcctgcaaaacagcccctgcttccagcagcaaatctcagacagaggttcctaagagaggaggagaaagagtggcaacctgccttcaaaagagagtgtctatcagccgaagtcaacatgatattttacagatgatatgttccaaaagaagaagtggtgcttcggaagcaaatctgattgttgcaaaatcatgggcagatgtagtaaaacttggtgcaaaacaaacacaaactaaagtcataaaacatggtcctcaaaggtcaatgaacaaaaggcaaagaagacctgctactccaaagaagcctgtgggcgaagttcacagtcaatttagtacaggccacgcaaactctccttgtaccataataatagggaaagctcatactgaaaaagtacatgtgcctgctcgaccctacagagtgctcaacaacttcatttccaaccaaaaaatggactttaaggaagatctttcaggaatagctgaaatgttcaagaccccagtgaaggagcaaccgcagttgacaagcacatgtcacatcgctatttcaaattcagagaatttgcttggaaaacagtttcaaggaactgattcaggagaagaacctctgctccccacctcagagagttttggaggaaatgtgttcttcagtgcacagaatgcagcaaaacagccatctgataaatgctctgcaagccctcccttaagacggcagtgtattagagaaaatggaaacgtagcaaaaacgcccaggaacacctacaaaatgacttctctggagacaaaaacttcagatactgagacagagccttcaaaaacagtatccactgtaaacaggtcaggaaggtctacagagttcaggaatatacagaagctacctgtggaaagtaagagtgaagaaacaaatacagaaattgttgagtgcatcctaaaaagaggtcagaaggcaacactactacaacaaaggagagaaggagagatgaaggaaatagaaagaccttttgagacatataaggaaaatattgaattaaaagaaaacgatgaaaagatgaaagcaatgaagagatcaagaacttgggggcagaaatgtgcaccaatgtctgacctgacagacctcaagagcttgcctgatacagaactcatgaaagacacggcacgtggccagaatctcctccaaacccaagatcatgccaaggcaccaaagagtgagaaaggcaaaatcactaaaatgccctgccagtcattacaaccagaaccaataaacaccccaacacacacaaaacaacagttgaaggcatccctggggaaagtaggtgtgaaagaagagctcctagcagtcggcaagttcacacggacgtcaggggagaccacgcacacgcacagagagccagcaggagatggcaagagcatcagaacgtttaaggagtctccaaagcagatcctggacccagcagcccgtgtaactggaatgaagaagtggccaagaacgcctaaggaagaggcccagtcactagaagacctggctggcttcaaagagctcttccagacaccaggtccctctgaggaatcaatgactgatgagaaaactaccaaaatagcctgcaaatctccaccaccagaatcagtggacactccaacaagcacaaagcaatggcctaagagaagtctcaggaaagcagatgtagaggaagaattcttagcactcaggaaactaacaccatcagcagggaaagccatgcttacgcccaaaccagcaggaggtgatgagaaagacattaaagcatttatgggaactccagtgcagaaactggacctggcaggaactttacctggcagcaaaagacagctacagactcctaaggaaaaggcccaggctctagaagacctggctggctttaaagagctcttccagactcctggtcacaccgaggaattagtggctgctggtaaaaccactaaaataccctgcgactctccacagtcagacccagtggacaccccaacaagcacaaagcaacgacccaagagaagtatcaggaaagcagatgtagagggagaactcttagcgtgcaggaatctaatgccatcagcaggcaaagccatgcacacgcctaaaccatcagtaggtgaagagaaagacatcatcatatttgtgggaactccagtgcagaaactggacctgacagagaacttaaccggcagcaagagacggccacaaactcctaaggaagaggcccaggctctggaagacctgactggctttaaagagctcttccagacccctggtcatactgaagaagcagtggctgctggcaaaactactaaaatgccctgcgaatcttctccaccagaatcagcagacaccccaacaagcacaagaaggcagcccaagacacctttggagaaaagggacgtacagaaggagctctcagccctgaagaagctcacacagacatcaggggaaaccacacacacagataaagtaccaggaggtgaggataaaagcatcaacgcgtttagggaaactgcaaaacagaaactggacccagcagcaagtgtaactggtagcaagaggcacccaaaaactaaggaaaaggcccaacccctagaagacctggctggcttgaaagagctcttccagacaccagtatgcactgacaagcccacgactcacgagaaaactaccaaaatagcctgcagatcacaaccagacccagtggacacaccaacaagctccaagccacagtccaagagaagtctcaggaaagtggacgtagaagaagaattcttcgcactcaggaaacgaacaccatcagcaggcaaagccatgcacacacccaaaccagcagtaagtggtgagaaaaacatctacgcatttatgggaactccagtgcagaaactggacctgacagagaacttaactggcagcaagagacggctacaaactcctaaggaaaaggcccaggctctagaagacctggctggctttaaagagctcttccagacacgaggtcacactgaggaatcaatgactaacgataaaactgccaaagtagcctgcaaatcttcacaaccagacccagacaaaaacccagcaagctccaagcgacggctcaagacatccctggggaaagtgggcgtgaaagaagagctcctagcagttggcaagctcacacagacatcaggagagactacacacacacacacagagccaacaggagatggtaagagcatgaaagcatttatggagtctccaaagcagatcttagactcagcagcaagtctaactggcagcaagaggcagctgagaactcctaagggaaagtctgaagtccctgaagacctggccggcttcatcgagctcttccagacaccaagtcacactaaggaatcaatgactaacgaaaaaactaccaaagtatcctacagagcttcacagccagacctagtggacaccccaacaagctccaagccacagcccaagagaagtctcaggaaagcagacactgaagaagaatttttagcatttaggaaacaaacgccatcagcaggcaaagccatgcacacacccaaaccagcagtaggtgaagagaaagacatcaacacgtttttgggaactccagtgcagaaactggaccagccaggaaatttacctggcagcaatagacggctacaaactcgtaaggaaaaggcccaggctctagaagaactgactggcttcagagagcttttccagacaccatgcactgataaccccacgactgatgagaaaactaccaaaaaaatactctgcaaatctccgcaatcagacccagcggacaccccaacaaacacaaagcaacggcccaagagaagcctcaagaaagcagacgtagaggaagaatttttagcattcaggaaactaacaccatcagcaggcaaagccatgcacacgcctaaagcagcagtaggtgaagagaaagacatcaacacatttgtggggactccagtggagaaactggacctgctaggaaatttacctggcagcaagagacggccacaaactcctaaagaaaaggccaaggctctagaagatctggctggcttcaaagagctcttccagacaccaggtcacactgaggaatcaatgaccgatgacaaaatcacagaagtatcctgcaaatctccacaaccagacccagtcaaaaccccaacaagctccaagcaacgactcaagatatccttggggaaagtaggtgtgaaagaagaggtcctaccagtcggcaagctcacacagacgtcagggaagaccacacagacacacagagagacagcaggagatggaaagagcatcaaagcgtttaaggaatctgcaaagcagatgctggacccagcaaactatggaactgggatggagaggtggccaagaacacctaaggaagaggcccaatcactagaagacctggccggcttcaaagagctcttccagacaccagaccacactgaggaatcaacaactgatgacaaaactaccaaaatagcctgcaaatctccaccaccagaatcaatggacactccaacaagcacaaggaggcggcccaaaacacctttggggaaaagggatatagtggaagagctctcagccctgaagcagctcacacagaccacacacacagacaaagtaccaggagatgaggataaaggcatcaacgtgttcagggaaactgcaaaacagaaactggacccagcagcaagtgtaactggtagcaagaggcagccaagaactcctaagggaaaagcccaacccctagaagacttggctggcttgaaagagctcttccagacaccaatatgcactgacaagcccacgactcatgagaaaactaccaaaatagcctgcagatctccacaaccagacccagtgggtaccccaacaatcttcaagccacagtccaagagaagtctcaggaaagcagacgtagaggaagaatccttagcactcaggaaacgaacaccatcagtagggaaagctatggacacacccaaaccagcaggaggtgatgagaaagacatgaaagcatttatgggaactccagtgcagaaattggacctgccaggaaatttacctggcagcaaaagatggccacaaactcctaaggaaaaggcccaggctctagaagacctggctggcttcaaagagctcttccagacaccaggcactgacaagcccacgactgatgagaaaactaccaaaatagcctgcaaatctccacaaccagacccagtggacaccccagcaagcacaaagcaacggcccaagagaaacctcaggaaagcagacgtagaggaagaatttttagcactcaggaaacgaacaccatcagcaggcaaagccatggacacaccaaaaccagcagtaagtgatgagaaaaatatcaacacatttgtggaaactccagtgcagaaactggacctgctaggaaatttacctggcagcaagagacagccacagactcctaaggaaaaggctgaggctctagaggacctggttggcttcaaagaactcttccagacaccaggtcacactgaggaatcaatgactgatgacaaaatcacagaagtatcctgtaaatctccacagccagagtcattcaaaacctcaagaagctccaagcaaaggctcaagatacccctggtgaaagtggacatgaaagaagagcccctagcagtcagcaagctcacacggacatcaggggagactacgcaaacacacacagagccaacaggagatagtaagagcatcaaagcgtttaaggagtctccaaagcagatcctggacccagcagcaagtgtaactggtagcaggaggcagctgagaactcgtaaggaaaaggcccgtgctctagaagacctggttgacttcaaagagctcttctcagcaccaggtcacactgaagagtcaatgactattgacaaaaacacaaaaattccctgcaaatctcccccaccagaactaacagacactgccacgagcacaaagagatgccccaagacacgtcccaggaaagaagtaaaagaggagctctcagcagttgagaggctcacgcaaacatcagggcaaagcacacacacacacaaagaaccagcaagcggtgatgagggcatcaaagtattgaagcaacgtgcaaagaagaaaccaaacccagtagaagaggaacccagcaggagaaggccaagagcacctaaggaaaaggcccaacccctggaagacctggccggcttcacagagctctctgaaacatcaggtcacactcaggaatcactgactgctggcaaagccactaaaataccctgcgaatctcccccactagaagtggtagacaccacagcaagcacaaagaggcatctcaggacacgtgtgcagaaggtacaagtaaaagaagagccttcagcagtcaagttcacacaaacatcaggggaaaccacggatgcagacaaagaaccagcaggtgaagataaaggcatcaaagcattgaaggaatctgcaaaacagacaccggctccagcagcaagtgtaactggcagcaggagacggccaagagcacccagggaaagtgcccaagccatagaagacctagctggcttcaaagacccagcagcaggtcacactgaagaatcaatgactgatgacaaaaccactaaaataccctgcaaatcatcaccagaactagaagacaccgcaacaagctcaaagagacggcccaggacacgtgcccagaaagtagaagtgaaggaggagctgttagcagttggcaagctcacacaaacctcaggggagaccacgcacaccgacaaagagccggtaggtgagggcaaaggcacgaaagcatttaagcaacctgcaaagcggaagctggacgcagaagatgtaattggcagcaggagacagccaagagcacctaaggaaaaggcccaacccctggaagatctggccagcttccaagagctctctcaaacaccaggccacactgaggaactggcaaatggtgctgctgatagctttacaagcgctccaaagcaaacacctgacagtggaaaacctctaaaaatatccagaagagttcttcgggcccctaaagtagaacccgtgggagacgtggtaagcaccagagaccctgtaaaatcacaaagcaaaagcaacacttccctgcccccactgcccttcaagaggggaggtggcaaagatggaagcgtcacgggaaccaagaggctgcgctgcatgccagcaccagaggaaattgtggaggagctgccagccagcaagaagcagagggttgctcccagggcaagaggcaaatcatccgaacccgtggtcatcatgaagagaagtttgaggacttctgcaaaaagaattgaacctgcggaagagctgaacagcaacgacatgaaaaccaacaaagaggaacacaaattacaagactcggtccctgaaaataagggaatatccctgcgctccagacgccaaaataagactgaggcagaacagcaaataactgaggtctttgtattagcagaaagaatagaaataaacagaaatgaaaagaagcccatgaagacctccccagagatggacattcagaatccagatgatggagcccggaaacccatacctagagacaaagtcactgagaacaaaaggtgcttgaggtctgctagacagaatgagagctcccagcctaaggtggcagaggagagcggagggcagaagagtgcgaaggttctcatgcagaatcagaaagggaaaggagaagcaggaaattcagactccatgtgcctgagatcaagaaagacaaaaagccagcctgcagcaagcactttggagagcaaatctgtgcagagagtaacgcggagtgtcaagaggtgtgcagaaaatccaaagaaggctgaggacaatgtgtgtgtcaagaaaataagaaccagaagtcatagggacagtgaagatatttgacagaaaaatcgaactgggaaaaatataataaagttagttttgtgataagttctagtgcagtttttgtcataaattacaagtgaattctgtaagtaaggctgtcagtctgcttaagggaagaaaactttggatttgctgggtctgaatcggcttcataaactccactgggagcactgctgggctcctggactgagaatagttgaacaccgggggctttgtgaaggagtctgggccaaggtttgccctcagctttgcagaatgaagccttgaggtctgtcaccacccacagccaccctacagcagccttaactgtgacacttgccacactgtgtcgtcgtttgtttgcctatgtcctccagggcacggtggcaggaacaactatcctcgtctgtcccaacactgagcaggcactcggtaaacacgaatgaatggatgagcgcacggatgaatggagcttacaagatctgtctttccaatggccgggggcatttggtccccaaattaaggctattggacatctgcacaggacagtcctatttttgatgtcctttcctttctgaaaataaagttttgtgctttggagaatgactcgtgagcacatctttagggaccaagagtgactttctgtaaggagtgactcgtggcttgccttggtctcttgggaatacttttctaactagggttgctctcacctgagacattctccacccgcggaatctcagggtcccaggctgtgggccatcacgacctcaaactggctcctaatctccagctttcctgtcattgaaagcttcggaagtttactggctctgctcccgcctgttttctttctgactctatctggcagcccgatgccacccagtacaggaagtgacaccagtactctgtaaagcatcatcatccttggagagactgagcactcagcaccttcagccacgatttcaggatcgcttccttgtgagccgctgcctccgaaatctcctttgaagcccagacatctttctccagcttcagacttgtagatataactcgttcatcttcatttactttccactttgccccctgtcctctctgtgttccccaaatcagagaatagcccgccatcccccaggtcacctgtctggattcctccccattcacccaccttgccaggtgcaggtgaggatggtgcaccagacagggtagctgtcccccaaaatgtgccctgtgcgggcagtgccccgtctccacgtttgtttccccagtgtctggcggggagccaggtgacatcataaatacttgctgaatgaatgcaga

SEQ ID NO: 69045 - DNA, 11448 bp, Homo sapiens
  misc_feature (11409)..(11409): n is a, c, g, or t
gggcgggaggactcgactcggtgggagccgctagagccgggcgcccggggacgtagcctgtagggccaccgggtccccgtcagaggcggcggcgggagcagcggggactgcaggccggggtgcagcgaacgcgaccccgcgggctgcggcccggtgtgtgcggagcgtggcgggcgcagcttaccgggcggaggtgagcgcggcgccggctcctcctgcggcggactttgggtgcgacttgacgagcggtggttcgacaagtggccttgcgggccggatcgtcccagtggaagagttgtaaatttgcttctggccttcccctacggattatacctggccttcccctacggattatactcaacttactgtttagaaaatgtggcccacgagacgcctggttactatcaaaaggagcggggtcgacggtccccactttcccctgagcctcagcacctgcttgtttggaaggggtattgaatgtgacatccgtatccagcttcctgttgtgtcaaaacaacattgcaaaattgaaatccatgagcaggaggcaatattacataatttcagttccacaaatccaacacaagtaaatgggtctgttattgatgagcctgtacggctaaaacatggagatgtaataactattattgatcgttccttcaggtatgaaaatgaaagtcttcagaatggaaggaagtcaactgaatttccaagaaaaatacgtgaacaggagccagcacgtcgtgtctcaagatctagcttctcttctgaccctgatgagaaagctcaagattccaaggcctattcaaaaatcactgaaggaaaagtttcaggaaatcctcaggtacatatcaagaatgtcaaagaagacagtaccgcagatgactcaaaagacagtgttgctcagggaacaactaatgttcattcctcagaacatgctggacgtaatggcagaaatgcagctgatcccatttctggggattttaaagaaatttccagcgttaaattagtgagccgttatggagaattgaagtctgttcccactacacaatgtcttgacaatagcaaaaaaaatgaatctcccttttggaagctttatgagtcagtgaagaaagagttggatgtaaaatcacaaaaagaaaatgtcctacagtattgtagaaaatctggattacaaactgattacgcaacagagaaagaaagtgctgatggtttacagggggagacccaactgttggtctcgcgtaagtcaagaccaaaatctggtgggagcggccacgctgtggcagagcctgcttcacctgaacaagagcttgaccagaacaaggggaagggaagagacgtggagtctgttcagactcccagcaaggctgtgggcgccagctttcctctctatgagccggctaaaatgaagacccctgtacaatattcacagcaacaaaattctccacaaaaacataagaacaaagacctgtatactactggtagaagagaatctgtgaatctgggtaaaagtgaaggcttcaaggctggtgataaaactcttactcccaggaagctttcaactagaaatcgaacaccagctaaagttgaagatgcagctgactctgccactaagccagaaaatctctcttccaaaaccagaggaagtattcctacagatgtggaagttctgcctacggaaactgaaattcacaatgagccatttttaactctgtggctcactcaagttgagaggaagatccaaaaggattccctcagcaagcctgagaaattgggcactacagctggacagatgtgctctgggttacctggtcttagttcagttgatatcaacaactttggtgattccattaatgagagtgagggaatacctttgaaaagaaggcgtgtgtcctttggtgggcacctaagacctgaactatttgatgaaaacttgcctcctaatacgcctctcaaaaggggagaagccccaaccaaaagaaagtctctggtaatgcacactccacctgtcctgaagaaaatcatcaaggaacagcctcaaccatcaggaaaacaagagtcaggttcagaaatccatgtggaagtgaaggcacaaagcttggttataagccctccagctcctagtcctaggaaaactccagttgccagtgatcaacgccgtaggtcctgcaaaacagcccctgcttccagcagcaaatctcagacagaggttcctaagagaggaggagaaagagtggcaacctgccttcaaaagagagtgtctatcagccgaagtcaacatgatattttacagatgatatgttccaaaagaagaagtggtgcttcggaagcaaatctgattgttgcaaaatcatgggcagatgtagtaaaacttggtgcaaaacaaacacaaactaaagtcataaaacatggtcctcaaaggtcaatgaacaaaaggcaaagaagacctgctactccaaagaagcctgtgggcgaagttcacagtcaatttagtacaggccacgcaaactctccttgtaccataataatagggaaagctcatactgaaaaagtacatgtgcctgctcgaccctacagagtgctcaacaacttcatttccaaccaaaaaatggactttaaggaagatctttcaggaatagctgaaatgttcaagaccccagtgaaggagcaaccgcagttgacaagcacatgtcacatcgctatttcaaattcagagaatttgcttggaaaacagtttcaaggaactgattcaggagaagaacctctgctccccacctcagagagttttggaggaaatgtgttcttcagtgcacagaatgcagcaaaacagccatctgataaatgctctgcaagccctcccttaagacggcagtgtattagagaaaatggaaacgtagcaaaaacgcccaggaacacctacaaaatgacttctctggagacaaaaacttcagatactgagacagagccttcaaaaacagtatccactgtaaacaggtcaggaaggtctacagagttcaggaatatacagaagctacctgtggaaagtaagagtgaagaaacaaatacagaaattgttgagtgcatcctaaaaagaggtcagaaggcaacactactacaacaaaggagagaaggagagatgaaggaaatagaaagaccttttgagacatataaggaaaatattgaattaaaagaaaacgatgaaaagatgaaagcaatgaagagatcaagaacttgggggcagaaatgtgcaccaatgtctgacctgacagacctcaagagcttgcctgatacagaactcatgaaagacacggcacgtggccagaatctcctccaaacccaagatcatgccaaggcaccaaagagtgagaaaggcaaaatcactaaaatgccctgccagtcattacaaccagaaccaataaacaccccaacacacacaaaacaacagttgaaggcatccctggggaaagtaggtgtgaaagaagagctcctagcagtcggcaagttcacacggacgtcaggggagaccacgcacacgcacagagagccagcaggagatggcaagagcatcagaacgtttaaggagtctccaaagcagatcctggacccagcagcccgtgtaactggaatgaagaagtggccaagaacgcctaaggaagaggcccagtcactagaagacctggctggcttcaaagagctcttccagacaccaggtccctctgaggaatcaatgactgatgagaaaactaccaaaatagcctgcaaatctccaccaccagaatcagtggacactccaacaagcacaaagcaatggcctaagagaagtctcaggaaagcagatgtagaggaagaattcttagcactcaggaaactaacaccatcagcagggaaagccatgcttacgcccaaaccagcaggaggtgatgagaaagacattaaagcatttatgggaactccagtgcagaaactggacctggcaggaactttacctggcagcaaaagacagctacagactcctaaggaaaaggcccaggctctagaagacctggctggctttaaagagctcttccagactcctggtcacaccgaggaattagtggctgctggtaaaaccactaaaataccctgcgactctccacagtcagacccagtggacaccccaacaagcacaaagcaacgacccaagagaagtatcaggaaagcagatgtagagggagaactcttagcgtgcaggaatctaatgccatcagcaggcaaagccatgcacacgcctaaaccatcagtaggtgaagagaaagacatcatcatatttgtgggaactccagtgcagaaactggacctgacagagaacttaaccggcagcaagagacggccacaaactcctaaggaagaggcccaggctctggaagacctgactggctttaaagagctcttccagacccctggtcatactgaagaagcagtggctgctggcaaaactactaaaatgccctgcgaatcttctccaccagaatcagcagacaccccaacaagcacaagaaggcagcccaagacacctttggagaaaagggacgtacagaaggagctctcagccctgaagaagctcacacagacatcaggggaaaccacacacacagataaagtaccaggaggtgaggataaaagcatcaacgcgtttagggaaactgcaaaacagaaactggacccagcagcaagtgtaactggtagcaagaggcacccaaaaactaaggaaaaggcccaacccctagaagacctggctggcttgaaagagctcttccagacaccagtatgcactgacaagcccacgactcacgagaaaactaccaaaatagcctgcagatcacaaccagacccagtggacacaccaacaagctccaagccacagtccaagagaagtctcaggaaagtggacgtagaagaagaattcttcgcactcaggaaacgaacaccatcagcaggcaaagccatgcacacacccaaaccagcagtaagtggtgagaaaaacatctacgcatttatgggaactccagtgcagaaactggacctgacagagaacttaactggcagcaagagacggctacaaactcctaaggaaaaggcccaggctctagaagacctggctggctttaaagagctcttccagacacgaggtcacactgaggaatcaatgactaacgataaaactgccaaagtagcctgcaaatcttcacaaccagacccagacaaaaacccagcaagctccaagcgacggctcaagacatccctggggaaagtgggcgtgaaagaagagctcctagcagttggcaagctcacacagacatcaggagagactacacacacacacacagagccaacaggagatggtaagagcatgaaagcatttatggagtctccaaagcagatcttagactcagcagcaagtctaactggcagcaagaggcagctgagaactcctaagggaaagtctgaagtccctgaagacctggccggcttcatcgagctcttccagacaccaagtcacactaaggaatcaatgactaacgaaaaaactaccaaagtatcctacagagcttcacagccagacctagtggacaccccaacaagctccaagccacagcccaagagaagtctcaggaaagcagacactgaagaagaatttttagcatttaggaaacaaacgccatcagcaggcaaagccatgcacacacccaaaccagcagtaggtgaagagaaagacatcaacacgtttttgggaactccagtgcagaaactggaccagccaggaaatttacctggcagcaatagacggctacaaactcgtaaggaaaaggcccaggctctagaagaactgactggcttcagagagcttttccagacaccatgcactgataaccccacgactgatgagaaaactaccaaaaaaatactctgcaaatctccgcaatcagacccagcggacaccccaacaaacacaaagcaacggcccaagagaagcctcaagaaagcagacgtagaggaagaatttttagcattcaggaaactaacaccatcagcaggcaaagccatgcacacgcctaaagcagcagtaggtgaagagaaagacatcaacacatttgtggggactccagtggagaaactggacctgctaggaaatttacctggcagcaagagacggccacaaactcctaaagaaaaggccaaggctctagaagatctggctggcttcaaagagctcttccagacaccaggtcacactgaggaatcaatgaccgatgacaaaatcacagaagtatcctgcaaatctccacaaccagacccagtcaaaaccccaacaagctccaagcaacgactcaagatatccttggggaaagtaggtgtgaaagaagaggtcctaccagtcggcaagctcacacagacgtcagggaagaccacacagacacacagagagacagcaggagatggaaagagcatcaaagcgtttaaggaatctgcaaagcagatgctggacccagcaaactatggaactgggatggagaggtggccaagaacacctaaggaagaggcccaatcactagaagacctggccggcttcaaagagctcttccagacaccagaccacactgaggaatcaacaactgatgacaaaactaccaaaatagcctgcaaatctccaccaccagaatcaatggacactccaacaagcacaaggaggcggcccaaaacacctttggggaaaagggatatagtggaagagctctcagccctgaagcagctcacacagaccacacacacagacaaagtaccaggagatgaggataaaggcatcaacgtgttcagggaaactgcaaaacagaaactggacccagcagcaagtgtaactggtagcaagaggcagccaagaactcctaagggaaaagcccaacccctagaagacttggctggcttgaaagagctcttccagacaccaatatgcactgacaagcccacgactcatgagaaaactaccaaaatagcctgcagatctccacaaccagacccagtgggtaccccaacaatcttcaagccacagtccaagagaagtctcaggaaagcagacgtagaggaagaatccttagcactcaggaaacgaacaccatcagtagggaaagctatggacacacccaaaccagcaggaggtgatgagaaagacatgaaagcatttatgggaactccagtgcagaaattggacctgccaggaaatttacctggcagcaaaagatggccacaaactcctaaggaaaaggcccaggctctagaagacctggctggcttcaaagagctcttccagacaccaggcactgacaagcccacgactgatgagaaaactaccaaaatagcctgcaaatctccacaaccagacccagtggacaccccagcaagcacaaagcaacggcccaagagaaacctcaggaaagcagacgtagaggaagaatttttagcactcaggaaacgaacaccatcagcaggcaaagccatggacacaccaaaaccagcagtaagtgatgagaaaaatatcaacacatttgtggaaactccagtgcagaaactggacctgctaggaaatttacctggcagcaagagacagccacagactcctaaggaaaaggctgaggctctagaggacctggttggcttcaaagaactcttccagacaccaggtcacactgaggaatcaatgactgatgacaaaatcacagaagtatcctgtaaatctccacagccagagtcattcaaaacctcaagaagctccaagcaaaggctcaagatacccctggtgaaagtggacatgaaagaagagcccctagcagtcagcaagctcacacggacatcaggggagactacgcaaacacacacagagccaacaggagatagtaagagcatcaaagcgtttaaggagtctccaaagcagatcctggacccagcagcaagtgtaactggtagcaggaggcagctgagaactcgtaaggaaaaggcccgtgctctagaagacctggttgacttcaaagagctcttctcagcaccaggtcacactgaagagtcaatgactattgacaaaaacacaaaaattccctgcaaatctcccccaccagaactaacagacactgccacgagcacaaagagatgccccaagacacgtcccaggaaagaagtaaaagaggagctctcagcagttgagaggctcacgcaaacatcagggcaaagcacacacacacacaaagaaccagcaagcggtgatgagggcatcaaagtattgaagcaacgtgcaaagaagaaaccaaacccagtagaagaggaacccagcaggagaaggccaagagcacctaaggaaaaggcccaacccctggaagacctggccggcttcacagagctctctgaaacatcaggtcacactcaggaatcactgactgctggcaaagccactaaaataccctgcgaatctcccccactagaagtggtagacaccacagcaagcacaaagaggcatctcaggacacgtgtgcagaaggtacaagtaaaagaagagccttcagcagtcaagttcacacaaacatcaggggaaaccacggatgcagacaaagaaccagcaggtgaagataaaggcatcaaagcattgaaggaatctgcaaaacagacaccggctccagcagcaagtgtaactggcagcaggagacggccaagagcacccagggaaagtgcccaagccatagaagacctagctggcttcaaagacccagcagcaggtcacactgaagaatcaatgactgatgacaaaaccactaaaataccctgcaaatcatcaccagaactagaagacaccgcaacaagctcaaagagacggcccaggacacgtgcccagaaagtagaagtgaaggaggagctgttagcagttggcaagctcacacaaacctcaggggagaccacgcacaccgacaaagagccggtaggtgagggcaaaggcacgaaagcatttaagcaacctgcaaagcggaagctggacgcagaagatgtaattggcagcaggagacagccaagagcacctaaggaaaaggcccaacccctggaagatctggccagcttccaagagctctctcaaacaccaggccacactgaggaactggcaaatggtgctgctgatagctttacaagcgctccaaagcaaacacctgacagtggaaaacctctaaaaatatccagaagagttcttcgggcccctaaagtagaacccgtgggagacgtggtaagcaccagagaccctgtaaaatcacaaagcaaaagcaacacttccctgcccccactgcccttcaagaggggaggtggcaaagatggaagcgtcacgggaaccaagaggctgcgctgcatgccagcaccagaggaaattgtggaggagctgccagccagcaagaagcagagggttgctcccagggcaagaggcaaatcatccgaacccgtggtcatcatgaagagaagtttgaggacttctgcaaaaagaattgaacctgcggaagagctgaacagcaacgacatgaaaaccaacaaagaggaacacaaattacaagactcggtccctgaaaataagggaatatccctgcgctccagacgccaaaataagactgaggcagaacagcaaataactgaggtctttgtattagcagaaagaatagaaataaacagaaatgaaaagaagcccatgaagacctccccagagatggacattcagaatccagatgatggagcccggaaacccatacctagagacaaagtcactgagaacaaaaggtgcttgaggtctgctagacagaatgagagctcccagcctaaggtggcagaggagagcggagggcagaagagtgcgaaggttctcatgcagaatcagaaagggaaaggagaagcaggaaattcagactccatgtgcctgagatcaagaaagacaaaaagccagcctgcagcaagcactttggagagcaaatctgtgcagagagtaacgcggagtgtcaagaggtgtgcagaaaatccaaagaaggctgaggacaatgtgtgtgtcaagaaaataagaaccagaagtcatagggacagtgaagatatttgacagaaaaatcgaactgggaaaaatataataaagttagttttgtgataagttctagtgcagtttttgtcataaattacaagtgaattctgtaagtaaggctgtcagtctgcttaagggaagaaaactttggatttgctgggtctgaatcggcttcataaactccactgggagcactgctgggctcctggactgagaatagttgaacaccgggggctttgtgaaggagtctgggccaaggtttgccctcagctttgcagaatgaagccttgaggtctgtcaccacccacagccaccctacagcagccttaactgtgacacttgccacactgtgtcgtcgtttgtttgcctatgtcctccagggcacggtggcaggaacaactatcctcgtctgtcccaacactgagcaggcactcggtaaacacgaatgaatggatgagcgcacggatgaatggagcttacaagatctgtctttccaatggccgggggcatttggtccccaaattaaggctattggacatctgcacaggacagtcctatttttgatgtcctttcctttctgaaaataaagttttgtgctttggagaatgactcgtgagcacatctttagggaccaagagtgactttctgtaaggagtgactcgtggcttgccttggtctcttgggaatacttttctaactagggttgctctcacctgagacattctccacccgcggaatctcagggtcccaggctgtgggccatcacgacctcaaactggctcctaatctccagctttcctgtcattgaaagcttcggaagtttactggctctgctcccgcctgttttctttctgactctatctggcagcccgatgccacccagtacaggaagtgacaccagtactctgtaaagcatcatcatccttggagagactgagcactcagcaccttcagccacgatttcaggatcgcttccttgtgagccgctgcctccgaaatctcctttgaagcccagacatctttctccagcttcagacttgtagatataactcgttcatcttcatttactttccactttgccccctgtcctctctgtgttccccaaatcagagaatagcccgccatcccccaggtcacctgtctggattcctccccattcacccaccttgccaggtgcaggtgaggatggtgcaccagacagggtagctgtcccccaaaatgtgccctgtgcgggcagtgccccgtctccacgtttgtttccccagtgtctggcggggagcgtntgcattcattcagcaagtatttatgatgtcacgtcgacg

SEQ ID NO: 69046 - DNA, 10729 bp, Homo sapiens
gggcgggaggactcgactcggtgggagccgctagagccgggcgcccggggacgtagcctgtagggccaccgggtccccgtcagaggcggcggcgggagcagcggggactgcaggccggggtgcagcgaacgcgaccccgcgggctgcggcccggtgtgtgcggagcgtggcgggcgcagcttaccgggcggaggtgagcgcggcgccggctcctcctgcggcggactttgggtgcgacttgacgagcggtggttcgacaagtggccttgcgggccggatcgtcccagtggaagagttgtaaatttgcttctggccttcccctacggattatacctggccttcccctacggattatactcaacttactgtttagaaaatgtggcccacgagacgcctggttactatcaaaaggagcggggtcgacggtccccactttcccctgagcctcagcacctgcttgtttggaaggggtattgaatgtgacatccgtatccagcttcctgttgtgtcaaaacaacattgcaaaattgaaatccatgagcaggaggcaatattacataatttcagttccacaaatccaacacaagtaaatgggtctgttattgatgagcctgtacggctaaaacatggagatgtaataactattattgatcgttccttcaggtatgaaaatgaaagtcttcagaatggaaggaagtcaactgaatttccaagaaaaatacgtgaacaggagccagcacgtcgtgtctcaagatctagcttctcttctgaccctgatgagaaagctcaagattccaaggcctattcaaaaatcactgaaggaaaagtttcaggaaatcctcaggtacatatcaagaatgtcaaagaagacagtaccgcagatgactcaaaagacagtgttgctcagggaacaactaatgttcattcctcagaacatgctggacgtaatggcagaaatgcagctgatcccatttctggggattttaaagaaatttccagcgttaaattagtgagccgttatggagaattgaagtctgttcccactacacaatgtcttgacaatagcaaaaaaaatgaatctcccttttggaagctttatgagtcagtgaagaaagagttggatgtaaaatcacaaaaagaaaatgtcctacagtattgtagaaaatctggattacaaactgattacgcaacagagaaagaaagtgctgatggtttacagggggagacccaactgttggtctcgcgtaagtcaagaccaaaatctggtgggagcggccacgctgtggcagagcctgcttcacctgaacaagagcttgaccagaacaaggggaagggaagagacgtggagtctgttcagactcccagcaaggctgtgggcgccagctttcctctctatgagccggctaaaatgaagacccctgtacaatattcacagcaacaaaattctccacaaaaacataagaacaaagacctgtatactactggtagaagagaatctgtgaatctgggtaaaagtgaaggcttcaaggctggtgataaaactcttactcccaggaagctttcaactagaaatcgaacaccagctaaagttgaagatgcagctgactctgccactaagccagaaaatctctcttccaaaaccagaggaagtattcctacagatgtggaagttctgcctacggaaactgaaattcacaatgagccatttttaactctgtggctcactcaagttgagaggaagatccaaaaggattccctcagcaagcctgagaaattgggcactacagctggacagatgtgctctgggttacctggtcttagttcagttgatatcaacaactttggtgattccattaatgagagtgagggaatacctttgaaaagaaggcgtgtgtcctttggtgggcacctaagacctgaactatttgatgaaaacttgcctcctaatacgcctctcaaaaggggagaagccccaaccaaaagaaagtctctggtaatgcacactccacctgtcctgaagaaaatcatcaaggaacagcctcaaccatcaggaaaacaagagtcaggttcagaaatccatgtggaagtgaaggcacaaagcttggttataagccctccagctcctagtcctaggaaaactccagttgccagtgatcaacgccgtaggtcctgcaaaacagcccctgcttccagcagcaaatctcagacagaggttcctaagagaggaggagaaagagtggcaacctgccttcaaaagagagtgtctatcagccgaagtcaacatgatattttacagatgatatgttccaaaagaagaagtggtgcttcggaagcaaatctgattgttgcaaaatcatgggcagatgtagtaaaacttggtgcaaaacaaacacaaactaaagtcataaaacatggtcctcaaaggtcaatgaacaaaaggcaaagaagacctgctactccaaagaagcctgtgggcgaagttcacagtcaatttagtacaggccacgcaaactctccttgtaccataataatagggaaagctcatactgaaaaagtacatgtgcctgctcgaccctacagagtgctcaacaacttcatttccaaccaaaaaatggactttaaggaagatctttcaggaatagctgaaatgttcaagaccccagtgaaggagcaaccgcagttgacaagcacatgtcacatcgctatttcaaattcagagaatttgcttggaaaacagtttcaaggaactgattcaggagaagaacctctgctccccacctcagagagttttggaggaaatgtgttcttcagtgcacagaatgcagcaaaacagccatctgataaatgctctgcaagccctcccttaagacggcagtgtattagagaaaatggaaacgtagcaaaaacgcccaggaacacctacaaaatgacttctctggagacaaaaacttcagatactgagacagagccttcaaaaacagtatccactgtaaacaggtcaggaaggtctacagagttcaggaatatacagaagctacctgtggaaagtaagagtgaagaaacaaatacagaaattgttgagtgcatcctaaaaagaggtcagaaggcaacactactacaacaaaggagagaaggagagatgaaggaaatagaaagaccttttgagacatataaggaaaatattgaattaaaagaaaacgatgaaaagatgaaagcaatgaagagatcaagaacttgggggcagaaatgtgcaccaatgtctgacctgacagacctcaagagcttgcctgatacagaactcatgaaagacacggcacgtggccagaatctcctccaaacccaagatcatgccaaggcaccaaagagtgagaaaggcaaaatcactaaaatgccctgccagtcattacaaccagaaccaataaacaccccaacacacacaaaacaacagttgaaggcatccctggggaaagtaggtgtgaaagaagagctcctagcagtcggcaagttcacacggacgtcaggggagaccacgcacacgcacagagagccagcaggagatggcaagagcatcagaacgtttaaggagtctccaaagcagatcctggacccagcagcccgtgtaactggaatgaagaagtggccaagaacgcctaaggaagaggcccagtcactagaagacctggctggcttcaaagagctcttccagacaccaggtccctctgaggaatcaatgactgatgagaaaactaccaaaatagcctgcaaatctccaccaccagaatcagtggacactccaacaagcacaaagcaatggcctaagagaagtctcaggaaagcagatgtagaggaagaattcttagcactcaggaaactaacaccatcagcagggaaagccatgcttacgcccaaaccagcaggaggtgatgagaaagacattaaagcatttatgggaactccagtgcagaaactggacctggcaggaactttacctggcagcaaaagacagctacagactcctaaggaaaaggcccaggctctagaagacctggctggctttaaagagctcttccagactcctggtcacaccgaggaattagtggctgctggtaaaaccactaaaataccctgcgactctccacagtcagacccagtggacaccccaacaagcacaaagcaacgacccaagagaagtatcaggaaagcagatgtagagggagaactcttagcgtgcaggaatctaatgccatcagcaggcaaagccatgcacacgcctaaaccatcagtaggtgaagagaaagacatcatcatatttgtgggaactccagtgcagaaactggacctgacagagaacttaaccggcagcaagagacggccacaaactcctaaggaagaggcccaggctctggaagacctgactggctttaaagagctcttccagacccctggtcatactgaagaagcagtggctgctggcaaaactactaaaatgccctgcgaatcttctccaccagaatcagcagacaccccaacaagcacaagaaggcagcccaagacacctttggagaaaagggacgtacagaaggagctctcagccctgaagaagctcacacagacatcaggggaaaccacacacacagataaagtaccaggaggtgaggataaaagcatcaacgcgtttagggaaactgcaaaacagaaactggacccagcagcaagtgtaactggtagcaagaggcacccaaaaactaaggaaaaggcccaacccctagaagacctggctggcttgaaagagctcttccagacaccagtatgcactgacaagcccacgactcacgagaaaactaccaaaatagcctgcagatcacaaccagacccagtggacacaccaacaagctccaagccacagtccaagagaagtctcaggaaagtggacgtagaagaagaattcttcgcactcaggaaacgaacaccatcagcaggcaaagccatgcacacacccaaaccagcagtaagtggtgagaaaaacatctacgcatttatgggaactccagtgcagaaactggacctgacagagaacttaactggcagcaagagacggctacaaactcctaaggaaaaggcccaggctctagaagacctggctggctttaaagagctcttccagacacgaggtcacactgaggaatcaatgactaacgataaaactgccaaagtagcctgcaaatcttcacaaccagacccagacaaaaacccagcaagctccaagcgacggctcaagacatccctggggaaagtgggcgtgaaagaagagctcctagcagttggcaagctcacacagacatcaggagagactacacacacacacacagagccaacaggagatggtaagagcatgaaagcatttatggagtctccaaagcagatcttagactcagcagcaagtctaactggcagcaagaggcagctgagaactcctaagggaaagtctgaagtccctgaagacctggccggcttcatcgagctcttccagacaccaagtcacactaaggaatcaatgactaacgaaaaaactaccaaagtatcctacagagcttcacagccagacctagtggacaccccaacaagctccaagccacagcccaagagaagtctcaggaaagcagacactgaagaagaatttttagcatttaggaaacaaacgccatcagcaggcaaagccatgcacacacccaaaccagcagtaggtgaagagaaagacatcaacacgtttttgggaactccagtgcagaaactggaccagccaggaaatttacctggcagcaatagacggctacaaactcgtaaggaaaaggcccaggctctagaagaactgactggcttcagagagcttttccagacaccatgcactgataaccccacgactgatgagaaaactaccaaaaaaatactctgcaaatctccgcaatcagacccagcggacaccccaacaaacacaaagcaacggcccaagagaagcctcaagaaagcagacgtagaggaagaatttttagcattcaggaaactaacaccatcagcaggcaaagccatgcacacgcctaaagcagcagtaggtgaagagaaagacatcaacacatttgtggggactccagtggagaaactggacctgctaggaaatttacctggcagcaagagacggccacaaactcctaaagaaaaggccaaggctctagaagatctggctggcttcaaagagctcttccagacaccaggtcacactgaggaatcaatgaccgatgacaaaatcacagaagtatcctgcaaatctccacaaccagacccagtcaaaaccccaacaagctccaagcaacgactcaagatatccttggggaaagtaggtgtgaaagaagaggtcctaccagtcggcaagctcacacagacgtcagggaagaccacacagacacacagagagacagcaggagatggaaagagcatcaaagcgtttaaggaatctgcaaagcagatgctggacccagcaaactatggaactgggatggagaggtggccaagaacacctaaggaagaggcccaatcactagaagacctggccggcttcaaagagctcttccagacaccagaccacactgaggaatcaacaactgatgacaaaactaccaaaatagcctgcaaatctccaccaccagaatcaatggacactccaacaagcacaaggaggcggcccaaaacacctttggggaaaagggatatagtggaagagctctcagccctgaagcagctcacacagaccacacacacagacaaagtaccaggagatgaggataaaggcatcaacgtgttcagggaaactgcaaaacagaaactggacccagcagcaagtgtaactggtagcaagaggcagccaagaactcctaagggaaaagcccaacccctagaagacttggctggcttgaaagagctcttccagacaccaatatgcactgacaagcccacgactcatgagaaaactaccaaaatagcctgcagatctccacaaccagacccagtgggtaccccaacaatcttcaagccacagtccaagagaagtctcaggaaagcagacgtagaggaagaatccttagcactcaggaaacgaacaccatcagtagggaaagctatggacacacccaaaccagcaggaggtgatgagaaagacatgaaagcatttatgggaactccagtgcagaaattggacctgccaggaaatttacctggcagcaaaagatggccacaaactcctaaggaaaaggcccaggctctagaagacctggctggcttcaaagagctcttccagacaccaggcactgacaagcccacgactgatgagaaaactaccaaaatagcctgcaaatctccacaaccagacccagtggacaccccagcaagcacaaagcaacggcccaagagaaacctcaggaaagcagacgtagaggaagaatttttagcactcaggaaacgaacaccatcagcaggcaaagccatggacacaccaaaaccagcagtaagtgatgagaaaaatatcaacacatttgtggaaactccagtgcagaaactggacctgctaggaaatttacctggcagcaagagacagccacagactcctaaggaaaaggctgaggctctagaggacctggttggcttcaaagaactcttccagacaccaggtcacactgaggaatcaatgactgatgacaaaatcacagaagtatcctgtaaatctccacagccagagtcattcaaaacctcaagaagctccaagcaaaggctcaagatacccctggtgaaagtggacatgaaagaagagcccctagcagtcagcaagctcacacggacatcaggggagactacgcaaacacacacagagccaacaggagatagtaagagcatcaaagcgtttaaggagtctccaaagcagatcctggacccagcagcaagtgtaactggtagcaggaggcagctgagaactcgtaaggaaaaggcccgtgctctagaagacctggttgacttcaaagagctcttctcagcaccaggtcacactgaagagtcaatgactattgacaaaaacacaaaaattccctgcaaatctcccccaccagaactaacagacactgccacgagcacaaagagatgccccaagacacgtcccaggaaagaagtaaaagaggagctctcagcagttgagaggctcacgcaaacatcagggcaaagcacacacacacacaaagaaccagcaagcggtgatgagggcatcaaagtattgaagcaacgtgcaaagaagaaaccaaacccagtagaagaggaacccagcaggagaaggccaagagcacctaaggaaaaggcccaacccctggaagacctggccggcttcacagagctctctgaaacatcaggtcacactcaggaatcactgactgctggcaaagccactaaaataccctgcgaatctcccccactagaagtggtagacaccacagcaagcacaaagaggcatctcaggacacgtgtgcagaaggtacaagtaaaagaagagccttcagcagtcaagttcacacaaacatcaggggaaaccacggatgcagacaaagaaccagcaggtgaagataaaggcatcaaagcattgaaggaatctgcaaaacagacaccggctccagcagcaagtgtaactggcagcaggagacggccaagagcacccagggaaagtgcccaagccatagaagacctagctggcttcaaagacccagcagcaggtcacactgaagaatcaatgactgatgacaaaaccactaaaataccctgcaaatcatcaccagaactagaagacaccgcaacaagctcaaagagacggcccaggacacgtgcccagaaagtagaagtgaaggaggagctgttagcagttggcaagctcacacaaacctcaggggagaccacgcacaccgacaaagagccggtaggtgagggcaaaggcacgaaagcatttaagcaacctgcaaagcggaagctggacgcagaagatgtaattggcagcaggagacagccaagagcacctaaggaaaaggcccaacccctggaagatctggccagcttccaagagctctctcaaacaccaggccacactgaggaactggcaaatggtgctgctgatagctttacaagcgctccaaagcaaacacctgacagtggaaaacctctaaaaatatccagaagagttcttcgggcccctaaagtagaacccgtgggagacgtggtaagcaccagagaccctgtaaaatcacaaagcaaaagcaacacttccctgcccccactgcccttcaagaggggaggtggcaaagatggaagcgtcacgggaaccaagaggctgcgctgcatgccagcaccagaggaaattgtggaggagctgccagccagcaagaagcagagggttgctcccagggcaagaggcaaatcatccgaacccgtggtcatcatgaagagaagtttgaggacttctgcaaaaagaattgaacctgcggaagagctgaacagcaacgacatgaaaaccaacaaagaggaacacaaattacaagactcggtccctgaaaataagggaatatccctgcgctccagacgccaaaataagactgaggcagaacagcaaataactgaggtctttgtattagcagaaagaatagaaataaacagaaatgaaaagaagcccatgaagacctccccagagatggacattcagaatccagatgatggagcccggaaacccatacctagagacaaagtcactgagaacaaaaggtgcttgaggtctgctagacagaatgagagctcccagcctaaggtggcagaggagagcggagggcagaagagtgcgaaggttctcatgcagaatcagaaagggaaaggagaagcaggaaattcagactccatgtgcctgagatcaagaaagacaaaaagccagcctgcagcaagcactttggagagcaaatctgtgcagagagtaacgcggagtgtcaagaggtgtgcagaaaatccaaagaaggctgaggacaatgtgtgtgtcaagaaaataagaaccagaagtcatagggacagtgaagatatttgacagaaaaatcgaactgggaaaaatataataaagttagttttgtgataagttctagtgcagtttttgtcataaattacaagtgaattctgtaagtaaggctgtcagtctgcttaagggaagaaaactttggatttgctgggtctgaatcggcttcataaactccactgggagcactgctgggctcctggactgagaatagttgaacaccgggggctttgtgaaggagtctgggccaaggtttgccctcagctttgcagaatgaagccttgaggtctgtcaccacccacagccaccctacagcagccttaactgtgacacttgccacactgtgtcgtcgtttgtttgcctatgtcctccagggcacggtggcaggaacaactatcctcgtctgtcccaacactgagcaggcactcggtaaacacgaatgaatggatgagcgcacggatgaatggagcttacaagatctgtctttccaatggccgggggcatttggtccccaaattaaggctattggacatctgcacaggacagtcctatttttgatgtcctttcctttctgaaaataaagttttgtgctttgga

SEQ ID NO: 69047 - DNA, 6005 bp, Homo sapiens
tcacctccggctactttatctgtgtgtgtggtttcccctgatgtctgtgtgagcttcttcagggctgagagcaccttctgtacgtcccttttctccaaaggtgtcttgggctgccttcttgtgcttgttggggtgtctgctgattctggtggagaagattcgcagggcattttagtagttttgccagcagccactgcaaaacagaaactggacccagcagcaagtgtaactggtagcaagaggcagccaagaactcctaagggaaaagcccaacccctagaagacttggctggcttgaaagagctcttccagacaccaatatgcactgacaagcccacgactcatgagaaaactaccaaaatagcctgcagatctccacaaccagacccagtgggtaccccaacaatcttcaagccacagtccaagagaagtctcaggaaagcagacgtagaggaagaatccttagcactcaggaaacgaacaccatcagtagggaaagctatggacacacccaaaccagcaggaggtgatgagaaagacatgaaagcatttatgggaactccagtgcagaaattggacctgccaggaaatttacctggcagcaaaagatggccacaaactcctaaggaaaaggcccaggctctagaagacctggctggcttcaaagagctcttccagacaccaggcactgacaagcccacgactgatgagaaaactaccaaaatagcctgcaaatctccacaaccagacccagtggacaccccagcaagcacaaagcaacggcccaagagaaacctcaggaaagcagacgtagaggaagaatttttagcactcaggaaacgaacaccatcagcaggcaaagccatggacacaccaaaaccagcagtaagtgatgagaaaaatatcaacacatttgtggaaactccagtgcagaaactggacctgctaggaaatttacctggcagcaagagacagccacagactcctaaggaaaaggctgaggctctagaggacctggttggcttcaaagaactcttccagacaccaggtcacactgaggaatcaatgactgatgacaaaatcacagaagtatcctgtaaatctccacagccagagtcattcaaaacctcaagaagctccaagcaaaggctcaagatacccctggtgaaagtggacatgaaagaagagcccctagcagtcagcaagctcacacggacatcaggggagactacgcaaacacacacagagccaacaggagatagtaagagcatcaaagcgtttaaggagtctccaaagcagatcctggacccagcagcaagtgtaactggtagcaggaggcagctgagaactcgtaaggaaaaggcccgtgctctagaagacctggttgacttcaaagagctcttctcagcaccaggtcacactgaagagtcaatgactattgacaaaaacacaaaaattccctgcaaatctcccccaccagaactaacagacactgccacgagcacaaagagatgccccaagacacgtcccaggaaagaagtaaaagaggagctctcagcagttgagaggctcacgcaaacatcagggcaaagcacacacacacacaaagaaccagcaagcggtgatgagggcatcaaagtattgaagcaacgtgcaaagaagaaaccaaacccagtagaagaggaacccagcaggagaaggccaagagcacctaaggaaaaggcccaacccctggaagacctggccggcttcacagagctctctgaaacatcaggtcacactcaggaatcactgactgctggcaaagccactaaaataccctgcgaatctcccccactagaagtggtagacaccacagcaagcacaaagaggcatctcaggacacgtgtgcagaaggtacaagtaaaagaagagccttcagcagtcaagttcacacaaacatcaggggaaaccacggatgcagacaaagaaccagcaggtgaagataaaggcatcaaagcattgaaggaatctgcaaaacagacaccggctccagcagcaagtgtaactggcagcaggagacggccaagagcacccagggaaagtgcccaagccatagaagacctagctggcttcaaagacccagcagcaggtcacactgaagaatcaatgactgatgacaaaaccactaaaataccctgcaaatcatcaccagaactagaagacaccgcaacaagctcaaagagacggcccaggacacgtgcccagaaagtagaagtgaaggaggagctgttagcagttggcaagctcacacaaacctcaggggagaccacgcacaccgacaaagagccggtaggtgagggcaaaggcacgaaagcatttaagcaacctgcaaagcggaagctggacgcagaagatgtaattggcagcaggagacagccaagagcacctaaggaaaaggcccaacccctggaagatctggccagcttccaagagctctctcaaacaccaggccacactgaggaactggcaaatggtgctgctgatagctttacaagcgctccaaagcaaacacctgacagtggaaaacctctaaaaatatccagaagagttcttcgggcccctaaagtagaacccgtgggagacgtggtaagcaccagagaccctgtaaaatcacaaagcaaaagcaacacttccctgcccccactgcccttcaagaggggaggtggcaaagatggaagcgtcacgggaaccaagaggctgcgctgcatgccagcaccagaggaaattgtggaggagctgccagccagcaagaagcagagggttgctcccagggcaagaggcaaatcatccgaacccgtggtcatcatgaagagaagtttgaggacttctgcaaaaagaattgaacctgcggaagagctgaacagcaacgacatgaaaaccaacaaagaggaacacaaattacaagactcggtccctgaaaataagggaatatccctgcgctccagacgccaaaataagactgaggcagaacagcaaataactgaggtctttgtattagcagaaagaatagaaataaacagaaatgaaaagaagcccatgaagacctccccagagatggacattcagaatccagatgatggagcccggaaacccatacctagagacaaagtcactgagaacaaaaggtgcttgaggtctgctagacagaatgagagctcccagcctaaggtggcagaggagagcggagggcagaagagtgcgaaggttctcatgcagaatcagaaagggaaaggagaagcaggaaattcagactccatgtgcctgagatcaagaaagacaaaaagccagcctgcagcaagcactttggagagcaaatctgtgcagagagtaacgcggagtgtcaagaggtgtgcagaaaatccaaagaaggctgaggacaatgtgtgtgtcaagaaaataagaaccagaagtcatagggacagtgaagatatttgacagaaaaatcgaactgggaaaaatataataaagttagttttgtgataagttctagtgcagtttttgtcataaattacaagtgaattctgtaagtaaggctgtcagtctgcttaagggaagaaaactttggatttgctgggtctgaatcggcttcataaactccactgggagcactgctgggctcctggactgagaatagttgaacaccgggggctttgtgaaggagtctgggccaaggtttgccctcagctttgcagaatgaagccttgaggtctgtcaccacccacagccaccctacagcagccttaactgtgacacttgccacactgtgtcgtcgtttgtttgcctatgtcctccagggcacggtggcaggaacaactatcctcgtctgtcccaacactgagcaggcactcggtaaacacgaatgaatggatgagcgcacggatgaatggagcttacaagatctgtctttccaatggccgggggcatttggtccccaaattaaggctattggacatctgcacaggacagtcctatttttgatgtcctttcctttctgaaaataaagttttgtgctttggagaatgactcgtgagcacatctttagggaccaagagtgactttctgtaaggagtgactcgtggcttgccttggtctcttgggaatacttttctaactagggttgctctcacctgagacattctccacccgcggaatctcagggtcccaggctgtgggccatcacgacctcaaactggctcctaatctccagctttcctgtcattgaaagcttcggaagtttactggctctgctcccgcctgttttctttctgactctatctggcagcccgatgccacccagtacaggaagtgacaccagtactctgtaaagcatcatcatccttggagagactgagcactcagcaccttcagccacgatttcaggatcgcttccttgtgagccgctgcctccgaaatctcctttgaagcccagacatctttctccagcttcagacttgtagatataactcgttcatcttcatttactttccactttgccccctgtcctctctgtgttccccaaatcagagaatagcccgccatcccccaggtcacctgtctggattcctccccattcacccaccttgccaggtgcaggtgaggatggtgcaccagacagggtagctgtcccccaaaatgtgccctgtgcgggcagtgccccgtctccacgtttgtttccccagtgtctggcggggagccaggtgacatcataaatacttgctgaatgaatgcagaaatcagcggtactgacttgtactatattggctgccatgatagggttctcacagcgtcatccatgatcgtaagggagaatgacattctgcttgagggagggaatagaaaggggcagggaggggacatctgagggcttcacagggctgcaaagggtacagggattgcaccagggcagaacaggggagggtgttcaaggaagagtggctcttagcagaggcactttggaaggtgtgaggcataaatgcttccttctacgtaggccaacctcaaaactttcagtaggaatgttgctatgatcaagttgttctaacactttagacttagtagtaattatgaacctcacatagaaaaatttcatccagccatatgcctgtggagtggaatattctgtttagtagaaaaatcctttagagttcagctctaaccagaaatcttgctgaagtatgtcagcaccttttctcaccctggtaagtacagtatttcaagagcacgctaagggtggttttcattttacagggctgttgatgatgggttaaaaatgttcatttaagggctacccccgtgtttaatagatgaacaccacttctacacaaccctccttggtactgggggagggagagatctgacaaatactgcccattcccctaggctgactggatttgagaacaaatacccacccatttccaccatggtatggtaacttctctgagcttcagtttccaagtgaatttccatgtaataggacattcccattaaatacaagctgtttttactttttcgcctcccagggcctgtgggatctggtcccccagcctctcttgggctttcttacactaactctgtacctaccatctcctgcctcccttaggcaggcacctccaaccaccacacactccctgctgttttccctgcctggaactttccctcctgccccaccaagatcatttcatccagtcctgagctcagcttaagggaggcttcttgcctgtgggttccctcacccccatgcctgtcctccaggctggggcaggttcttagtttgcctggaattgttctgtacctctttgtagcacgtagtgttgtggaaactaagccactaattgagtttctggctcccctcctggggttgtaagttttgttcattcatgagggccgactgcatttcctggttactctatcccagtgaccagccacaggagatgtccaataaagtatgtgatgaaatggtctta

SEQ ID NO: 69048 - DNA, 4448 bp, Homo sapiens
  misc_feature (1)..(1): n is a, c, g, or t
  misc_feature (8)..(8): n is a, c, g, or t
  misc_feature (11)..(12): n is a, c, g, or t
ncagaggnttnncaaaagtgcactcttctatatctcacacacacacacaaagaaccagcaagcggtgatgagggcatcaaagtattgaagcaacgtgcaaagaagaaaccaaacccagtagaagaggaacccagcaggagaaggccaagagcacctaaggaaaaggcccaacccctggaagacctggccggcttcacagagctctctgaaacatcaggtcacactcaggaatcactgactgctggcaaagccactaaaataccctgcgaatctcccccactagaagtggtagacaccacagcaagcacaaagaggcatctcaggacacgtgtgcagaaggtacaagtaaaagaagagccttcagcagtcaagttcacacaaacatcaggggaaaccacggatgcagacaaagaaccagcaggtgaagataaaggcatcaaagcattgaaggaatctgcaaaacagacaccggctccagcagcaagtgtaactggcagcaggagacggccaagagcacccagggaaagtgcccaagccatagaagacctagctggcttcaaagacccagcagcaggtcacactgaagaatcaatgactgatgacaaaaccactaaaataccctgcaaatcatcaccagaactagaagacaccgcaacaagctcaaagagacggcccaggacacgtgcccagaaagtagaagtgaaggaggagctgttagcagttggcaagctcacacaaacctcaggggagaccacgcacaccgacaaagagccggtaggtgagggcaaaggcacgaaagcatttaagcaacctgcaaagcggaagctggacgcagaagatgtaattggcagcaggagacagccaagagcacctaaggaaaaggcccaacccctggaagatctggccagcttccaagagctctctcaaacaccaggccacactgaggaactggcaaatggtgctgctgatagctttacaagcgctccaaagcaaacacctgacagtggaaaacctctaaaaatatccagaagagttcttcgggcccctaaagtagaacccgtgggagacgtggtaagcaccagagaccctgtaaaatcacaaagcaaaagcaacacttccctgcccccactgcccttcaagaggggaggtggcaaagatggaagcgtcacgggaaccaagaggctgcgctgcatgccagcaccagaggaaattgtggaggagctgccagccagcaagaagcagagggttgctcccagggcaagaggcaaatcatccgaacccgtggtcatcatgaagagaagtttgaggacttctgcaaaaagaattgaacctgcggaagagctgaacagcaacgacatgaaaaccaacaaagaggaacacaaattacaagactcggtccctgaaaataagggaatatccctgcgctccagacgccaaaataagactgaggcagaacagcaaataactgaggtctttgtattagcagaaagaatagaaataaacagaaatgaaaagaagcccatgaagacctccccagagatggacattcagaatccagatgatggagcccggaaacccatacctagagacaaagtcactgagaacaaaaggtgcttgaggtctgctagacagaatgagagctcccagcctaaggtggcagaggagagcggagggcagaagagtgcgaaggttctcatgcagaatcagaaagggaaaggagaagcaggaaattcagactccatgtgcctgagatcaagaaagacaaaaagccagcctgcagcaagcactttggagagcaaatctgtgcagagagtaacgcggagtgtcaagaggtgtgcagaaaatccaaagaaggctgaggacaatgtgtgtgtcaagaaaataagaaccagaagtcatagggacagtgaagatatttgacagaaaaatcgaactgggaaaaatataataaagttagttttgtgataagttctagtgcagtttttgtcataaattacaagtgaattctgtaagtaaggctgtcagtctgcttaagggaagaaaactttggatttgctgggtctgaatcggcttcataaactccactgggagcactgctgggctcctggactgagaatagttgaacaccgggggctttgtgaaggagtctgggccaaggtttgccctcagctttgcagaatgaagccttgaggtctgtcaccacccacagccaccctacagcagccttaactgtgacacttgccacactgtgtcgtcgtttgtttgcctatgtcctccagggcacggtggcaggaacaactatcctcgtctgtcccaacactgagcaggcactcggtaaacacgaatgaatggatgagcgcacggatgaatggagcttacaagatctgtctttccaatggccgggggcatttggtccccaaattaaggctattggacatctgcacaggacagtcctatttttgatgtcctttcctttctgaaaataaagttttgtgctttggagaatgactcgtgagcacatctttagggaccaagagtgactttctgtaaggagtgactcgtggcttgccttggtctcttgggaatacttttctaactagggttgctctcacctgagacattctccacccgcggaatctcagggtcccaggctgtgggccatcacgacctcaaactggctcctaatctccagctttcctgtcattgaaagcttcggaagtttactggctctgctcccgcctgttttctttctgactctatctggcagcccgatgccacccagtacaggaagtgacaccagtactctgtaaagcatcatcatccttggagagactgagcactcagcaccttcagccacgatttcaggatcgcttccttgtgagccgctgcctccgaaatctcctttgaagcccagacatctttctccagcttcagacttgtagatataactcgttcatcttcatttactttccactttgccccctgtcctctctgtgttccccaaatcagagaatagcccgccatcccccaggtcacctgtctggattcctccccattcacccaccttgccaggtgcaggtgaggatggtgcaccagacagggtagctgtcccccaaaatgtgccctgtgcgggcagtgccccgtctccacgtttgtttccccagtgtctggcggggagccaggtgacatcataaatacttgctgaatgaatgcagaaatcagcggtactgacttgtactatattggctgccatgatagggttctcacagcgtcatccatgatcgtaagggagaatgacattctgcttgagggagggaatagaaaggggcagggaggggacatctgagggcttcacagggctgcaaagggtacagggattgcaccagggcagaacaggggagggtgttcaaggaagagtggctcttagcagaggcactttggaaggtgtgaggcataaatgcttccttctacgtaggccaacctcaaaactttcagtaggaatgttgctatgatcaagttgttctaacactttagacttagtagtaattatgaacctcacatagaaaaatttcatccagccatatgcctgtggagtggaatattctgtttagtagaaaaatcctttagagttcagctctaaccagaaatcttgctgaagtatgtcagcaccttttctcaccctggtaagtacagtatttcaagagcacgctaagggtggttttcattttacagggctgttgatgatgggttaaaaatgttcatttaagggctacccccgtgtttaatagatgaacaccacttctacacaaccctccttggtactgggggagggagagatctgacaaatactgcccattcccctaggctgactggatttgagaacaaatacccacccatttccaccatggtatggtaacttctctgagcttcagtttccaagtgaatttccatgtaataggacattcccattaaatacaagctgtttttactttttcgcctcccagggcctgtgggatctggtcccccagcctctcttgggctttcttacactaactctgtacctaccatctcctgcctcccttaggcaggcacctccaaccaccacacactccctgctgttttccctgcctggaactttccctcctgccccaccaagatcatttcatccagtcctgagctcagcttaagggaggcttcttgcctgtgggttccctcacccccatgcctgtcctccaggctggggcaggttcttagtttgcctggaattgttctgtacctctttgtagcacgtagtgttgtggaaactaagccactaattgagtttctggctcccctcctggggttgtaagttttgttcattcatgagggccgactgcatttcctggttactctatcccagtgaccagccacaggagatgtccaataaagtatgtgatgaaatggtctta

SEQ ID NO: 69049 - DNA, 10800 bp, Homo sapiens
gggcgggaggactcgactcggtgggagccgctagagccgggcgcccggggacgtagcctgtagggccaccgggtccccgtcagaggcggcggcgggagcagcggggactgcaggccggggtgcagcgaacgcgaccccgcgggctgcggcccggtgtgtgcggagcgtggcgggcgcagcttaccgggcggaggtgagcgcggcgccggctcctcctgcggcggactttgggtgcgacttgacgagcggtggttcgacaagtggccttgcgggccggatcgtcccagtggaagagttgtaaatttgcttctggccttcccctacggattatacctggccttcccctacggattatactcaacttactgtttagaaaatgtggcccacgagacgcctggttactatcaaaaggagcggggtcgacggtccccactttcccctgagcctcagcacctgcttgtttggaaggggtattgaatgtgacatccgtatccagcttcctgttgtgtcaaaacaacattgcaaaattgaaatccatgagcaggaggcaatattacataatttcagttccacaaatccaacacaagtaaatgggtctgttattgatgagcctgtacggctaaaacatggagatgtaataactattattgatcgttccttcaggtatgaaaatgaaagtcttcagaatggaaggaagtcaactgaatttccaagaaaaatacgtgaacaggagccagcacgtcgtgtctcaagatctagcttctcttctgaccctgatgagaaagctcaagattccaaggcctattcaaaaatcactgaaggaaaagtttcaggaaatcctcaggtacatatcaagaatgtcaaagaagacagtaccgcagatgactcaaaagacagtgttgctcagggaacaactaatgttcattcctcagaacatgctggacgtaatggcagaaatgcagctgatcccatttctggggattttaaagaaatttccagcgttaaattagtgagccgttatggagaattgaagtctgttcccactacacaatgtcttgacaatagcaaaaaaaatgaatctcccttttggaagctttatgagtcagtgaagaaagagttggatgtaaaatcacaaaaagaaaatgtcctacagtattgtagaaaatctggattacaaactgattacgcaacagagaaagaaagtgctgatggtttacagggggagacccaactgttggtctcgcgtaagtcaagaccaaaatctggtgggagcggccacgctgtggcagagcctgcttcacctgaacaagagcttgaccagaacaaggggaagggaagagacgtggagtctgttcagactcccagcaaggctgtgggcgccagctttcctctctatgagccggctaaaatgaagacccctgtacaatattcacagcaacaaaattctccacaaaaacataagaacaaagacctgtatactactggtagaagagaatctgtgaatctgggtaaaagtgaaggcttcaaggctggtgataaaactcttactcccaggaagctttcaactagaaatcgaacaccagctaaagttgaagatgcagctgactctgccactaagccagaaaatctctcttccaaaaccagaggaagtattcctacagatgtggaagttctgcctacggaaactgaaattcacaatgagccatttttaactctgtggctcactcaagttgagaggaagatccaaaaggattccctcagcaagcctgagaaattgggcactacagctggacagatgtgctctgggttacctggtcttagttcagttgatatcaacaactttggtgattccattaatgagagtgagggaatacctttgaaaagaaggcgtgtgtcctttggtgggcacctaagacctgaactatttgatgaaaacttgcctcctaatacgcctctcaaaaggggagaagccccaaccaaaagaaagtctctggtaatgcacactccacctgtcctgaagaaaatcatcaaggaacagcctcaaccatcaggaaaacaagagtcaggttcagaaatccatgtggaagtgaaggcacaaagcttggttataagccctccagctcctagtcctaggaaaactccagttgccagtgatcaacgccgtaggtcctgcaaaacagcccctgcttccagcagcaaatctcagacagaggttcctaagagaggaggagaaagagtggcaacctgccttcaaaagagagtgtctatcagccgaagtcaacatgatattttacagatgatatgttccaaaagaagaagtggtgcttcggaagcaaatctgattgttgcaaaatcatgggcagatgtagtaaaacttggtgcaaaacaaacacaaactaaagtcataaaacatggtcctcaaaggtcaatgaacaaaaggcaaagaagacctgctactccaaagaagcctgtgggcgaagttcacagtcaatttagtacaggccacgcaaactctccttgtaccataataatagggaaagctcatactgaaaaagtacatgtgcctgctcgaccctacagagtgctcaacaacttcatttccaaccaaaaaatggactttaaggaagatctttcaggaatagctgaaatgttcaagaccccagtgaaggagcaaccgcagttgacaagcacatgtcacatcgctatttcaaattcagagaatttgcttggaaaacagtttcaaggaactgattcaggagaagaacctctgctccccacctcagagagttttggaggaaatgtgttcttcagtgcacagaatgcagcaaaacagccatctgataaatgctctgcaagccctcccttaagacggcagtgtattagagaaaatggaaacgtagcaaaaacgcccaggaacacctacaaaatgacttctctggagacaaaaacttcagatactgagacagagccttcaaaaacagtatccactgtaaacaggtcaggaaggtctacagagttcaggaatatacagaagctacctgtggaaagtaagagtgaagaaacaaatacagaaattgttgagtgcatcctaaaaagaggtcagaaggcaacactactacaacaaaggagagaaggagagatgaaggaaatagaaagaccttttgagacatataaggaaaatattgaattaaaagaaaacgatgaaaagatgaaagcaatgaagagatcaagaacttgggggcagaaatgtgcaccaatgtctgacctgacagacctcaagagcttgcctgatacagaactcatgaaagacacggcacgtggccagaatctcctccaaacccaagatcatgccaaggcaccaaagagtgagaaaggcaaaatcactaaaatgccctgccagtcattacaaccagaaccaataaacaccccaacacacacaaaacaacagttgaaggcatccctggggaaagtaggtgtgaaagaagagctcctagcagtcggcaagttcacacggacgtcaggggagaccacgcacacgcacagagagccagcaggagatggcaagagcatcagaacgtttaaggagtctccaaagcagatcctggacccagcagcccgtgtaactggaatgaagaagtggccaagaacgcctaaggaagaggcccagtcactagaagacctggctggcttcaaagagctcttccagacaccaggtccctctgaggaatcaatgactgatgagaaaactaccaaaatagcctgcaaatctccaccaccagaatcagtggacactccaacaagcacaaagcaatggcctaagagaagtctcaggaaagcagatgtagaggaagaattcttagcactcaggaaactaacaccatcagcagggaaagccatgcttacgcccaaaccagcaggaggtgatgagaaagacattaaagcatttatgggaactccagtgcagaaactggacctggcaggaactttacctggcagcaaaagacagctacagactcctaaggaaaaggcccaggctctagaagacctggctggctttaaagagctcttccagactcctggtcacaccgaggaattagtggctgctggtaaaaccactaaaataccctgcgactctccacagtcagacccagtggacaccccaacaagcacaaagcaacgacccaagagaagtatcaggaaagcagatgtagagggagaactcttagcgtgcaggaatctaatgccatcagcaggcaaagccatgcacacgcctaaaccatcagtaggtgaagagaaagacatcatcatatttgtgggaactccagtgcagaaactggacctgacagagaacttaaccggcagcaagagacggccacaaactcctaaggaagaggcccaggctctggaagacctgactggctttaaagagctcttccagacccctggtcatactgaagaagcagtggctgctggcaaaactactaaaatgccctgcgaatcttctccaccagaatcagcagacaccccaacaagcacaagaaggcagcccaagacacctttggagaaaagggacgtacagaaggagctctcagccctgaagaagctcacacagacatcaggggaaaccacacacacagataaagtaccaggaggtgaggataaaagcatcaacgcgtttagggaaactgcaaaacagaaactggacccagcagcaagtgtaactggtagcaagaggcacccaaaaactaaggaaaaggcccaacccctagaagacctggctggcttgaaagagctcttccagacaccagtatgcactgacaagcccacgactcacgagaaaactaccaaaatagcctgcagatcacaaccagacccagtggacacaccaacaagctccaagccacagtccaagagaagtctcaggaaagtggacgtagaagaagaattcttcgcactcaggaaacgaacaccatcagcaggcaaagccatgcacacacccaaaccagcagtaagtggtgagaaaaacatctacgcatttatgggaactccagtgcagaaactggacctgacagagaacttaactggcagcaagagacggctacaaactcctaaggaaaaggcccaggctctagaagacctggctggctttaaagagctcttccagacacgaggtcacactgaggaatcaatgactaacgataaaactgccaaagtagcctgcaaatcttcacaaccagacccagacaaaaacccagcaagctccaagcgacggctcaagacatccctggggaaagtgggcgtgaaagaagagctcctagcagttggcaagctcacacagacatcaggagagactacacacacacacacagagccaacaggagatggtaagagcatgaaagcatttatggagtctccaaagcagatcttagactcagcagcaagtctaactggcagcaagaggcagctgagaactcctaagggaaagtctgaagtccctgaagacctggccggcttcatcgagctcttccagacaccaagtcacactaaggaatcaatgactaacgaaaaaactaccaaagtatcctacagagcttcacagccagacctagtggacaccccaacaagctccaagccacagcccaagagaagtctcaggaaagcagacactgaagaagaatttttagcatttaggaaacaaacgccatcagcaggcaaagccatgcacacacccaaaccagcagtaggtgaagagaaagacatcaacacgtttttgggaactccagtgcagaaactggaccagccaggaaatttacctggcagcaatagacggctacaaactcgtaaggaaaaggcccaggctctagaagaactgactggcttcagagagcttttccagacaccatgcactgataaccccacgactgatgagaaaactaccaaaaaaatactctgcaaatctccgcaatcagacccagcggacaccccaacaaacacaaagcaacggcccaagagaagcctcaagaaagcagacgtagaggaagaatttttagcattcaggaaactaacaccatcagcaggcaaagccatgcacacgcctaaagcagcagtaggtgaagagaaagacatcaacacatttgtggggactccagtggagaaactggacctgctaggaaatttacctggcagcaagagacggccacaaactcctaaagaaaaggccaaggctctagaagatctggctggcttcaaagagctcttccagacaccaggtcacactgaggaatcaatgaccgatgacaaaatcacagaagtatcctgcaaatctccacaaccagacccagtcaaaaccccaacaagctccaagcaacgactcaagatatccttggggaaagtaggtgtgaaagaagaggtcctaccagtcggcaagctcacacagacgtcagggaagaccacacagacacacagagagacagcaggagatggaaagagcatcaaagcgtttaaggaatctgcaaagcagatgctggacccagcaaactatggaactgggatggagaggtggccaagaacacctaaggaagaggcccaatcactagaagacctggccggcttcaaagagctcttccagacaccagaccacactgaggaatcaacaactgatgacaaaactaccaaaatagcctgcaaatctccaccaccagaatcaatggacactccaacaagcacaaggaggcggcccaaaacacctttggggaaaagggatatagtggaagagctctcagccctgaagcagctcacacagaccacacacacagacaaagtaccaggagatgaggataaaggcatcaacgtgttcagggaaactgcaaaacagaaactggacccagcagcaagtgtaactggtagcaagaggcagccaagaactcctaagggaaaagcccaacccctagaagacttggctggcttgaaagagctcttccagacaccaatatgcactgacaagcccacgactcatgagaaaactaccaaaatagcctgcagatctccacaaccagacccagtgggtaccccaacaatcttcaagccacagtccaagagaagtctcaggaaagcagacgtagaggaagaatccttagcactcaggaaacgaacaccatcagtagggaaagctatggacacacccaaaccagcaggaggtgatgagaaagacatgaaagcatttatgggaactccagtgcagaaattggacctgccaggaaatttacctggcagcaaaagatggccacaaactcctaaggaaaaggcccaggctctagaagacctggctggcttcaaagagctcttccagacaccaggcactgacaagcccacgactgatgagaaaactaccaaaatagcctgcaaatctccacaaccagacccagtggacaccccagcaagcacaaagcaacggcccaagagaaacctcaggaaagcagacgtagaggaagaatttttagcactcaggaaacgaacaccatcagcaggcaaagccatggacacaccaaaaccagcagtaagtgatgagaaaaatatcaacacatttgtggaaactccagtgcagaaactggacctgctaggaaatttacctggcagcaagagacagccacagactcctaaggaaaaggctgaggctctagaggacctggttggcttcaaagaactcttccagacaccaggtcacactgaggaatcaatgactgatgacaaaatcacagaagtatcctgtaaatctccacagccagagtcattcaaaacctcaagaagctccaagcaaaggctcaagatacccctggtgaaagtggacatgaaagaagagcccctagcagtcagcaagctcacacggacatcaggggagactacgcaaacacacacagagccaacaggagatagtaagagcatcaaagcgtttaaggagtctccaaagcagatcctggacccagcagcaagtgtaactggtagcaggaggcagctgagaactcgtaaggaaaaggcccgtgctctagaagacctggttgacttcaaagagctcttctcagcaccaggtcacactgaagagtcaatgactattgacaaaaacacaaaaattccctgcaaatctcccccaccagaactaacagacactgccacgagcacaaagagatgccccaagacacgtcccaggaaagaagtaaaagaggagctctcagcagttgagaggctcacgcaaacatcagggcaaagcacacacacacacaaagaaccagcaagcggtgatgagggcatcaaagtattgaagcaacgtgcaaagaagaaaccaaacccagtagaagaggaacccagcaggagaaggccaagagcacctaaggaaaaggcccaacccctggaagacctggccggcttcacagagctctctgaaacatcaggtcacactcaggaatcactgactgctggcaaagccactaaaataccctgcgaatctcccccactagaagtggtagacaccacagcaagcacaaagaggcatctcaggacacgtgtgcagaaggtacaagtaaaagaagagccttcagcagtcaagttcacacaaacatcaggggaaaccacggatgcagacaaagaaccagcaggtgaagataaaggcatcaaagcattgaaggaatctgcaaaacagacaccggctccagcagcaagtgtaactggcagcaggagacggccaagagcacccagggaaagtgcccaagccatagaagacctagctggcttcaaagacccagcagcaggtcacactgaagaatcaatgactgatgacaaaaccactaaaataccctgcaaatcatcaccagaactagaagacaccgcaacaagctcaaagagacggcccaggacacgtgcccagaaagtagaagtgaaggaggagctgttagcagttggcaagctcacacaaacctcaggggagaccacgcacaccgacaaagagccggtaggtgagggcaaaggcacgaaagcatttaagcaacctgcaaagcggaagctggacgcagaagatgtaattggcagcaggagacagccaagagcacctaaggaaaaggcccaacccctggaagatctggccagcttccaagagctctctcaaacaccaggccacactgaggaactggcaaatggtgctgctgatagctttacaagcgctccaaagcaaacacctgacagtggaaaacctctaaaaatatccagaagagttcttcgggcccctaaagtagaacccgtgggagacgtggtaagcaccagagaccctgtaaaatcacaaagcaaaagcaacacttccctgcccccactgcccttcaagaggggaggtggcaaagatggaagcgtcacgggaaccaagaggctgcgctgcatgccagcaccagaggaaattgtggaggagctgccagccagcaagaagcagagggttgctcccagggcaagaggcaaatcatccgaacccgtggtcatcatgaagagaagtttgaggacttctgcaaaaagaattgaacctgcggaagagctgaacagcaacgacatgaaaaccaacaaagaggaacacaaattacaagactcggtccctgaaaataagggaatatccctgcgctccagacgccaaaataagactgaggcagaacagcaaataactgaggtctttgtattagcagaaagaatagaaataaacagaaatgaaaagaagcccatgaagacctccccagagatggacattcagaatccagatgatggagcccggaaacccatacctagagacaaagtcactgagaacaaaaggtgcttgaggtctgctagacagaatgagagctcccagcctaaggtggcagaggagagcggagggcagaagagtgcgaaggttctcatgcagaatcagaaagggaaaggagaagcaggaaattcagactccatgtgcctgagatcaagaaagacaaaaagccagcctgcagcaagcactttggagagcaaatctgtgcagagagtaacgcggagtgtcaagaggtgtgcagaaaatccaaagaaggctgaggacaatgtgtgtgtcaagaaaataagaaccagaagtcatagggacagtgaagatatttgacagaaaaatcgaactgggaaaaatataataaagttagttttgtgaaaaaaaaaaaaaaaaaaaaaaaaaaaaaaaaaaaaaaaaaaaaacgaaacaaaaaaagagagggggggggggcgcgcaaaatagaatatcccccccggaggggggcgccaataataccggcctcacccaggtttttgtgagcaaaggggggcgcccccaaaagggggacggcggtaattaaaaagacaagcgggacggggcggcggagtaaaaaacacgcggtgggcgcggagaaaagaccggccatacaggaggcactttgggaaggaacgcccactcttccgggggggagcacattagggggacaacccactcggagaggatatttaaggagtcgaggggaaaataacacttcggggcgtgtacgtggggtaccaccacgggaatatgagggggcgtagaaaaagttgggtcagggagtattatttaggacaatttttacgtggtgtgaatataatggttagatgtagaaggatgctagcaagtaatggatagcagtacatgagagatatagtagaatgagagagagagtaactgataacaaggcatactaatcaagataggtaaagaagataatagtagaagagaagtaatcggaactagtaata

SEQ ID NO: 69050 - DNA, 2522 bp, Homo sapiens
aactacggctaggtagaggcctgggtctaatcggccgagtaagttctagtgcagtttttgtcataaattacaagtgaattctgtaagtaaggctgtcagtctgcttaagggaagaaaactttggatttgctgggtctgaatcggcttcataaactccactgggagcactgctgggctcctggactgagaatagttgaacaccgggggctttgtgaaggagtctgggccaaggtttgccctcagctttgcagaatgaagccttgaggtctgtcaccacccacagccaccctacagcagccttaactgtgacacttgccacactgtgtcgtcgtttgtttgcctatgtcctccagggcacggtggcaggaacaactatcctcgtctgtcccaacactgagcaggcactcggtaaacacgaatgaatggatgagcgcacggatgaatggagcttacaagatctgtctttccaatggccgggggcatttggtccccaaattaaggctattggacatctgcacaggacagtcctatttttgatgtcctttcctttctgaaaataaagttttgtgctttggagaatgactcgtgagcacatctttagggaccaagagtgactttctgtaaggagtgactcgtggcttgccttggtctcttgggaatacttttctaactagggttgctctcacctgagacattctccacccgcggaatctcagggtcccaggctgtgggccatcacgacctcaaactggctcctaatctccagctttcctgtcattgaaagcttcggaagtttactggctctgctcccgcctgttttctttctgactctatctggcagcccgatgccacccagtacaggaagtgacaccagtactctgtaaagcatcatcatccttggagagactgagcactcagcaccttcagccacgatttcaggatcgcttccttgtgagccgctgcctccgaaatctcctttgaagcccagacatctttctccagcttcagacttgtagatataactcgttcatcttcatttactttccactttgccccctgtcctctctgtgttccccaaatcagagaatagcccgccatcccccaggtcacctgtctggattcctccccattcacccaccttgccaggtgcaggtgaggatggtgcaccagacagggtagctgtcccccaaaatgtgccctgtgcgggcagtgccccgtctccacgtttgtttccccagtgtctggcggggagccaggtgacatcataaatacttgctgaatgaatgcagaaatcagcggtactgacttgtactatattggctgccatgatagggttctcacagcgtcatccatgatcgtaagggagaatgacattctgcttgagggagggaatagaaaggggcagggaggggacatctgagggcttcacagggctgcaaagggtacagggattgcaccagggcagaacaggggagggtgttcaaggaagagtggctcttagcagaggcactttggaaggtgtgaggcataaatgcttccttctacgtaggccaacctcaaaactttcagtaggaatgttgctatgatcaagttgttctaacactttagacttagtagtaattatgaacctcacatagaaaaatttcatccagccatatgcctgtggagtggaatattctgtttagtagaaaaatcctttagagttcagctctaaccagaaatcttgctgaagtatgtcagcaccttttctcaccctggtaagtacagtatttcaagagcacgctaagggtggttttcattttacagggctgttgatgatgggttaaaaatgttcatttaagggctacccccgtgtttaatagatgaacaccacttctacacaaccctccttggtactgggggagggagagatctgacaaatactgcccattcccctaggctgactggatttgagaacaaatacccacccatttccaccatggtatggtaacttctctgagcttcagtttccaagtgaatttccatgtaataggacattcccattaaatacaagctgtttttactttttcgcctcccagggcctgtgggatctggtcccccagcctctcttgggctttcttacactaactctgtacctaccatctcctgcctcccttaggcaggcacctccaaccaccacacactccctgctgttttccctgcctggaactttccctcctgccccaccaagatcatttcatccagtcctgagctcagcttaagggaggcttcttgcctgtgggttccctcacccccatgcctgtcctccaggctggggcaggttcttagtttgcctggaattgttctgtacctctttgtagcacgtagtgttgtggaaactaagccactaattgagtttctggctcccctcctggggttgtaagttttgttcattcatgagggccgactgcatttcctggttactctatcccagtgaccagccacaggagatgtccaataaagtatgtgatgaaatggtctta

SEQ ID NO: 69051 - DNA, 7368 bp, Homo sapiens
gggcgggaggactcgactcggtgggagccgctagagccgggcgcccggggacgtagcctgtagggccaccgggtccccgtcagaggcggcggcgggagcagcggggactgcaggccggggtgcagcgaacgcgaccccgcgggctgcggcccggtgtgtgcggagcgtggcgggcgcagcttaccgggcggaggtgagcgcggcgccggctcctcctgcggcggactttgggtgcgacttgacgagcggtggttcgacaagtggccttgcgggccggatcgtcccagtggaagagttgtaaatttgcttctggccttcccctacggattatacctggccttcccctacggattatactcaacttactgtttagaaaatgtggcccacgagacgcctggttactatcaaaaggagcggggtcgacggtccccactttcccctgagcctcagcacctgcttgtttggaaggggtattgaatgtgacatccgtatccagcttcctgttgtgtcaaaacaacattgcaaaattgaaatccatgagcaggaggcaatattacataatttcagttccacaaatccaacacaagtaaatgggtctgttattgatgagcctgtacggctaaaacatggagatgtaataactattattgatcgttccttcaggtatgaaaatgaaagtcttcagaatggaaggaagtcaactgaatttccaagaaaaatacgtgaacaggagccagcacgtcgtgtctcaagatctagcttctcttctgaccctgatgagaaagctcaagattccaaggcctattcaaaaatcactgaaggaaaagtttcaggaaatcctcaggtacatatcaagaatgtcaaagaagacagtaccgcagatgactcaaaagacagtgttgctcagggaacaactaatgttcattcctcagaacatgctggacgtaatggcagaaatgcagctgatcccatttctggggattttaaagaaatttccagcgttaaattagtgagccgttatggagaattgaagtctgttcccactacacaatgtcttgacaatagcaaaaaaaatgaatctcccttttggaagctttatgagtcagtgaagaaagagttggatgtaaaatcacaaaaagaaaatgtcctacagtattgtagaaaatctggattacaaactgattacgcaacagagaaagaaagtgctgatggtttacagggggagacccaactgttggtctcgcgtaagtcaagaccaaaatctggtgggagcggccacgctgtggcagagcctgcttcacctgaacaagagcttgaccagaacaaggggaagggaagagacgtggagtctgttcagactcccagcaaggctgtgggcgccagctttcctctctatgagccggctaaaatgaagacccctgtacaatattcacagcaacaaaattctccacaaaaacataagaacaaagacctgtatactactggtagaagagaatctgtgaatctgggtaaaagtgaaggcttcaaggctggtgataaaactcttactcccaggaagctttcaactagaaatcgaacaccagctaaagttgaagatgcagctgactctgccactaagccagaaaatctctcttccaaaaccagaggaagtattcctacagatgtggaagttctgcctacggaaactgaaattcacaatgagccatttttaactctgtggctcactcaagttgagaggaagatccaaaaggattccctcagcaagcctgagaaattgggcactacagctggacagatgtgctctgggttacctggtcttagttcagttgatatcaacaactttggtgattccattaatgagagtgagggaatacctttgaaaagaaggcgtgtgtcctttggtgggcacctaagacctgaactatttgatgaaaacttgcctcctaatacgcctctcaaaaggggagaagccccaaccaaaagaaagtctctggtaatgcacactccacctgtcctgaagaaaatcatcaaggaacagcctcaaccatcaggaaaacaagagtcaggttcagaaatccatgtggaagtgaaggcacaaagcttggttataagccctccagctcctagtcctaggaaaactccagttgccagtgatcaacgccgtaggtcctgcaaaacagcccctgcttccagcagcaaatctcagacagaggttcctaagagaggaggagaaagagtggcaacctgccttcaaaagagagtgtctatcagccgaagtcaacatgatattttacagatgatatgttccaaaagaagaagtggtgcttcggaagcaaatctgattgttgcaaaatcatgggcagatgtagtaaaacttggtgcaaaacaaacacaaactaaagtcataaaacatggtcctcaaaggtcaatgaacaaaaggcaaagaagacctgctactccaaagaagcctgtgggcgaagttcacagtcaatttagtacaggccacgcaaactctccttgtaccataataatagggaaagctcatactgaaaaagtacatgtgcctgctcgaccctacagagtgctcaacaacttcatttccaaccaaaaaatggactttaaggaagatctttcaggaatagctgaaatgttcaagaccccagtgaaggagcaaccgcagttgacaagcacatgtcacatcgctatttcaaattcagagaatttgcttggaaaacagtttcaaggaactgattcaggagaagaacctctgctccccacctcagagagttttggaggaaatgtgttcttcagtgcacagaatgcagcaaaacagccatctgataaatgctctgcaagccctcccttaagacggcagtgtattagagaaaatggaaacgtagcaaaaacgcccaggaacacctacaaaatgacttctctggagacaaaaacttcagatactgagacagagccttcaaaaacagtatccactgtaaacaggtcaggaaggtctacagagttcaggaatatacagaagctacctgtggaaagtaagagtgaagaaacaaatacagaaattgttgagtgcatcctaaaaagaggtcagaaggcaacactactacaacaaaggagagaaggagagatgaaggaaatagaaagaccttttgagacatataaggaaaatattgaattaaaagaaaacgatgaaaagatgaaagcaatgaagagatcaagaacttgggggcagaaatgtgcaccaatgtctgacctgacagacctcaagagcttgcctgatacagaactcatgaaagacacggcacgtggccagaatctcctccaaacccaagatcatgccaaggcaccaaagagtgagaaaggcaaaatcactaaaatgccctgccagtcattacaaccagaaccaataaacaccccaacacacacaaaacaacagttgaaggcatccctggggaaagtaggtgtgaaagaagagctcctagcagtcggcaagttcacacggacgtcaggggagaccacgcacacgcacagagagccagcaggagatggcaagagcatcagaacgtttaaggagtctccaaagcagatcctggacccagcagcccgtgtaactggaatgaagaagtggccaagaacgcctaaggaagaggcccagtcactagaagacctggctggcttcaaagagctcttccagacaccaggtccctctgaggaatcaatgactgatgagaaaactaccaaaatagcctgcaaatctccaccaccagaatcagtggacactccaacaagcacaaagcaatggcctaagagaagtctcaggaaagcagatgtagaggaagaattcttagcactcaggaaactaacaccatcagcagggaaagccatgcttacgcccaaaccagcaggaggtgatgagaaagacattaaagcatttatgggaactccagtgcagaaactggacctggcaggaactttacctggcagcaaaagacagctacagactcctaaggaaaaggcccaggctctagaagacctggctggctttaaagagctcttccagactcctggtcacaccgaggaattagtggctgctggtaaaaccactaaaataccctgcgactctccacagtcagacccagtggacaccccaacaagcacaaagcaacgacccaagagaagtatcaggaaagcagatgtagagggagaactcttagcgtgcaggaatctaatgccatcagcaggcaaagccatgcacacgcctaaaccatcagtaggtgaagagaaagacatcatcatatttgtgggaactccagtgcagaaactggacctgacagagaacttaaccggcagcaagagacggccacaaactcctaaggaagaggcccaggctctggaagacctgactggctttaaagagctcttccagacccctggtcatactgaagaagcagtggctgctggcaaaactactaaaatgccctgcgaatcttctccaccagaatcagcagacaccccaacaagcacaagaaggcagcccaagacacctttggagaaaagggacgtacagaaggagctctcagccctgaagaagctcacacagacatcaggggaaaccacacacacagataaagtaccaggaggtgaggataaaagcatcaacgcgtttagggaaactgcaaaacagaaactggacccagcagcaagtgtaactggtagcaagaggcacccaaaaactaaggaaaaggcccaacccctagaagacctggctggcttgaaagagctcttccagacaccagtatgcactgacaagcccacgactcacgagaaaactaccaaaatagcctgcagatcacaaccagacccagtggacacaccaacaagctccaagccacagtccaagagaagtctcaggaaagtggacgtagaagaagaattcttcgcactcaggaaacgaacaccatcagcaggcaaagccatgcacacacccaaaccagcagtaagtggtgagaaaaacatctacgcatttatgggaactccagtgcagaaactggacctgacagagaacttaactggcagcaagagacggctacaaactcctaaggaaaaggcccaggctctagaagacctggctggctttaaagagctcttccagacacgaggtcacactgaggaatcaatgactaacgataaaactgccaaagtagcctgcaaatcttcacaaccagacccagacaaaaacccagcaagctccaagcgacggctcaagacatccctggggaaagtgggcgtgaaagaagagctcctagcagttggcaagctcacacagacatcaggagagactacacacacacacacagagccaacaggagatggtaagagcatgaaagcatttatggagtctccaaagcagatcttagactcagcagcaagtctaactggcagcaagaggcagctgagaactcctaagggaaagtctgaagtccctgaagacctggccggcttcatcgagctcttccagacaccaagtcacactaaggaatcaatgactaacgaaaaaactaccaaagtatcctacagagcttcacagccagacctagtggacaccccaacaagctccaagccacagcccaagagaagtctcaggaaagcagacactgaagaagaatttttagcatttaggaaacaaacgccatcagcaggcaaagccatgcacacacccaaaccagcagtaggtgaagagaaagacatcaacacgtttttgggaactccagtgcagaaactggaccagccaggaaatttacctggcagcaatagacggctacaaactcgtaaggaaaaggcccaggctctagaagaactgactggcttcagagagcttttccagacaccatgcactgataaccccacgactgatgagaaaactaccaaaaaaatactctgcaaatctccgcaatcagacccagcggacaccccaacaaacacaaagcaacggcccaagagaagcctcaagaaagcagacgtagaggaagaatttttagcattcaggaaactaacaccatcagcaggcaaagccatgcacacgcctaaagcagcagtaggtgaagagaaagacatcaacacatttgtggggactccagtggagaaactggacctgctaggaaatttacctggcagcaagagacggccacaaactcctaaagaaaaggccaaggctctagaagatctggctggcttcaaagagctcttccagacaccaggtcacactgaggaatcaatgaccgatgacaaaatcacagaagtatcctgcaaatctccacaaccagacccagtcaaaaccccaacaagctccaagcaacgactcaagatatccttggggaaagtaggtgtgaaagaagaggtcctaccagtcggcaagctcacacagacgtcagggaagaccacacagacacacagagagacagcaggagatggaaagagcatcaaagcgtttaaggaatctgcaaagcagatgctggacccagcaaactatggaactgggatggagaggtggccaagaacacctaaggaagaggcccaatcactagaagacctggccggcttcaaagagctcttccagacaccagaccacactgaggaatcaacaactgatgacaaaactaccaaaatagcctgcaaatctccaccaccagaatcaatggacactccaacaagcacaaggaggcggcccaaaacacctttggggaaaagggatatagtggaagagctctcagccctgaagcagctcacacagaccacacacacagacaaagtaccaggagatgaggataaaggcatcaacgtgttcagggaaactgcaaaacagaaactggacccagcagcaagtgtaactggtagcaagaggcagccaagaactcctaagggaaaagcccaacccctagaagacttggctggcttgaaagagctcttccagacaccaatatgcactgacaagcccacgactcatgagaaaactaccaaaatagcctgcagatctccacaaccagacccagtgggtaccccaacaatcttcaagccacagtccaagagaagtctcaggaaagcagacgtagaggaagaatccttagcactcaggaggtgatgagaaagacatgaaagcatttatgggaactccagtgcagaaattggacctgccaggaaatttacctggcagcaaaagatggccacaaactcctaaggaaaaggcccaggctctagaagacctggctggcttcaaagagctcttccagacaccaggcactgacaagcccacgactgatgagaaaactaccaaaatagctctcgcctggactagagtgg

SEQ ID NO: 69052 - DNA, 7145 bp, Homo sapiens
gggcgggaggactcgactcggtgggagccgctagagccgggcgcccggggacgtagcctgtagggccaccgggtccccgtcagaggcggcggcgggagcagcggggactgcaggccggggtgcagcgaacgcgaccccgcgggctgcggcccggtgtgtgcggagcgtggcgggcgcagcttaccgggcggaggtgagcgcggcgccggctcctcctgcggcggactttgggtgcgacttgacgagcggtggttcgacaagtggccttgcgggccggatcgtcccagtggaagagttgtaaatttgcttctggccttcccctacggattatacctggccttcccctacggattatactcaacttactgtttagaaaatgtggcccacgagacgcctggttactatcaaaaggagcggggtcgacggtccccactttcccctgagcctcagcacctgcttgtttggaaggggtattgaatgtgacatccgtatccagcttcctgttgtgtcaaaacaacattgcaaaattgaaatccatgagcaggaggcaatattacataatttcagttccacaaatccaacacaagtaaatgggtctgttattgatgagcctgtacggctaaaacatggagatgtaataactattattgatcgttccttcaggtatgaaaatgaaagtcttcagaatggaaggaagtcaactgaatttccaagaaaaatacgtgaacaggagccagcacgtcgtgtctcaagatctagcttctcttctgaccctgatgagaaagctcaagattccaaggcctattcaaaaatcactgaaggaaaagtttcaggaaatcctcaggtacatatcaagaatgtcaaagaagacagtaccgcagatgactcaaaagacagtgttgctcagggaacaactaatgttcattcctcagaacatgctggacgtaatggcagaaatgcagctgatcccatttctggggattttaaagaaatttccagcgttaaattagtgagccgttatggagaattgaagtctgttcccactacacaatgtcttgacaatagcaaaaaaaatgaatctcccttttggaagctttatgagtcagtgaagaaagagttggatgtaaaatcacaaaaagaaaatgtcctacagtattgtagaaaatctggattacaaactgattacgcaacagagaaagaaagtgctgatggtttacagggggagacccaactgttggtctcgcgtaagtcaagaccaaaatctggtgggagcggccacgctgtggcagagcctgcttcacctgaacaagagcttgaccagaacaaggggaagggaagagacgtggagtctgttcagactcccagcaaggctgtgggcgccagctttcctctctatgagccggctaaaatgaagacccctgtacaatattcacagcaacaaaattctccacaaaaacataagaacaaagacctgtatactactggtagaagagaatctgtgaatctgggtaaaagtgaaggcttcaaggctggtgataaaactcttactcccaggaagctttcaactagaaatcgaacaccagctaaagttgaagatgcagctgactctgccactaagccagaaaatctctcttccaaaaccagaggaagtattcctacagatgtggaagttctgcctacggaaactgaaattcacaatgagccatttttaactctgtggctcactcaagttgagaggaagatccaaaaggattccctcagcaagcctgagaaattgggcactacagctggacagatgtgctctgggttacctggtcttagttcagttgatatcaacaactttggtgattccattaatgagagtgagggaatacctttgaaaagaaggcgtgtgtcctttggtgggcacctaagacctgaactatttgatgaaaacttgcctcctaatacgcctctcaaaaggggagaagccccaaccaaaagaaagtctctggtaatgcacactccacctgtcctgaagaaaatcatcaaggaacagcctcaaccatcaggaaaacaagagtcaggttcagaaatccatgtggaagtgaaggcacaaagcttggttataagccctccagctcctagtcctaggaaaactccagttgccagtgatcaacgccgtaggtcctgcaaaacagcccctgcttccagcagcaaatctcagacagaggttcctaagagaggaggagaaagagtggcaacctgccttcaaaagagagtgtctatcagccgaagtcaacatgatattttacagatgatatgttccaaaagaagaagtggtgcttcggaagcaaatctgattgttgcaaaatcatgggcagatgtagtaaaacttggtgcaaaacaaacacaaactaaagtcataaaacatggtcctcaaaggtcaatgaacaaaaggcaaagaagacctgctactccaaagaagcctgtgggcgaagttcacagtcaatttagtacaggccacgcaaactctccttgtaccataataatagggaaagctcatactgaaaaagtacatgtgcctgctcgaccctacagagtgctcaacaacttcatttccaaccaaaaaatggactttaaggaagatctttcaggaatagctgaaatgttcaagaccccagtgaaggagcaaccgcagttgacaagcacatgtcacatcgctatttcaaattcagagaatttgcttggaaaacagtttcaaggaactgattcaggagaagaacctctgctccccacctcagagagttttggaggaaatgtgttcttcagtgcacagaatgcagcaaaacagccatctgataaatgctctgcaagccctcccttaagacggcagtgtattagagaaaatggaaacgtagcaaaaacgcccaggaacacctacaaaatgacttctctggagacaaaaacttcagatactgagacagagccttcaaaaacagtatccactgtaaacaggtcaggaaggtctacagagttcaggaatatacagaagctacctgtggaaagtaagagtgaagaaacaaatacagaaattgttgagtgcatcctaaaaagaggtcagaaggcaacactactacaacaaaggagagaaggagagatgaaggaaatagaaagaccttttgagacatataaggaaaatattgaattaaaagaaaacgatgaaaagatgaaagcaatgaagagatcaagaacttgggggcagaaatgtgcaccaatgtctgacctgacagacctcaagagcttgcctgatacagaactcatgaaagacacggcacgtggccagaatctcctccaaacccaagatcatgccaaggcaccaaagagtgagaaaggcaaaatcactaaaatgccctgccagtcattacaaccagaaccaataaacaccccaacacacacaaaacaacagttgaaggcatccctggggaaagtaggtgtgaaagaagagctcctagcagtcggcaagttcacacggacgtcaggggagaccacgcacacgcacagagagccagcaggagatggcaagagcatcagaacgtttaaggagtctccaaagcagatcctggacccagcagcccgtgtaactggaatgaagaagtggccaagaacgcctaaggaagaggcccagtcactagaagacctggctggcttcaaagagctcttccagacaccaggtccctctgaggaatcaatgactgatgagaaaactaccaaaatagcctgcaaatctccaccaccagaatcagtggacactccaacaagcacaaagcaatggcctaagagaagtctcaggaaagcagatgtagaggaagaattcttagcactcaggaaactaacaccatcagcagggaaagccatgcttacgcccaaaccagcaggaggtgatgagaaagacattaaagcatttatgggaactccagtgcagaaactggacctggcaggaactttacctggcagcaaaagacagctacagactcctaaggaaaaggcccaggctctagaagacctggctggctttaaagagctcttccagactcctggtcacaccgaggaattagtggctgctggtaaaaccactaaaataccctgcgactctccacagtcagacccagtggacaccccaacaagcacaaagcaacgacccaagagaagtatcaggaaagcagatgtagagggagaactcttagcgtgcaggaatctaatgccatcagcaggcaaagccatgcacacgcctaaaccatcagtaggtgaagagaaagacatcatcatatttgtgggaactccagtgcagaaactggacctgacagagaacttaaccggcagcaagagacggccacaaactcctaaggaagaggcccaggctctggaagacctgactggctttaaagagctcttccagacccctggtcatactgaagaagcagtggctgctggcaaaactactaaaatgccctgcgaatcttctccaccagaatcagcagacaccccaacaagcacaagaaggcagcccaagacacctttggagaaaagggacgtacagaaggagctctcagccctgaagaagctcacacagacatcaggggaaaccacacacacagataaagtaccaggaggtgaggataaaagcatcaacgcgtttagggaaactgcaaaacagaaactggacccagcagcaagtgtaactggtagcaagaggcacccaaaaactaaggaaaaggcccaacccctagaagacctggctggcttgaaagagctcttccagacaccagtatgcactgacaagcccacgactcacgagaaaactaccaaaatagcctgcagatcacaaccagacccagtggacacaccaacaagctccaagccacagtccaagagaagtctcaggaaagtggacgtagaagaagaattcttcgcactcaggaaacgaacaccatcagcaggcaaagccatgcacacacccaaaccagcagtaagtggtgagaaaaacatctacgcatttatgggaactccagtgcagaaactggacctgacagagaacttaactggcagcaagagacggctacaaactcctaaggaaaaggcccaggctctagaagacctggctggctttaaagagctcttccagacacgaggtcacactgaggaatcaatgactaacgataaaactgccaaagtagcctgcaaatcttcacaaccagacccagacaaaaacccagcaagctccaagcgacggctcaagacatccctggggaaagtgggcgtgaaagaagagctcctagcagttggcaagctcacacagacatcaggagagactacacacacacacacagagccaacaggagatggtaagagcatgaaagcatttatggagtctccaaagcagatcttagactcagcagcaagtctaactggcagcaagaggcagctgagaactcctaagggaaagtctgaagtccctgaagacctggccggcttcatcgagctcttccagacaccaagtcacactaaggaatcaatgactaacgaaaaaactaccaaagtatcctacagagcttcacagccagacctagtggacaccccaacaagctccaagccacagcccaagagaagtctcaggaaagcagacactgaagaagaatttttagcatttaggaaacaaacgccatcagcaggcaaagccatgcacacacccaaaccagcagtaggtgaagagaaagacatcaacacgtttttgggaactccagtgcagaaactggaccagccaggaaatttacctggcagcaatagacggctacaaactcgtaaggaaaaggcccaggctctagaagaactgactggcttcagagagcttttccagacaccatgcactgataaccccacgactgatgagaaaactaccaaaaaaatactctgcaaatctccgcaatcagacccagcggacaccccaacaaacacaaagcaacggcccaagagaagcctcaagaaagcagacgtagaggaagaatttttagcattcaggaaactaacaccatcagcaggcaaagccatgcacacgcctaaagcagcagtaggtgaagagaaagacatcaacacatttgtggggactccagtggagaaactggacctgctaggaaatttacctggcagcaagagacggccacaaactcctaaagaaaaggccaaggctctagaagatctggctggcttcaaagagctcttccagacaccaggtcacactgaggaatcaatgaccgatgacaaaatcacagaagtatcctgcaaatctccacaaccagacccagtcaaaaccccaacaagctccaagcaacgactcaagatatccttggggaaagtaggtgtgaaagaagaggtcctaccagtcggcaagctcacacagacgtcagggaagaccacacagacacacagagagacagcaggagatggaaagagcatcaaagcgtttaaggaatctgcaaagcagatgctggacccagcaaactatggaactgggatggagaggtggccaagaacacctaaggaagaggcccaatcactagaagacctggccggcttcaaagagctcttccagacaccagaccacactgaggaatcaacaactgatgacaaaactaccaaaatagcctgcaaatctccaccaccagaatcaatggacactccaacaagcacaaggaggcggcccaaaacacctttggggaaaagggatatagtggaagagctctcagccctgaagcagctcacacagaccacacacacagacaaagtaccaggagatgaggataaaggcatcaacgtgttcagggaaactgcaaaacagaaactggacccagcagcaagtgtaactggtagcaagaggcagccaagaactcctaagggaaaagcccaacccctagaagacttggctggcttgaaagagctcttccagacaccaatatgcactgacaagcccacgactcatgagaaaactactggtttgacctgcagtgcgtctgcctctacaccccactaggcgtggtgcgctgcccgcgcgtcaggaagaacagcagcacggaccagggcagcgacgaggagggcagcctgcagaagga

SEQ ID NO: 69053 - DNA, 6256 bp, Homo sapiens
gggcgggaggactcgactcggtgggagccgctagagccgggcgcccggggacgtagcctgtagggccaccgggtccccgtcagaggcggcggcgggagcagcggggactgcaggccggggtgcagcgaacgcgaccccgcgggctgcggcccggtgtgtgcggagcgtggcgggcgcagcttaccgggcggaggtgagcgcggcgccggctcctcctgcggcggactttgggtgcgacttgacgagcggtggttcgacaagtggccttgcgggccggatcgtcccagtggaagagttgtaaatttgcttctggccttcccctacggattatacctggccttcccctacggattatactcaacttactgtttagaaaatgtggcccacgagacgcctggttactatcaaaaggagcggggtcgacggtccccactttcccctgagcctcagcacctgcttgtttggaaggggtattgaatgtgacatccgtatccagcttcctgttgtgtcaaaacaacattgcaaaattgaaatccatgagcaggaggcaatattacataatttcagttccacaaatccaacacaagtaaatgggtctgttattgatgagcctgtacggctaaaacatggagatgtaataactattattgatcgttccttcaggtatgaaaatgaaagtcttcagaatggaaggaagtcaactgaatttccaagaaaaatacgtgaacaggagccagcacgtcgtgtctcaagatctagcttctcttctgaccctgatgagaaagctcaagattccaaggcctattcaaaaatcactgaaggaaaagtttcaggaaatcctcaggtacatatcaagaatgtcaaagaagacagtaccgcagatgactcaaaagacagtgttgctcagggaacaactaatgttcattcctcagaacatgctggacgtaatggcagaaatgcagctgatcccatttctggggattttaaagaaatttccagcgttaaattagtgagccgttatggagaattgaagtctgttcccactacacaatgtcttgacaatagcaaaaaaaatgaatctcccttttggaagctttatgagtcagtgaagaaagagttggatgtaaaatcacaaaaagaaaatgtcctacagtattgtagaaaatctggattacaaactgattacgcaacagagaaagaaagtgctgatggtttacagggggagacccaactgttggtctcgcgtaagtcaagaccaaaatctggtgggagcggccacgctgtggcagagcctgcttcacctgaacaagagcttgaccagaacaaggggaagggaagagacgtggagtctgttcagactcccagcaaggctgtgggcgccagctttcctctctatgagccggctaaaatgaagacccctgtacaatattcacagcaacaaaattctccacaaaaacataagaacaaagacctgtatactactggtagaagagaatctgtgaatctgggtaaaagtgaaggcttcaaggctggtgataaaactcttactcccaggaagctttcaactagaaatcgaacaccagctaaagttgaagatgcagctgactctgccactaagccagaaaatctctcttccaaaaccagaggaagtattcctacagatgtggaagttctgcctacggaaactgaaattcacaatgagccatttttaactctgtggctcactcaagttgagaggaagatccaaaaggattccctcagcaagcctgagaaattgggcactacagctggacagatgtgctctgggttacctggtcttagttcagttgatatcaacaactttggtgattccattaatgagagtgagggaatacctttgaaaagaaggcgtgtgtcctttggtgggcacctaagacctgaactatttgatgaaaacttgcctcctaatacgcctctcaaaaggggagaagccccaaccaaaagaaagtctctggtaatgcacactccacctgtcctgaagaaaatcatcaaggaacagcctcaaccatcaggaaaacaagagtcaggttcagaaatccatgtggaagtgaaggcacaaagcttggttataagccctccagctcctagtcctaggaaaactccagttgccagtgatcaacgccgtaggtcctgcaaaacagcccctgcttccagcagcaaatctcagacagaggttcctaagagaggaggagaaagagtggcaacctgccttcaaaagagagtgtctatcagccgaagtcaacatgatattttacagatgatatgttccaaaagaagaagtggtgcttcggaagcaaatctgattgttgcaaaatcatgggcagatgtagtaaaacttggtgcaaaacaaacacaaactaaagtcataaaacatggtcctcaaaggtcaatgaacaaaaggcaaagaagacctgctactccaaagaagcctgtgggcgaagttcacagtcaatttagtacaggccacgcaaactctccttgtaccataataatagggaaagctcatactgaaaaagtacatgtgcctgctcgaccctacagagtgctcaacaacttcatttccaaccaaaaaatggactttaaggaagatctttcaggaatagctgaaatgttcaagaccccagtgaaggagcaaccgcagttgacaagcacatgtcacatcgctatttcaaattcagagaatttgcttggaaaacagtttcaaggaactgattcaggagaagaacctctgctccccacctcagagagttttggaggaaatgtgttcttcagtgcacagaatgcagcaaaacagccatctgataaatgctctgcaagccctcccttaagacggcagtgtattagagaaaatggaaacgtagcaaaaacgcccaggaacacctacaaaatgacttctctggagacaaaaacttcagatactgagacagagccttcaaaaacagtatccactgtaaacaggtcaggaaggtctacagagttcaggaatatacagaagctacctgtggaaagtaagagtgaagaaacaaatacagaaattgttgagtgcatcctaaaaagaggtcagaaggcaacactactacaacaaaggagagaaggagagatgaaggaaatagaaagaccttttgagacatataaggaaaatattgaattaaaagaaaacgatgaaaagatgaaagcaatgaagagatcaagaacttgggggcagaaatgtgcaccaatgtctgacctgacagacctcaagagcttgcctgatacagaactcatgaaagacacggcacgtggccagaatctcctccaaacccaagatcatgccaaggcaccaaagagtgagaaaggcaaaatcactaaaatgccctgccagtcattacaaccagaaccaataaacaccccaacacacacaaaacaacagttgaaggcatccctggggaaagtaggtgtgaaagaagagctcctagcagtcggcaagttcacacggacgtcaggggagaccacgcacacgcacagagagccagcaggagatggcaagagcatcagaacgtttaaggagtctccaaagcagatcctggacccagcagcccgtgtaactggaatgaagaagtggccaagaacgcctaaggaagaggcccagtcactagaagacctggctggcttcaaagagctcttccagacaccaggtccctctgaggaatcaatgactgatgagaaaactaccaaaatagcctgcaaatctccaccaccagaatcagtggacactccaacaagcacaaagcaatggcctaagagaagtctcaggaaagcagatgtagaggaagaattcttagcactcaggaaactaacaccatcagcagggaaagccatgcttacgcccaaaccagcaggaggtgatgagaaagacattaaagcatttatgggaactccagtgcagaaactggacctggcaggaactttacctggcagcaaaagacagctacagactcctaaggaaaaggcccaggctctagaagacctggctggctttaaagagctcttccagactcctggtcacaccgaggaattagtggctgctggtaaaaccactaaaataccctgcgactctccacagtcagacccagtggacaccccaacaagcacaaagcaacgacccaagagaagtatcaggaaagcagatgtagagggagaactcttagcgtgcaggaatctaatgccatcagcaggcaaagccatgcacacgcctaaaccatcagtaggtgaagagaaagacatcatcatatttgtgggaactccagtgcagaaactggacctgacagagaacttaaccggcagcaagagacggccacaaactcctaaggaagaggcccaggctctggaagacctgactggctttaaagagctcttccagacccctggtcatactgaagaagcagtggctgctggcaaaactactaaaatgccctgcgaatcttctccaccagaatcagcagacaccccaacaagcacaagaaggcagcccaagacacctttggagaaaagggacgtacagaaggagctctcagccctgaagaagctcacacagacatcaggggaaaccacacacacagataaagtaccaggaggtgaggataaaagcatcaacgcgtttagggaaactgcaaaacagaaactggacccagcagcaagtgtaactggtagcaagaggcacccaaaaactaaggaaaaggcccaacccctagaagacctggctggcttgaaagagctcttccagacaccagtatgcactgacaagcccacgactcacgagaaaactaccaaaatagcctgcagatcacaaccagacccagtggacacaccaacaagctccaagccacagtccaagagaagtctcaggaaagtggacgtagaagaagaattcttcgcactcaggaaacgaacaccatcagcaggcaaagccatgcacacacccaaaccagcagtaagtggtgagaaaaacatctacgcatttatgggaactccagtgcagaaactggacctgacagagaacttaactggcagcaagagacggctacaaactcctaaggaaaaggcccaggctctagaagacctggctggctttaaagagctcttccagacacgaggtcacactgaggaatcaatgactaacgataaaactgccaaagtagcctgcaaatcttcacaaccagacccagacaaaaacccagcaagctccaagcgacggctcaagacatccctggggaaagtgggcgtgaaagaagagctcctagcagttggcaagctcacacagacatcaggagagactacacacacacacacagagccaacaggagatggtaagagcatgaaagcatttatggagtctccaaagcagatcttagactcagcagcaagtctaactggcagcaagaggcagctgagaactcctaagggaaagtctgaagtccctgaagacctggccggcttcatcgagctcttccagacaccaagtcacactaaggaatcaatgactaacgaaaaaactaccaaagtatcctacagagcttcacagccagacctagtggacaccccaacaagctccaagccacagcccaagagaagtctcaggaaagcagacactgaagaagaatttttagcatttaggaaacaaacgccatcagcaggcaaagccatgcacacacccaaaccagcagtaggtgaagagaaagacatcaacacgtttttgggaactccagtgcagaaactggaccagccaggaaatttacctggcagcaatagacggctacaaactcgtaaggaaaaggcccaggctctagaagaactgactggcttcagagagcttttccagacaccatgcactgataaccccacgactgatgagaaaactaccaaaaaaatactctgcaaatctccgcaatcagacccagcggacaccccaacaaacacaaagcaacggcccaagagaagcctcaagaaagcagacgtagaggaagaatttttagcattcaggaaactaacaccatcagcaggcaaagccatgcacacgcctaaagcagcagtaggtgaagagaaagacatcaacacatttgtggggactccagtggagaaactggacctgctaggaaatttacctggcagcaagagacggccacaaactcctaagttcagagccaggcctaacttccgagccagtcctaagttcagatca

SEQ ID NO: 69054 - DNA, 2443 bp, Homo sapiens
gggcgggaggactcgactcggtgggagccgctagagccgggcgcccggggacgtagcctgtagggccaccgggtccccgtcagaggcggcggcgggagcagcggggactgcaggccggggtgcagcgaacgcgaccccgcgggctgcggcccggtgtgtgcggagcgtggcgggcgcagcttaccgggcggaggtgagcgcggcgccggctcctcctgcggcggactttgggtgcgacttgacgagcggtggttcgacaagtggccttgcgggccggatcgtcccagtggaagagttgtaaatttgcttctggccttcccctacggattatacctggccttcccctacggattatactcaacttactgtttagaaaatgtggcccacgagacgcctggttactatcaaaaggagcggggtcgacggtccccactttcccctgagcctcagcacctgcttgtttggaaggggtattgaatgtgacatccgtatccagcttcctgttgtgtcaaaacaacattgcaaaattgaaatccatgagcaggaggcaatattacataatttcagttccacaaatccaacacaagtaaatgggtctgttattgatgagcctgtacggctaaaacatggagatgtaataactattattgatcgttccttcaggtatgaaaatgaaagtcttcagaatggaaggaagtcaactgaatttccaagaaaaatacgtgaacaggagccagcacgtcgtgtctcaagatctagcttctcttctgaccctgatgagaaagctcaagattccaaggcctattcaaaaatcactgaaggaaaagtttcaggaaatcctcaggtacatatcaagaatgtcaaagaagacagtaccgcagatgactcaaaagacagtgttgctcagggaacaactaatgttcattcctcagaacatgctggacgtaatggcagaaatgcagctgatcccatttctggggattttaaagaaatttccagcgttaaattagtgagccgttatggagaattgaagtctgttcccactacacaatgtcttgacaatagcaaaaaaaatgaatctcccttttggaagctttatgagtcagtgaagaaagagttggatgtaaaatcacaaaaagaaaatgtcctacagtattgtagaaaatctggattacaaactgattacgcaacagagaaagaaagtgctgatggtttacagggggagacccaactgttggtctcgcgtaagtcaagaccaaaatctggtgggagcggccacgctgtggcagagcctgcttcacctgaacaagagcttgaccagaacaaggggaagggaagagacgtggagtctgttcagactcccagcaaggctgtgggcgccagctttcctctctatgagccggctaaaatgaagacccctgtacaatattcacagcaacaaaattctccacaaaaacataagaacaaagacctgtatactactggtagaagagaatctgtgaatctgggtaaaagtgaaggcttcaaggctggtgataaaactcttactcccaggaagctttcaactagaaatcgaacaccagctaaagttgaagatgcagctgactctgccactaagccagaaaatctctcttccaaaaccagaggaagtattcctacagatgtggaagttctgcctacggaaactgaaattcacaatgagccatttttaactctgtggctcactcaagttgagaggaagatccaaaaggattccctcagcaagcctgagaaattgggcactacagctggacagatgtgctctgggttacctggtcttagttcagttgatatcaacaactttggtgattccattaatgagagtgagggaatacctttgaaaagaaggcgtgtgtcctttggtgggcacctaagacctgaactatttgatgaaaacttgcctcctaatacgcctctcaaaaggggagaagccccaaccaaaagaaagtctctggtaatgcacactccacctgtcctgaagaaaatcatcaaggaacagcctcaaccatcaggaaaacaagagtcaggttcagaaatccatgtggaagtgaaggcacaaagcttggttataagccctccagctcctagtcctaggaaaactccagttgccagtgatcaacgccgtaggtcctgcaaaacagcccctgcttccagcagcaaatctcagacagaggttcctaagagaggaggagaaagagtggcaacctgccttcaaaagagagtgtctatcagccgaagtcaacatgatattttacagatgatatgttccaaaagaagaagtggtgcttcggaagcaaatctgattgttgcaaaatcatgggcagatgtagtaaaacttggtgcaaaacaaacacaaactaaagtcataaaaaataaaataagctcatctgatgctagtgcgaat

SEQ ID NO: 69055 - DNA, 12675 bp, Homo sapiens
gggcgggaggactcgactcggtgggagccgctagagccgggcgcccggggacgtagcctgtagggccaccgggtccccgtcagaggcggcggcgggagcagcggggactgcaggccggggtgcagcgaacgcgaccccgcgggctgcggcccggtgtgtgcggagcgtggcgggcgcagcttaccgggcggaggtgagcgcggcgccggctcctcctgcggcggactttgggtgcgacttgacgagcggtggttcgacaagtggccttgcgggccggatcgtcccagtggaagagttgtaaatttgcttctggccttcccctacggattatacctggccttcccctacggattatactcaacttactgtttagaaaatgtggcccacgagacgcctggttactatcaaaaggagcggggtcgacggtccccactttcccctgagcctcagcacctgcttgtttggaaggggtattgaatgtgacatccgtatccagcttcctgttgtgtcaaaacaacattgcaaaattgaaatccatgagcaggaggcaatattacataatttcagttccacaaatccaacacaagtaaatgggtctgttattgatgagcctgtacggctaaaacatggagatgtaataactattattgatcgttccttcaggtatgaaaatgaaagtcttcagaatggaaggaagtcaactgaatttccaagaaaaatacgtgaacaggagccagcacgtcgtgtctcaagatctagcttctcttctgaccctgatgagaaagctcaagattccaaggcctattcaaaaatcactgaaggaaaagtttcaggaaatcctcaggtacatatcaagaatgtcaaagaagacagtaccgcagatgactcaaaagacagtgttgctcagggaacaactaatgttcattcctcagaacatgctggacgtaatggcagaaatgcagctgatcccatttctggggattttaaagaaatttccagcgttaaattagtgagccgttatggagaattgaagtctgttcccactacacaatgtcttgacaatagcaaaaaaaatgaatctcccttttggaagctttatgagtcagtgaagaaagagttggatgtaaaatcacaaaaagaaaatgtcctacagtattgtagaaaatctggattacaaactgattacgcaacagagaaagaaagtgctgatggtttacagggggagacccaactgttggtctcgcgtaagtcaagaccaaaatctggtgggagcggccacgctgtggcagagcctgcttcacctgaacaagagcttgaccagaacaaggggaagggaagagacgtggagtctgttcagactcccagcaaggctgtgggcgccagctttcctctctatgagccggctaaaatgaagacccctgtacaatattcacagcaacaaaattctccacaaaaacataagaacaaagacctgtatactactggtagaagagaatctgtgaatctgggtaaaagtgaaggcttcaaggctggtgataaaactcttactcccaggaagctttcaactagaaatcgaacaccagctaaagttgaagatgcagctgactctgccactaagccagaaaatctctcttccaaaaccagaggaagtattcctacagatgtggaagttctgcctacggaaactgaaattcacaatgagccatttttaactctgtggctcactcaagttgagaggaagatccaaaaggattccctcagcaagcctgagaaattgggcactacagctggacagatgtgctctgggttacctggtcttagttcagttgatatcaacaactttggtgattccattaatgagagtgagggaatacctttgaaaagaaggcgtgtgtcctttggtgggcacctaagacctgaactatttgatgaaaacttgcctcctaatacgcctctcaaaaggggagaagccccaaccaaaagaaagtctctggtaatgcacactccacctgtcctgaagaaaatcatcaaggaacagcctcaaccatcaggaaaacaagagtcaggttcagaaatccatgtggaagtgaaggcacaaagcttggttataagccctccagctcctagtcctaggaaaactccagttgccagtgatcaacgccgtaggtcctgcaaaacagcccctgcttccagcagcaaatctcagacagaggttcctaagagaggaggagaaagagtggcaacctgccttcaaaagagagtgtctatcagccgaagtcaacatgatattttacagatgatatgttccaaaagaagaagtggtgcttcggaagcaaatctgattgttgcaaaatcatgggcagatgtagtaaaacttggtgcaaaacaaacacaaactaaagtcataaaacatggtcctcaaaggtcaatgaacaaaaggcaaagaagacctgctactccaaagaagcctgtgggcgaagttcacagtcaatttagtacaggccacgcaaactctccttgtaccataataatagggaaagctcatactgaaaaagtacatgtgcctgctcgaccctacagagtgctcaacaacttcatttccaaccaaaaaatggactttaaggaagatctttcaggaatagctgaaatgttcaagaccccagtgaaggagcaaccgcagttgacaagcacatgtcacatcgctatttcaaattcagagaatttgcttggaaaacagtttcaaggaactgattcaggagaagaacctctgctccccacctcagagagttttggaggaaatgtgttcttcagtgcacagaatgcagcaaaacagccatctgataaatgctctgcaagccctcccttaagacggcagtgtattagagaaaatggaaacgtagcaaaaacgcccaggaacacctacaaaatgacttctctggagacaaaaacttcagatactgagacagagccttcaaaaacagtatccactgtaaacaggtcaggaaggtctacagagttcaggaatatacagaagctacctgtggaaagtaagagtgaagaaacaaatacagaaattgttgagtgcatcctaaaaagaggtcagaaggcaacactactacaacaaaggagagaaggagagatgaaggaaatagaaagaccttttgagacatataaggaaaatattgaattaaaagaaaacgatgaaaagatgaaagcaatgaagagatcaagaacttgggggcagaaatgtgcaccaatgtctgacctgacagacctcaagagcttgcctgatacagaactcatgaaagacacggcacgtggccagaatctcctccaaacccaagatcatgccaaggcaccaaagagtgagaaaggcaaaatcactaaaatgccctgccagtcattacaaccagaaccaataaacaccccaacacacacaaaacaacagttgaaggcatccctggggaaagtaggtgtgaaagaagagctcctagcagtcggcaagttcacacggacgtcaggggagaccacgcacacgcacagagagccagcaggagatggcaagagcatcagaacgtttaaggagtctccaaagcagatcctggacccagcagcccgtgtaactggaatgaagaagtggccaagaacgcctaaggaagaggcccagtcactagaagacctggctggcttcaaagagctcttccagacaccaggtccctctgaggaatcaatgactgatgagaaaactaccaaaatagcctgcaaatctccaccaccagaatcagtggacactccaacaagcacaaagcaatggcctaagagaagtctcaggaaagcagatgtagaggaagaattcttagcactcaggaaactaacaccatcagcagggaaagccatgcttacgcccaaaccagcaggaggtgatgagaaagacattaaagcatttatgggaactccagtgcagaaactggacctggcaggaactttacctggcagcaaaagacagctacagactcctaaggaaaaggcccaggctctagaagacctggctggctttaaagagctcttccagactcctggtcacaccgaggaattagtggctgctggtaaaaccactaaaataccctgcgactctccacagtcagacccagtggacaccccaacaagcacaaagcaacgacccaagagaagtatcaggaaagcagatgtagagggagaactcttagcgtgcaggaatctaatgccatcagcaggcaaagccatgcacacgcctaaaccatcagtaggtgaagagaaagacatcatcatatttgtgggaactccagtgcagaaactggacctgacagagaacttaaccggcagcaagagacggccacaaactcctaaggaagaggcccaggctctggaagacctgactggctttaaagagctcttccagacccctggtcatactgaagaagcagtggctgctggcaaaactactaaaatgccctgcgaatcttctccaccagaatcagcagacaccccaacaagcacaagaaggcagcccaagacacctttggagaaaagggacgtacagaaggagctctcagccctgaagaagctcacacagacatcaggggaaaccacacacacagataaagtaccaggaggtgaggataaaagcatcaacgcgtttagggaaactgcaaaacagaaactggacccagcagcaagtgtaactggtagcaagaggcacccaaaaactaaggaaaaggcccaacccctagaagacctggctggcttgaaagagctcttccagacaccagtatgcactgacaagcccacgactcacgagaaaactaccaaaatagcctgcagatcacaaccagacccagtggacacaccaacaagctccaagccacagtccaagagaagtctcaggaaagtggacgtagaagaagaattcttcgcactcaggaaacgaacaccatcagcaggcaaagccatgcacacacccaaaccagcagtaagtggtgagaaaaacatctacgcatttatgggaactccagtgcagaaactggacctgacagagaacttaactggcagcaagagacggctacaaactcctaaggaaaaggcccaggctctagaagacctggctggctttaaagagctcttccagacacgaggtcacactgaggaatcaatgactaacgataaaactgccaaagtagcctgcaaatcttcacaaccagacccagacaaaaacccagcaagctccaagcgacggctcaagacatccctggggaaagtgggcgtgaaagaagagctcctagcagttggcaagctcacacagacatcaggagagactacacacacacacacagagccaacaggagatggtaagagcatgaaagcatttatggagtctccaaagcagatcttagactcagcagcaagtctaactggcagcaagaggcagctgagaactcctaagggaaagtctgaagtccctgaagacctggccggcttcatcgagctcttccagacaccaagtcacactaaggaatcaatgactaacgaaaaaactaccaaagtatcctacagagcttcacagccagacctagtggacaccccaacaagctccaagccacagcccaagagaagtctcaggaaagcagacactgaagaagaatttttagcatttaggaaacaaacgccatcagcaggcaaagccatgcacacacccaaaccagcagtaggtgaagagaaagacatcaacacgtttttgggaactccagtgcagaaactggaccagccaggaaatttacctggcagcaatagacggctacaaactcgtaaggaaaaggcccaggctctagaagaactgactggcttcagagagcttttccagacaccatgcactgataaccccacgactgatgagaaaactaccaaaaaaatactctgcaaatctccgcaatcagacccagcggacaccccaacaaacacaaagcaacggcccaagagaagcctcaagaaagcagacgtagaggaagaatttttagcattcaggaaactaacaccatcagcaggcaaagccatgcacacgcctaaagcagcagtaggtgaagagaaagacatcaacacatttgtggggactccagtggagaaactggacctgctaggaaatttacctggcagcaagagacggccacaaactcctaaagaaaaggccaaggctctagaagatctggctggcttcaaagagctcttccagacaccaggtcacactgaggaatcaatgaccgatgacaaaatcacagaagtatcctgcaaatctccacaaccagacccagtcaaaaccccaacaagctccaagcaacgactcaagatatccttggggaaagtaggtgtgaaagaagaggtcctaccagtcggcaagctcacacagacgtcagggaagaccacacagacacacagagagacagcaggagatggaaagagcatcaaagcgtttaaggaatctgcaaagcagatgctggacccagcaaactatggaactgggatggagaggtggccaagaacacctaaggaagaggcccaatcactagaagacctggccggcttcaaagagctcttccagacaccagaccacactgaggaatcaacaactgatgacaaaactaccaaaatagcctgcaaatctccaccaccagaatcaatggacactccaacaagcacaaggaggcggcccaaaacacctttggggaaaagggatatagtggaagagctctcagccctgaagcagctcacacagaccacacacacagacaaagtaccaggagatgaggataaaggcatcaacgtgttcagggaaactgcaaaacagaaactggacccagcagcaagtgtaactggtagcaagaggcagccaagaactcctaagggaaaagcccaacccctagaagacttggctggcttgaaagagctcttccagacaccaatatgcactgacaagcccacgactcatgagaaaactaccaaaatagcctgcagatctccacaaccagacccagtgggtaccccaacaatcttcaagccacagtccaagagaagtctcaggaaagcagacgtagaggaagaatccttagcactcaggaaacgaacaccatcagtagggaaagctatggacacacccaaaccagcaggaggtgatgagaaagacatgaaagcatttatgggaactccagtgcagaaattggacctgccaggaaatttacctggcagcaaaagatggccacaaactcctaaggaaaaggcccaggctctagaagacctggctggcttcaaagagctcttccagacaccaggcactgacaagcccacgactgatgagaaaactaccaaaatagcctgcaaatctccacaaccagacccagtggacaccccagcaagcacaaagcaacggcccaagagaaacctcaggaaagcagacgtagaggaagaatttttagcactcaggaaacgaacaccatcagcaggcaaagccatggacacaccaaaaccagcagtaagtgatgagaaaaatatcaacacatttgtggaaactccagtgcagaaactggacctgctaggaaatttacctggcagcaagagacagccacagactcctaaggaaaaggctgaggctctagaggacctggttggcttcaaagaactcttccagacaccaggtcacactgaggaatcaatgactgatgacaaaatcacagaagtatcctgtaaatctccacagccagagtcattcaaaacctcaagaagctccaagcaaaggctcaagatacccctggtgaaagtggacatgaaagaagagcccctagcagtcagcaagctcacacggacatcaggggagactacgcaaacacacacagagccaacaggagatagtaagagcatcaaagcgtttaaggagtctccaaagcagatcctggacccagcagcaagtgtaactggtagcaggaggcagctgagaactcgtaaggaaaaggcccgtgctctagaagacctggttgacttcaaagagctcttctcagcaccaggtcacactgaagagtcaatgactattgacaaaaacacaaaaattccctgcaaatctcccccaccagaactaacagacactgccacgagcacaaagagatgccccaagacacgtcccaggaaagaagtaaaagaggagctctcagcagttgagaggctcacgcaaacatcagggcaaagcacacacacacacaaagaaccagcaagcggtgatgagggcatcaaagtattgaagcaacgtgcaaagaagaaaccaaacccagtagaagaggaacccagcaggagaaggccaagagcacctaaggaaaaggcccaacccctggaagacctggccggcttcacagagctctctgaaacatcaggtcacactcaggaatcactgactgctggcaaagccactaaaataccctgcgaatctcccccactagaagtggtagacaccacagcaagcacaaagaggcatctcaggacacgtgtgcagaaggtacaagtaaaagaagagccttcagcagtcaagttcacacaaacatcaggggaaaccacggatgcagacaaagaaccagcaggtgaagataaaggcatcaaagcattgaaggaatctgcaaaacagacaccggctccagcagcaagtgtaactggcagcaggagacggccaagagcacccagggaaagtgcccaagccatagaagacctagctggcttcaaagacccagcagcaggtcacactgaagaatcaatgactgatgacaaaaccactaaaataccctgcaaatcatcaccagaactagaagacaccgcaacaagctcaaagagacggcccaggacacgtgcccagaaagtagaagtgaaggaggagctgttagcagttggcaagctcacacaaacctcaggggagaccacgcacaccgacaaagagccggtaggtgagggcaaaggcacgaaagcatttaagcaacctgcaaagcggaagctggacgcagaagatgtaattggcagcaggagacagccaagagcacctaaggaaaaggcccaacccctggaagatctggccagcttccaagagctctctcaaacaccaggccacactgaggaactggcaaatggtgctgctgatagctttacaagcgctccaaagcaaacacctgacagtggaaaacctctaaaaatatccagaagagttcttcgggcccctaaagtagaacccgtgggagacgtggtaagcaccagagaccctgtaaaatcacaaagcaaaagcaacacttccctgcccccactgcccttcaagaggggaggtggcaaagatggaagcgtcacgggaaccaagaggctgcgctgcatgccagcaccagaggaaattgtggaggagctgccagccagcaagaagcagagggttgctcccagggcaagaggcaaatcatccgaacccgtggtcatcatgaagagaagtttgaggacttctgcaaaaagaattgaacctgcggaagagctgaacagcaacgacatgaaaaccaacaaagaggaacacaaattacaagactcggtccctgaaaataagggaatatccctgcgctccagacgccaaaataagactgaggcagaacagcaaataactgaggtctttgtattagcagaaagaatagaaataaacagaaatgaaaagaagcccatgaagacctccccagagatggacattcagaatccagatgatggagcccggaaacccatacctagagacaaagtcactgagaacaaaaggtgcttgaggtctgctagacagaatgagagctcccagcctaaggtggcagaggagagcggagggcagaagagtgcgaaggttctcatgcagaatcagaaagggaaaggagaagcaggaaattcagactccatgtgcctgagatcaagaaagacaaaaagccagcctgcagcaagcactttggagagcaaatctgtgcagagagtaacgcggagtgtcaagaggtgtgcagaaaatccaaagaaggctgaggacaatgtgtgtgtcaagaaaataagaaccagaagtcatagggacagtgaagatatttgacagaaaaatcgaactgggaaaaatataataaagttagttttgtgataagttctagtgcagtttttgtcataaattacaagtgaattctgtaagtaaggctgtcagtctgcttaagggaagaaaactttggatttgctgggtctgaatcggcttcataaactccactgggagcactgctgggctcctggactgagaatagttgaacaccgggggctttgtgaaggagtctgggccaaggtttgccctcagctttgcagaatgaagccttgaggtctgtcaccacccacagccaccctacagcagccttaactgtgacacttgccacactgtgtcgtcgtttgtttgcctatgtcctccagggcacggtggcaggaacaactatcctcgtctgtcccaacactgagcaggcactcggtaaacacgaatgaatggatgagcgcacggatgaatggagcttacaagatctgtctttccaatggccgggggcatttggtccccaaattaaggctattggacatctgcacaggacagtcctatttttgatgtcctttcctttctgaaaataaagttttgtgctttggagaatgactcgtgagcacatctttagggaccaagagtgactttctgtaaggagtgactcgtggcttgccttggtctcttgggaatacttttctaactagggttgctctcacctgagacattctccacccgcggaatctcagggtcccaggctgtgggccatcacgacctcaaactggctcctaatctccagctttcctgtcattgaaagcttcggaagtttactggctctgctcccgcctgttttctttctgactctatctggcagcccgatgccacccagtacaggaagtgacaccagtactctgtaaagcatcatcatccttggagagactgagcactcagcaccttcagccacgatttcaggatcgcttccttgtgagccgctgcctccgaaatctcctttgaagcccagacatctttctccagcttcagacttgtagatataactcgttcatcttcatttactttccactttgccccctgtcctctctgtgttccccaaatcagagaatagcccgccatcccccaggtcacctgtctggattcctccccattcacccaccttgccaggtgcaggtgaggatggtgcaccagacagggtagctgtcccccaaaatgtgccctgtgcgggcagtgccccgtctccacgtttgtttccccagtgtctggcggggagccaggtgacatcataaatacttgctgaatgaatgcagaaatcagcggtactgacttgtactatattggctgccatgatagggttctcacagcgtcatccatgatcgtaagggagaatgacattctgcttgagggagggaatagaaaggggcagggaggggacatctgagggcttcacagggctgcaaagggtacagggattgcaccagggcagaacaggggagggtgttcaaggaagagtggctcttagcagaggcactttggaaggtgtgaggcataaatgcttccttctacgtaggccaacctcaaaactttcagtaggaatgttgctatgatcaagttgttctaacactttagacttagtagtaattatgaacctcacatagaaaaatttcatccagccatatgcctgtggagtggaatattctgtttagtagaaaaatcctttagagttcagctctaaccagaaatcttgctgaagtatgtcagcaccttttctcaccctggtaagtacagtatttcaagagcacgctaagggtggttttcattttacagggctgttgatgatgggttaaaaatgttcatttaagggctacccccgtgtttaatagatgaacaccacttctacacaaccctccttggtactgggggagggagagatctgacaaatactgcccattcccctaggctgactggatttgagaacaaatacccacccatttccaccatggtatggtaacttctctgagcttcagtttccaagtgaatttccatgtaataggacattcccattaaatacaagctgtttttactttttcgcctcccagggcctgtgggatctggtcccccagcctctcttgggctttcttacactaactctgtacctaccatctcctgcctcccttaggcaggcacctccaaccaccacacactccctgctgttttccctgcctggaactttccctcctgccccaccaagatcatttcatccagtcctgagctcagcttaagggaggcttcttgcctgtgggttccctcacccccatgcctgtcctccaggctggggcaggttcttagtttgcctggaattgttctgtacctctttgtagcacgtagtgttgtggaaactaagccactaattgagtttctggctcccctcctggggttgtaagttttgttcattcatgagggccgactgcatttcctggttactctatcccagtgaccagccacaggagatgtccaataaagtatgtgatgaaatggtctta

SEQ ID NO: 69056 - DNA, 12599 bp, Homo sapiens
gggcgggaggactcgactcggtgggagccgctagagccgggcgcccggggacgtagcctgtagggccaccgggtccccgtcagaggcggcggcgggagcagcggggactgcaggccggggtgcagcgaacgcgaccccgcgggctgcggcccggtgtgtgcggagcgtggcgggcgcagcttaccgggcggaggtgagcgcggcgccggctcctcctgcggcggactttgggtgcgacttgacgagcggtggttcgacaagtggccttgcgggccggatcgtcccagtggaagagttgtaaatttgcttctggccttcccctacggattatacctggccttcccctacggattatactcaacttactgtttagaaaatgtggcccacgagacgcctggttactatcaaaaggagcggggtcgacggtccccactttcccctgagcctcagcacctgcttgtttggaaggggtattgaatgtgacatccgtatccagcttcctgttgtgtcaaaacaacattgcaaaattgaaatccatgagcaggaggcaatattacataatttcagttccacaaatccaacacaagtaaatgggtctgttattgatgagcctgtacggctaaaacatggagatgtaataactattattgatcgttccttcaggtatgaaaatgaaagtcttcagaatggaaggaagtcaactgaatttccaagaaaaatacgtgaacaggagccagcacgtcgtgtctcaagatctagcttctcttctgaccctgatgagaaagctcaagattccaaggcctattcaaaaatcactgaaggaaaagtttcaggaaatcctcaggtacatatcaagaatgtcaaagaagacagtaccgcagatgactcaaaagacagtgttgctcagggaacaactaatgttcattcctcagaacatgctggacgtaatggcagaaatgcagctgatcccatttctggggattttaaagaaatttccagcgttaaattagtgagccgttatggagaattgaagtctgttcccactacacaatgtcttgacaatagcaaaaaaaatgaatctcccttttggaagctttatgagtcagtgaagaaagagttggatgtaaaatcacaaaaagaaaatgtcctacagtattgtagaaaatctggattacaaactgattacgcaacagagaaagaaagtgctgatggtttacagggggagacccaactgttggtctcgcgtaagtcaagaccaaaatctggtgggagcggccacgctgtggcagagcctgcttcacctgaacaagagcttgaccagaacaaggggaagggaagagacgtggagtctgttcagactcccagcaaggctgtgggcgccagctttcctctctatgagccggctaaaatgaagacccctgtacaatattcacagcaacaaaattctccacaaaaacataagaacaaagacctgtatactactggtagaagagaatctgtgaatctgggtaaaagtgaaggcttcaaggctggtgataaaactcttactcccaggaagctttcaactagaaatcgaacaccagctaaagttgaagatgcagctgactctgccactaagccagaaaatctctcttccaaaaccagaggaagtattcctacagatgtggaagttctgcctacggaaactgaaattcacaatgagccatttttaactctgtggctcactcaagttgagaggaagatccaaaaggattccctcagcaagcctgagaaattgggcactacagctggacagatgtgctctgggttacctggtcttagttcagttgatatcaacaactttggtgattccattaatgagagtgagggaatacctttgaaaagaaggcgtgtgtcctttggtgggcacctaagacctgaactatttgatgaaaacttgcctcctaatacgcctctcaaaaggggagaagccccaaccaaaagaaagtctctggtaatgcacactccacctgtcctgaagaaaatcatcaaggaacagcctcaaccatcaggaaaacaagagtcaggttcagaaatccatgtggaagtgaaggcacaaagcttggttataagccctccagctcctagtcctaggaaaactccagttgccagtgatcaacgccgtaggtcctgcaaaacagcccctgcttccagcagcaaatctcagacagaggttcctaagagaggaggagaaagagtggcaacctgccttcaaaagagagtgtctatcagccgaagtcaacatgatattttacagatgatatgttccaaaagaagaagtggtgcttcggaagcaaatctgattgttgcaaaatcatgggcagatgtagtaaaacttggtgcaaaacaaacacaaactaaagtcataaaacatggtcctcaaaggtcaatgaacaaaaggcaaagaagacctgctactccaaagaagcctgtgggcgaagttcacagtcaatttagtacaggccacgcaaactctccttgtaccataataatagggaaagctcatactgaaaaagtacatgtgcctgctcgaccctacagagtgctcaacaacttcatttccaaccaaaaaatggactttaaggaagatctttcaggaatagctgaaatgttcaagaccccagtgaaggagcaaccgcagttgacaagcacatgtcacatcgctatttcaaattcagagaatttgcttggaaaacagtttcaaggaactgattcaggagaagaacctctgctccccacctcagagagttttggaggaaatgtgttcttcagtgcacagaatgcagcaaaacagccatctgataaatgctctgcaagccctcccttaagacggcagtgtattagagaaaatggaaacgtagcaaaaacgcccaggaacacctacaaaatgacttctctggagacaaaaacttcagatactgagacagagccttcaaaaacagtatccactgtaaacaggtcaggaaggtctacagagttcaggaatatacagaagctacctgtggaaagtaagagtgaagaaacaaatacagaaattgttgagtgcatcctaaaaagaggtcagaaggcaacactactacaacaaaggagagaaggagagatgaaggaaatagaaagaccttttgagacatataaggaaaatattgaattaaaagaaaacgatgaaaagatgaaagcaatgaagagatcaagaacttgggggcagaaatgtgcaccaatgtctgacctgacagacctcaagagcttgcctgatacagaactcatgaaagacacggcacgtggccagaatctcctccaaacccaagatcatgccaaggcaccaaagagtgagaaaggcaaaatcactaaaatgccctgccagtcattacaaccagaaccaataaacaccccaacacacacaaaacaacagttgaaggcatccctggggaaagtaggtgtgaaagaagagctcctagcagtcggcaagttcacacggacgtcaggggagaccacgcacacgcacagagagccagcaggagatggcaagagcatcagaacgtttaaggagtctccaaagcagatcctggacccagcagcccgtgtaactggaatgaagaagtggccaagaacgcctaaggaagaggcccagtcactagaagacctggctggcttcaaagagctcttccagacaccaggtccctctgaggaatcaatgactgatgagaaaactaccaaaatagcctgcaaatctccaccaccagaatcagtggacactccaacaagcacaaagcaatggcctaagagaagtctcaggaaagcagatgtagaggaagaattcttagcactcaggaaactaacaccatcagcagggaaagccatgcttacgcccaaaccagcaggaggtgatgagaaagacattaaagcatttatgggaactccagtgcagaaactggacctggcaggaactttacctggcagcaaaagacagctacagactcctaaggaaaaggcccaggctctagaagacctggctggctttaaagagctcttccagactcctggtcacaccgaggaattagtggctgctggtaaaaccactaaaataccctgcgactctccacagtcagacccagtggacaccccaacaagcacaaagcaacgacccaagagaagtatcaggaaagcagatgtagagggagaactcttagcgtgcaggaatctaatgccatcagcaggcaaagccatgcacacgcctaaaccatcagtaggtgaagagaaagacatcatcatatttgtgggaactccagtgcagaaactggacctgacagagaacttaaccggcagcaagagacggccacaaactcctaaggaagaggcccaggctctggaagacctgactggctttaaagagctcttccagacccctggtcatactgaagaagcagtggctgctggcaaaactactaaaatgccctgcgaatcttctccaccagaatcagcagacaccccaacaagcacaagaaggcagcccaagacacctttggagaaaagggacgtacagaaggagctctcagccctgaagaagctcacacagacatcaggggaaaccacacacacagataaagtaccaggaggtgaggataaaagcatcaacgcgtttagggaaactgcaaaacagaaactggacccagcagcaagtgtaactggtagcaagaggcacccaaaaactaaggaaaaggcccaacccctagaagacctggctggcttgaaagagctcttccagacaccagtatgcactgacaagcccacgactcacgagaaaactaccaaaatagcctgcagatcacaaccagacccagtggacacaccaacaagctccaagccacagtccaagagaagtctcaggaaagtggacgtagaagaagaattcttcgcactcaggaaacgaacaccatcagcaggcaaagccatgcacacacccaaaccagcagtaagtggtgagaaaaacatctacgcatttatgggaactccagtgcagaaactggacctgacagagaacttaactggcagcaagagacggctacaaactcctaaggaaaaggcccaggctctagaagacctggctggctttaaagagctcttccagacacgaggtcacactgaggaatcaatgactaacgataaaactgccaaagtagcctgcaaatcttcacaaccagacccagacaaaaacccagcaagctccaagcgacggctcaagacatccctggggaaagtgggcgtgaaagaagagctcctagcagttggcaagctcacacagacatcaggagagactacacacacacacacagagccaacaggagatggtaagagcatgaaagcatttatggagtctccaaagcagatcttagactcagcagcaagtctaactggcagcaagaggcagctgagaactcctaagggaaagtctgaagtccctgaagacctggccggcttcatcgagctcttccagacaccaagtcacactaaggaatcaatgactaacgaaaaaactaccaaagtatcctacagagcttcacagccagacctagtggacaccccaacaagctccaagccacagcccaagagaagtctcaggaaagcagacactgaagaagaatttttagcatttaggaaacaaacgccatcagcaggcaaagccatgcacacacccaaaccagcagtaggtgaagagaaagacatcaacacgtttttgggaactccagtgcagaaactggaccagccaggaaatttacctggcagcaatagacggctacaaactcgtaaggaaaaggcccaggctctagaagaactgactggcttcagagagcttttccagacaccatgcactgataaccccacgactgatgagaaaactaccaaaaaaatactctgcaaatctccgcaatcagacccagcggacaccccaacaaacacaaagcaacggcccaagagaagcctcaagaaagcagacgtagaggaagaatttttagcattcaggaaactaacaccatcagcaggcaaagccatgcacacgcctaaagcagcagtaggtgaagagaaagacatcaacacatttgtggggactccagtggagaaactggacctgctaggaaatttacctggcagcaagagacggccacaaactcctaaagaaaaggccaaggctctagaagatctggctggcttcaaagagctcttccagacaccaggtcacactgaggaatcaatgaccgatgacaaaatcacagaagtatcctgcaaatctccacaaccagacccagtcaaaaccccaacaagctccaagcaacgactcaagatatccttggggaaagtaggtgtgaaagaagaggtcctaccagtcggcaagctcacacagacgtcagggaagaccacacagacacacagagagacagcaggagatggaaagagcatcaaagcgtttaaggaatctgcaaagcagatgctggacccagcaaactatggaactgggatggagaggtggccaagaacacctaaggaagaggcccaatcactagaagacctggccggcttcaaagagctcttccagacaccagaccacactgaggaatcaacaactgatgacaaaactaccaaaatagcctgcaaatctccaccaccagaatcaatggacactccaacaagcacaaggaggcggcccaaaacacctttggggaaaagggatatagtggaagagctctcagccctgaagcagctcacacagaccacacacacagacaaagtaccaggagatgaggataaaggcatcaacgtgttcagggaaactgcaaaacagaaactggacccagcagcaagtgtaactggtagcaagaggcagccaagaactcctaagggaaaagcccaacccctagaagacttggctggcttgaaagagctcttccagacaccaatatgcactgacaagcccacgactcatgagaaaactaccaaaatagcctgcagatctccacaaccagacccagtgggtaccccaacaatcttcaagccacagtccaagagaagtctcaggaaagcagacgtagaggaagaatccttagcactcaggaaacgaacaccatcagtagggaaagctatggacacacccaaaccagcaggaggtgatgagaaagacatgaaagcatttatgggaactccagtgcagaaattggacctgccaggaaatttacctggcagcaaaagatggccacaaactcctaaggaaaaggcccaggctctagaagacctggctggcttcaaagagctcttccagacaccaggcactgacaagcccacgactgatgagaaaactaccaaaatagcctgcaaatctccacaaccagacccagtggacaccccagcaagcacaaagcaacggcccaagagaaacctcaggaaagcagacgtagaggaagaatttttagcactcaggaaacgaacaccatcagcaggcaaagccatggacacaccaaaaccagcagtaagtgatgagaaaaatatcaacacatttgtggaaactccagtgcagaaactggacctgctaggaaatttacctggcagcaagagacagccacagactcctaaggaaaaggctgaggctctagaggacctggttggcttcaaagaactcttccagacaccaggtcacactgaggaatcaatgactgatgacaaaatcacagaagtatcctgtaaatctccacagccagagtcattcaaaacctcaagaagctccaagcaaaggctcaagatacccctggtgaaagtggacatgaaagaagagcccctagcagtcagcaagctcacacggacatcaggggagactacgcaaacacacacagagccaacaggagatagtaagagcatcaaagcgtttaaggagtctccaaagcagatcctggacccagcagcaagtgtaactggtagcaggaggcagctgagaactcgtaaggaaaaggcccgtgctctagaagacctggttgacttcaaagagctcttctcagcaccaggtcacactgaagagtcaatgactattgacaaaaacacaaaaattccctgcaaatctcccccaccagaactaacagacactgccacgagcacaaagagatgccccaagacacgtcccaggaaagaagtaaaagaggagctctcagcagttgagaggctcacgcaaacatcagggcaaagcacacacacacacaaagaaccagcaagcggtgatgagggcatcaaagtattgaagcaacgtgcaaagaagaaaccaaacccagtagaagaggaacccagcaggagaaggccaagagcacctaaggaaaaggcccaacccctggaagacctggccggcttcacagagctctctgaaacatcaggtcacactcaggaatcactgactgctggcaaagccactaaaataccctgcgaatctcccccactagaagtggtagacaccacagcaagcacaaagaggcatctcaggacacgtgtgcagaaggtacaagtaaaagaagagccttcagcagtcaagttcacacaaacatcaggggaaaccacggatgcagacaaagaaccagcaggtgaagataaaggcatcaaagcattgaaggaatctgcaaaacagacaccggctccagcagcaagtgtaactggcagcaggagacggccaagagcacccagggaaagtgcccaagccatagaagacctagctggcttcaaagacccagcagcaggtcacactgaagaatcaatgactgatgacaaaaccactaaaataccctgcaaatcatcaccagaactagaagacaccgcaacaagctcaaagagacggcccaggacacgtgcccagaaagtagaagtgaaggaggagctgttagcagttggcaagctcacacaaacctcaggggagaccacgcacaccgacaaagagccggtaggtgagggcaaaggcacgaaagcatttaagcaacctgcaaagcggaagctggacgcagaagatgtaattggcagcaggagacagccaagagcacctaaggaaaaggcccaacccctggaagatctggccagcttccaagagctctctcaaacaccaggccacactgaggaactggcaaatggtgctgctgatagctttacaagcgctccaaagcaaacacctgacagtggaaaacctctaaaaatatccagaagagttcttcgggcccctaaagtagaacccgtgggagacgtggtaagcaccagagaccctgtaaaatcacaaagcaaaagcaacacttccctgcccccactgcccttcaagaggggaggtggcaaagatggaagcgtcacgggaaccaagaggctgcgctgcatgccagcaccagaggaaattgtggaggagctgccagccagcaagaagcagagggttgctcccagggcaagaggcaaatcatccgaacccgtggtcatcatgaagagaagtttgaggacttctgcaaaaagaattgaacctgcggaagagctgaacagcaacgacatgaaaaccaacaaagaggaacacaaattacaagactcggtccctgaaaataagaaagaatagaaataaacagaaatgaaaagaagcccatgaagacctccccagagatggacattcagaatccagatgatggagcccggaaacccatacctagagacaaagtcactgagaacaaaaggtgcttgaggtctgctagacagaatgagagctcccagcctaaggtggcagaggagagcggagggcagaagagtgcgaaggttctcatgcagaatcagaaagggaaaggagaagcaggaaattcagactccatgtgcctgagatcaagaaagacaaaaagccagcctgcagcaagcactttggagagcaaatctgtgcagagagtaacgcggagtgtcaagaggtgtgcagaaaatccaaagaaggctgaggacaatgtgtgtgtcaagaaaataagaaccagaagtcatagggacagtgaagatatttgacagaaaaatcgaactgggaaaaatataataaagttagttttgtgataagttctagtgcagtttttgtcataaattacaagtgaattctgtaagtaaggctgtcagtctgcttaagggaagaaaactttggatttgctgggtctgaatcggcttcataaactccactgggagcactgctgggctcctggactgagaatagttgaacaccgggggctttgtgaaggagtctgggccaaggtttgccctcagctttgcagaatgaagccttgaggtctgtcaccacccacagccaccctacagcagccttaactgtgacacttgccacactgtgtcgtcgtttgtttgcctatgtcctccagggcacggtggcaggaacaactatcctcgtctgtcccaacactgagcaggcactcggtaaacacgaatgaatggatgagcgcacggatgaatggagcttacaagatctgtctttccaatggccgggggcatttggtccccaaattaaggctattggacatctgcacaggacagtcctatttttgatgtcctttcctttctgaaaataaagttttgtgctttggagaatgactcgtgagcacatctttagggaccaagagtgactttctgtaaggagtgactcgtggcttgccttggtctcttgggaatacttttctaactagggttgctctcacctgagacattctccacccgcggaatctcagggtcccaggctgtgggccatcacgacctcaaactggctcctaatctccagctttcctgtcattgaaagcttcggaagtttactggctctgctcccgcctgttttctttctgactctatctggcagcccgatgccacccagtacaggaagtgacaccagtactctgtaaagcatcatcatccttggagagactgagcactcagcaccttcagccacgatttcaggatcgcttccttgtgagccgctgcctccgaaatctcctttgaagcccagacatctttctccagcttcagacttgtagatataactcgttcatcttcatttactttccactttgccccctgtcctctctgtgttccccaaatcagagaatagcccgccatcccccaggtcacctgtctggattcctccccattcacccaccttgccaggtgcaggtgaggatggtgcaccagacagggtagctgtcccccaaaatgtgccctgtgcgggcagtgccccgtctccacgtttgtttccccagtgtctggcggggagccaggtgacatcataaatacttgctgaatgaatgcagaaatcagcggtactgacttgtactatattggctgccatgatagggttctcacagcgtcatccatgatcgtaagggagaatgacattctgcttgagggagggaatagaaaggggcagggaggggacatctgagggcttcacagggctgcaaagggtacagggattgcaccagggcagaacaggggagggtgttcaaggaagagtggctcttagcagaggcactttggaaggtgtgaggcataaatgcttccttctacgtaggccaacctcaaaactttcagtaggaatgttgctatgatcaagttgttctaacactttagacttagtagtaattatgaacctcacatagaaaaatttcatccagccatatgcctgtggagtggaatattctgtttagtagaaaaatcctttagagttcagctctaaccagaaatcttgctgaagtatgtcagcaccttttctcaccctggtaagtacagtatttcaagagcacgctaagggtggttttcattttacagggctgttgatgatgggttaaaaatgttcatttaagggctacccccgtgtttaatagatgaacaccacttctacacaaccctccttggtactgggggagggagagatctgacaaatactgcccattcccctaggctgactggatttgagaacaaatacccacccatttccaccatggtatggtaacttctctgagcttcagtttccaagtgaatttccatgtaataggacattcccattaaatacaagctgtttttactttttcgcctcccagggcctgtgggatctggtcccccagcctctcttgggctttcttacactaactctgtacctaccatctcctgcctcccttaggcaggcacctccaaccaccacacactccctgctgttttccctgcctggaactttccctcctgccccaccaagatcatttcatccagtcctgagctcagcttaagggaggcttcttgcctgtgggttccctcacccccatgcctgtcctccaggctggggcaggttcttagtttgcctggaattgttctgtacctctttgtagcacgtagtgttgtggaaactaagccactaattgagtttctggctcccctcctggggttgtaagttttgttcattcatgagggccgactgcatttcctggttactctatcccagtgaccagccacaggagatgtccaataaagtatgtgatgaaatggtctta

SEQ ID NO: 69057 - DNA, 10129 bp, Homo sapiens
gggcgggaggactcgactcggtgggagccgctagagccgggcgcccggggacgtagcctgtagggccaccgggtccccgtcagaggcggcggcgggagcagcggggactgcaggccggggtgcagcgaacgcgaccccgcgggctgcggcccggtgtgtgcggagcgtggcgggcgcagcttaccgggcggaggtgagcgcggcgccggctcctcctgcggcggactttgggtgcgacttgacgagcggtggttcgacaagtggccttgcgggccggatcgtcccagtggaagagttgtaaatttgcttctggccttcccctacggattatacctggccttcccctacggattatactcaacttactgtttagaaaatgtggcccacgagacgcctggttactatcaaaaggagcggggtcgacggtccccactttcccctgagcctcagcacctgcttgtttggaaggggtattgaatgtgacatccgtatccagcttcctgttgtgtcaaaacaacattgcaaaattgaaatccatgagcaggaggcaatattacataatttcagttccacaaatccaacacaagtaaatgggtctgttattgatgagcctgtacggctaaaacatggagatgtaataactattattgatcgttccttcaggtatgaaaatgaaagtcttcagaatggaaggaagtcaactgaatttccaagaaaaatacgtgaacaggagccagcacgtcgtgtctcaagatctagcttctcttctgaccctgatgagaaagctcaagattccaaggcctattcaaaaatcactgaaggaaaagtttcaggaaatcctcaggtacatatcaagaatgtcaaagaagacagtaccgcagatgactcaaaagacagtgttgctcagggaacaactaatgttcattcctcagaacatgctggacgtaatggcagaaatgcagctgatcccatttctggggattttaaagaaatttccagcgttaaattagtgagccgttatggagaattgaagtctgttcccactacacaatgtcttgacaatagcaaaaaaaatgaatctcccttttggaagctttatgagtcagtgaagaaagagttggatgtaaaatcacaaaaagaaaatgtcctacagtattgtagaaaatctggattacaaactgattacgcaacagagaaagaaagtgctgatggtttacagggggagacccaactgttggtctcgcgtaagtcaagaccaaaatctggtgggagcggccacgctgtggcagagcctgcttcacctgaacaagagcttgaccagaacaaggggaagggaagagacgtggagtctgttcagactcccagcaaggctgtgggcgccagctttcctctctatgagccggctaaaatgaagacccctgtacaatattcacagcaacaaaattctccacaaaaacataagaacaaagacctgtatactactggtagaagagaatctgtgaatctgggtaaaagtgaaggcttcaaggctggtgataaaactcttactcccaggaagctttcaactagaaatcgaacaccagctaaagttgaagatgcagctgactctgccactaagccagaaaatctctcttccaaaaccagaggaagtattcctacagatgtggaagttctgcctacggaaactgaaattcacaatgagccatttttaactctgtggctcactcaagttgagaggaagatccaaaaggattccctcagcaagcctgagaaattgggcactacagctggacagatgtgctctgggttacctggtcttagttcagttgatatcaacaactttggtgattccattaatgagagtgagggaatacctttgaaaagaaggcgtgtgtcctttggtgggcacctaagacctgaactatttgatgaaaacttgcctcctaatacgcctctcaaaaggggagaagccccaaccaaaagaaagtctctggtaatgcacactccacctgtcctgaagaaaatcatcaaggaacagcctcaaccatcaggaaaacaagagtcaggttcagaaatccatgtggaagtgaaggcacaaagcttggttataagccctccagctcctagtcctaggaaaactccagttgccagtgatcaacgccgtaggtcctgcaaaacagcccctgcttccagcagcaaatctcagacagaggttcctaagagaggaggagaaagagtggcaacctgccttcaaaagagagtgtctatcagccgaagtcaacatgatattttacagatgatatgttccaaaagaagaagtggtgcttcggaagcaaatctgattgttgcaaaatcatgggcagatgtagtaaaacttggtgcaaaacaaacacaaactaaagtcataaaacatggtcctcaaaggtcaatgaacaaaaggcaaagaagacctgctactccaaagaagcctgtgggcgaagttcacagtcaatttagtacaggccacgcaaactctccttgtaccataataatagggaaagctcatactgaaaaagtacatgtgcctgctcgaccctacagagtgctcaacaacttcatttccaaccaaaaaatggactttaaggaagatctttcaggaatagctgaaatgttcaagaccccagtgaaggagcaaccgcagttgacaagcacatgtcacatcgctatttcaaattcagagaatttgcttggaaaacagtttcaaggaactgattcaggagaagaacctctgctccccacctcagagagttttggaggaaatgtgttcttcagtgcacagaatgcagcaaaacagccatctgataaatgctctgcaagccctcccttaagacggcagtgtattagagaaaatggaaacgtagcaaaaacgcccaggaacacctacaaaatgacttctctggagacaaaaacttcagatactgagacagagccttcaaaaacagtatccactgtaaacaggtcaggaaggtctacagagttcaggaatatacagaagctacctgtggaaagtaagagtgaagaaacaaatacagaaattgttgagtgcatcctaaaaagaggtcagaaggcaacactactacaacaaaggagagaaggagagatgaaggaaatagaaagaccttttgagacatataaggaaaatattgaattaaaagaaaacgatgaaaagatgaaagcaatgaagagatcaagaacttgggggcagaaatgtgcaccaatgtctgacctgacagacctcaagagcttgcctgatacagaactcatgaaagacacggcacgtggccagaatctcctccaaacccaagatcatgccaaggcaccaaagagtgagaaaggcaaaatcactaaaatgccctgccagtcattacaaccagaaccaataaacaccccaacacacacaaaacaacagttgaaggcatccctggggaaagtaggtgtgaaagaagagctcctagcagtcggcaagttcacacggacgtcaggggagaccacgcacacgcacagagagccagcaggagatggcaagagcatcagaacgtttaaggagtctccaaagcagatcctggacccagcagcccgtgtaactggaatgaagaagtggccaagaacgcctaaggaagaggcccagtcactagaagacctggctggcttcaaagagctcttccagacaccaggtccctctgaggaatcaatgactgatgagaaaactaccaaaatagcctgcaaatctccaccaccagaatcagtggacactccaacaagcacaaagcaatggcctaagagaagtctcaggaaagcagatgtagaggaagaattcttagcactcaggaaactaacaccatcagcagggaaagccatgcttacgcccaaaccagcaggaggtgatgagaaagacattaaagcatttatgggaactccagtgcagaaactggacctggcaggaactttacctggcagcaaaagacagctacagactcctaaggaaaaggcccaggctctagaagacctggctggctttaaagagctcttccagactcctggtcacaccgaggaattagtggctgctggtaaaaccactaaaataccctgcgactctccacagtcagacccagtggacaccccaacaagcacaaagcaacgacccaagagaagtatcaggaaagcagatgtagagggagaactcttagcgtgcaggaatctaatgccatcagcaggcaaagccatgcacacgcctaaaccatcagtaggtgaagagaaagacatcatcatatttgtgggaactccagtgcagaaactggacctgacagagaacttaaccggcagcaagagacggccacaaactcctaaggaagaggcccaggctctggaagacctgactggctttaaagagctcttccagacccctggtcatactgaagaagcagtggctgctggcaaaactactaaaatgccctgcgaatcttctccaccagaatcagcagacaccccaacaagcacaagaaggcagcccaagacacctttggagaaaagggacgtacagaaggagctctcagccctgaagaagctcacacagacatcaggggaaaccacacacacagataaagtaccaggaggtgaggataaaagcatcaacgcgtttagggaaactgcaaaacagaaactggacccagcagcaagtgtaactggtagcaagaggcacccaaaaactaaggaaaaggcccaacccctagaagacctggctggcttgaaagagctcttccagacaccagtatgcactgacaagcccacgactcacgagaaaactaccaaaatagcctgcagatcacaaccagacccagtggacacaccaacaagctccaagccacagtccaagagaagtctcaggaaagtggacgtagaagaagaattcttcgcactcaggaaacgaacaccatcagcaggcaaagccatgcacacacccaaaccagcagtaagtggtgagaaaaacatctacgcatttatgggaactccagtgcagaaactggacctgacagagaacttaactggcagcaagagacggctacaaactcctaaggaaaaggcccaggctctagaagacctggctggctttaaagagctcttccagacacgaggtcacactgaggaatcaatgactaacgataaaactgccaaagtagcctgcaaatcttcacaaccagacccagacaaaaacccagcaagctccaagcgacggctcaagacatccctggggaaagtgggcgtgaaagaagagctcctagcagttggcaagctcacacagacatcaggagagaactacgcaaacacacacagagccaacaggagatagtaagagcatcaaagcgtttaaggagtctccaaagcagatcctggacccagcagcaagtgtaactggtagcaggaggcagctgagaactcgtaaggaaaaggcccgtgctctagaagacctggttgacttcaaagagctcttctcagcaccaggtcacactgaagagtcaatgactattgacaaaaacacaaaaattccctgcaaatctcccccaccagaactaacagacactgccacgagcacaaagagatgccccaagacacgtcccaggaaagaagtaaaagaggagctctcagcagttgagaggctcacgcaaacatcagggcaaagcacacacacacacaaagaaccagcaagcggtgatgagggcatcaaagtattgaagcaacgtgcaaagaagaaaccaaacccagtagaagaggaacccagcaggagaaggccaagagcacctaaggaaaaggcccaacccctggaagacctggccggcttcacagagctctctgaaacatcaggtcacactcaggaatcactgactgctggcaaagccactaaaataccctgcgaatctcccccactagaagtggtagacaccacagcaagcacaaagaggcatctcaggacacgtgtgcagaaggtacaagtaaaagaagagccttcagcagtcaagttcacacaaacatcaggggaaaccacggatgcagacaaagaaccagcaggtgaagataaaggcatcaaagcattgaaggaatctgcaaaacagacaccggctccagcagcaagtgtaactggcagcaggagacggccaagagcacccagggaaagtgcccaagccatagaagacctagctggcttcaaagacccagcagcaggtcacactgaagaatcaatgactgatgacaaaaccactaaaataccctgcaaatcatcaccagaactagaagacaccgcaacaagctcaaagagacggcccaggacacgtgcccagaaagtagaagtgaaggaggagctgttagcagttggcaagctcacacaaacctcaggggagaccacgcacaccgacaaagagccggtaggtgagggcaaaggcacgaaagcatttaagcaacctgcaaagcggaagctggacgcagaagatgtaattggcagcaggagacagccaagagcacctaaggaaaaggcccaacccctggaagatctggccagcttccaagagctctctcaaacaccaggccacactgaggaactggcaaatggtgctgctgatagctttacaagcgctccaaagcaaacacctgacagtggaaaacctctaaaaatatccagaagagttcttcgggcccctaaagtagaacccgtgggagacgtggtaagcaccagagaccctgtaaaatcacaaagcaaaagcaacacttccctgcccccactgcccttcaagaggggaggtggcaaagatggaagcgtcacgggaaccaagaggctgcgctgcatgccagcaccagaggaaattgtggaggagctgccagccagcaagaagcagagggttgctcccagggcaagaggcaaatcatccgaacccgtggtcatcatgaagagaagtttgaggacttctgcaaaaagaattgaacctgcggaagagctgaacagcaacgacatgaaaaccaacaaagaggaacacaaattacaagactcggtccctgaaaataagggaatatccctgcgctccagacgccaaaataagactgaggcagaacagcaaataactgaggtctttgtattagcagaaagaatagaaataaacagaaatgaaaagaagcccatgaagacctccccagagatggacattcagaatccagatgatggagcccggaaacccatacctagagacaaagtcactgagaacaaaaggtgcttgaggtctgctagacagaatgagagctcccagcctaaggtggcagaggagagcggagggcagaagagtgcgaaggttctcatgcagaatcagaaagggaaaggagaagcaggaaattcagactccatgtgcctgagatcaagaaagacaaaaagccagcctgcagcaagcactttggagagcaaatctgtgcagagagtaacgcggagtgtcaagaggtgtgcagaaaatccaaagaaggctgaggacaatgtgtgtgtcaagaaaataagaaccagaagtcatagggacagtgaagatatttgacagaaaaatcgaactgggaaaaatataataaagttagttttgtgataagttctagtgcagtttttgtcataaattacaagtgaattctgtaagtaaggctgtcagtctgcttaagggaagaaaactttggatttgctgggtctgaatcggcttcataaactccactgggagcactgctgggctcctggactgagaatagttgaacaccgggggctttgtgaaggagtctgggccaaggtttgccctcagctttgcagaatgaagccttgaggtctgtcaccacccacagccaccctacagcagccttaactgtgacacttgccacactgtgtcgtcgtttgtttgcctatgtcctccagggcacggtggcaggaacaactatcctcgtctgtcccaacactgagcaggcactcggtaaacacgaatgaatggatgagcgcacggatgaatggagcttacaagatctgtctttccaatggccgggggcatttggtccccaaattaaggctattggacatctgcacaggacagtcctatttttgatgtcctttcctttctgaaaataaagttttgtgctttggagaatgactcgtgagcacatctttagggaccaagagtgactttctgtaaggagtgactcgtggcttgccttggtctcttgggaatacttttctaactagggttgctctcacctgagacattctccacccgcggaatctcagggtcccaggctgtgggccatcacgacctcaaactggctcctaatctccagctttcctgtcattgaaagcttcggaagtttactggctctgctcccgcctgttttctttctgactctatctggcagcccgatgccacccagtacaggaagtgacaccagtactctgtaaagcatcatcatccttggagagactgagcactcagcaccttcagccacgatttcaggatcgcttccttgtgagccgctgcctccgaaatctcctttgaagcccagacatctttctccagcttcagacttgtagatataactcgttcatcttcatttactttccactttgccccctgtcctctctgtgttccccaaatcagagaatagcccgccatcccccaggtcacctgtctggattcctccccattcacccaccttgccaggtgcaggtgaggatggtgcaccagacagggtagctgtcccccaaaatgtgccctgtgcgggcagtgccccgtctccacgtttgtttccccagtgtctggcggggagccaggtgacatcataaatacttgctgaatgaatgcagaaatcagcggtactgacttgtactatattggctgccatgatagggttctcacagcgtcatccatgatcgtaagggagaatgacattctgcttgagggagggaatagaaaggggcagggaggggacatctgagggcttcacagggctgcaaagggtacagggattgcaccagggcagaacaggggagggtgttcaaggaagagtggctcttagcagaggcactttggaaggtgtgaggcataaatgcttccttctacgtaggccaacctcaaaactttcagtaggaatgttgctatgatcaagttgttctaacactttagacttagtagtaattatgaacctcacatagaaaaatttcatccagccatatgcctgtggagtggaatattctgtttagtagaaaaatcctttagagttcagctctaaccagaaatcttgctgaagtatgtcagcaccttttctcaccctggtaagtacagtatttcaagagcacgctaagggtggttttcattttacagggctgttgatgatgggttaaaaatgttcatttaagggctacccccgtgtttaatagatgaacaccacttctacacaaccctccttggtactgggggagggagagatctgacaaatactgcccattcccctaggctgactggatttgagaacaaatacccacccatttccaccatggtatggtaacttctctgagcttcagtttccaagtgaatttccatgtaataggacattcccattaaatacaagctgtttttactttttcgcctcccagggcctgtgggatctggtcccccagcctctcttgggctttcttacactaactctgtacctaccatctcctgcctcccttaggcaggcacctccaaccaccacacactccctgctgttttccctgcctggaactttccctcctgccccaccaagatcatttcatccagtcctgagctcagcttaagggaggcttcttgcctgtgggttccctcacccccatgcctgtcctccaggctggggcaggttcttagtttgcctggaattgttctgtacctctttgtagcacgtagtgttgtggaaactaagccactaattgagtttctggctcccctcctggggttgtaagttttgttcattcatgagggccgactgcatttcctggttactctatcccagtgaccagccacaggagatgtccaataaagtatgtgatgaaatggtctta

SEQ ID NO: 69058 - DNA, 7123 bp, Homo sapiens
  misc_feature (74)..(74): n is a, c, g, or t
cctctgagatgaagcttccagaggaaggatcaggcagcaatatttgctgttctgcaatatttgctgttccgcanatatttgctgttccgcagcctctgctggtgataccctggaaaacagggtctggagtggaactccagcaaactccaatggacctgcagctgagggacctgactgttagaaggaaagctaacaaagagaaagacatcaacacgtttttgggaactccagtgcagaaactggaccagccaggaaatttacctggcagcaatagacggctacaaactcgtaaggaaaaggcccaggctctagaagaactgactggcttcagagagcttttccagacaccatgcactgataaccccacgactgatgagaaaactaccaaaaaaatactctgcaaatctccgcaatcagacccagcggacaccccaacaaacacaaagcaacggcccaagagaagcctcaagaaagcagacgtagaggaagaatttttagcattcaggaaactaacaccatcagcaggcaaagccatgcacacgcctaaagcagcagtaggtgaagagaaagacatcaacacatttgtggggactccagtggagaaactggacctgctaggaaatttacctggcagcaagagacggccacaaactcctaaagaaaaggccaaggctctagaagatctggctggcttcaaagagctcttccagacaccaggtcacactgaggaatcaatgaccgatgacaaaatcacagaagtatcctgcaaatctccacaaccagacccagtcaaaaccccaacaagctccaagcaacgactcaagatatccttggggaaagtaggtgtgaaagaagaggtcctaccagtcggcaagctcacacagacgtcagggaagaccacacagacacacagagagacagcaggagatggaaagagcatcaaagcgtttaaggaatctgcaaagcagatgctggacccagcaaactatggaactgggatggagaggtggccaagaacacctaaggaagaggcccaatcactagaagacctggccggcttcaaagagctcttccagacaccagaccacactgaggaatcaacaactgatgacaaaactaccaaaatagcctgcaaatctccaccaccagaatcaatggacactccaacaagcacaaggaggcggcccaaaacacctttggggaaaagggatatagtggaagagctctcagccctgaagcagctcacacagaccacacacacagacaaagtaccaggagatgaggataaaggcatcaacgtgttcagggaaactgcaaaacagaaactggacccagcagcaagtgtaactggtagcaagaggcagccaagaactcctaagggaaaagcccaacccctagaagacttggctggcttgaaagagctcttccagacaccaatatgcactgacaagcccacgactcatgagaaaactaccaaaatagcctgcagatctccacaaccagacccagtgggtaccccaacaatcttcaagccacagtccaagagaagtctcaggaaagcagacgtagaggaagaatccttagcactcaggaaacgaacaccatcagtagggaaagctatggacacacccaaaccagcaggaggtgatgagaaagacatgaaagcatttatgggaactccagtgcagaaattggacctgccaggaaatttacctggcagcaaaagatggccacaaactcctaaggaaaaggcccaggctctagaagacctggctggcttcaaagagctcttccagacaccaggcactgacaagcccacgactgatgagaaaactaccaaaatagcctgcaaatctccacaaccagacccagtggacaccccagcaagcacaaagcaacggcccaagagaaacctcaggaaagcagacgtagaggaagaatttttagcactcaggaaacgaacaccatcagcaggcaaagccatggacacaccaaaaccagcagtaagtgatgagaaaaatatcaacacatttgtggaaactccagtgcagaaactggacctgctaggaaatttacctggcagcaagagacagccacagactcctaaggaaaaggctgaggctctagaggacctggttggcttcaaagaactcttccagacaccaggtcacactgaggaatcaatgactgatgacaaaatcacagaagtatcctgtaaatctccacagccagagtcattcaaaacctcaagaagctccaagcaaaggctcaagatacccctggtgaaagtggacatgaaagaagagcccctagcagtcagcaagctcacacggacatcaggggagactacgcaaacacacacagagccaacaggagatagtaagagcatcaaagcgtttaaggagtctccaaagcagatcctggacccagcagcaagtgtaactggtagcaggaggcagctgagaactcgtaaggaaaaggcccgtgctctagaagacctggttgacttcaaagagctcttctcagcaccaggtcacactgaagagtcaatgactattgacaaaaacacaaaaattccctgcaaatctcccccaccagaactaacagacactgccacgagcacaaagagatgccccaagacacgtcccaggaaagaagtaaaagaggagctctcagcagttgagaggctcacgcaaacatcagggcaaagcacacacacacacaaagaaccagcaagcggtgatgagggcatcaaagtattgaagcaacgtgcaaagaagaaaccaaacccagtagaagaggaacccagcaggagaaggccaagagcacctaaggaaaaggcccaacccctggaagacctggccggcttcacagagctctctgaaacatcaggtcacactcaggaatcactgactgctggcaaagccactaaaataccctgcgaatctcccccactagaagtggtagacaccacagcaagcacaaagaggcatctcaggacacgtgtgcagaaggtacaagtaaaagaagagccttcagcagtcaagttcacacaaacatcaggggaaaccacggatgcagacaaagaaccagcaggtgaagataaaggcatcaaagcattgaaggaatctgcaaaacagacaccggctccagcagcaagtgtaactggcagcaggagacggccaagagcacccagggaaagtgcccaagccatagaagacctagctggcttcaaagacccagcagcaggtcacactgaagaatcaatgactgatgacaaaaccactaaaataccctgcaaatcatcaccagaactagaagacaccgcaacaagctcaaagagacggcccaggacacgtgcccagaaagtagaagtgaaggaggagctgttagcagttggcaagctcacacaaacctcaggggagaccacgcacaccgacaaagagccggtaggtgagggcaaaggcacgaaagcatttaagcaacctgcaaagcggaagctggacgcagaagatgtaattggcagcaggagacagccaagagcacctaaggaaaaggcccaacccctggaagatctggccagcttccaagagctctctcaaacaccaggccacactgaggaactggcaaatggtgctgctgatagctttacaagcgctccaaagcaaacacctgacagtggaaaacctctaaaaatatccagaagagttcttcgggcccctaaagtagaacccgtgggagacgtggtaagcaccagagaccctgtaaaatcacaaagcaaaagcaacacttccctgcccccactgcccttcaagaggggaggtggcaaagatggaagcgtcacgggaaccaagaggctgcgctgcatgccagcaccagaggaaattgtggaggagctgccagccagcaagaagcagagggttgctcccagggcaagaggcaaatcatccgaacccgtggtcatcatgaagagaagtttgaggacttctgcaaaaagaattgaacctgcggaagagctgaacagcaacgacatgaaaaccaacaaagaggaacacaaattacaagactcggtccctgaaaataagggaatatccctgcgctccagacgccaaaataagactgaggcagaacagcaaataactgaggtctttgtattagcagaaagaatagaaataaacagaaatgaaaagaagcccatgaagacctccccagagatggacattcagaatccagatgatggagcccggaaacccatacctagagacaaagtcactgagaacaaaaggtgcttgaggtctgctagacagaatgagagctcccagcctaaggtggcagaggagagcggagggcagaagagtgcgaaggttctcatgcagaatcagaaagggaaaggagaagcaggaaattcagactccatgtgcctgagatcaagaaagacaaaaagccagcctgcagcaagcactttggagagcaaatctgtgcagagagtaacgcggagtgtcaagaggtgtgcagaaaatccaaagaaggctgaggacaatgtgtgtgtcaagaaaataagaaccagaagtcatagggacagtgaagatatttgacagaaaaatcgaactgggaaaaatataataaagttagttttgtgataagttctagtgcagtttttgtcataaattacaagtgaattctgtaagtaaggctgtcagtctgcttaagggaagaaaactttggatttgctgggtctgaatcggcttcataaactccactgggagcactgctgggctcctggactgagaatagttgaacaccgggggctttgtgaaggagtctgggccaaggtttgccctcagctttgcagaatgaagccttgaggtctgtcaccacccacagccaccctacagcagccttaactgtgacacttgccacactgtgtcgtcgtttgtttgcctatgtcctccagggcacggtggcaggaacaactatcctcgtctgtcccaacactgagcaggcactcggtaaacacgaatgaatggatgagcgcacggatgaatggagcttacaagatctgtctttccaatggccgggggcatttggtccccaaattaaggctattggacatctgcacaggacagtcctatttttgatgtcctttcctttctgaaaataaagttttgtgctttggagaatgactcgtgagcacatctttagggaccaagagtgactttctgtaaggagtgactcgtggcttgccttggtctcttgggaatacttttctaactagggttgctctcacctgagacattctccacccgcggaatctcagggtcccaggctgtgggccatcacgacctcaaactggctcctaatctccagctttcctgtcattgaaagcttcggaagtttactggctctgctcccgcctgttttctttctgactctatctggcagcccgatgccacccagtacaggaagtgacaccagtactctgtaaagcatcatcatccttggagagactgagcactcagcaccttcagccacgatttcaggatcgcttccttgtgagccgctgcctccgaaatctcctttgaagcccagacatctttctccagcttcagacttgtagatataactcgttcatcttcatttactttccactttgccccctgtcctctctgtgttccccaaatcagagaatagcccgccatcccccaggtcacctgtctggattcctccccattcacccaccttgccaggtgcaggtgaggatggtgcaccagacagggtagctgtcccccaaaatgtgccctgtgcgggcagtgccccgtctccacgtttgtttccccagtgtctggcggggagccaggtgacatcataaatacttgctgaatgaatgcagaaatcagcggtactgacttgtactatattggctgccatgatagggttctcacagcgtcatccatgatcgtaagggagaatgacattctgcttgagggagggaatagaaaggggcagggaggggacatctgagggcttcacagggctgcaaagggtacagggattgcaccagggcagaacaggggagggtgttcaaggaagagtggctcttagcagaggcactttggaaggtgtgaggcataaatgcttccttctacgtaggccaacctcaaaactttcagtaggaatgttgctatgatcaagttgttctaacactttagacttagtagtaattatgaacctcacatagaaaaatttcatccagccatatgcctgtggagtggaatattctgtttagtagaaaaatcctttagagttcagctctaaccagaaatcttgctgaagtatgtcagcaccttttctcaccctggtaagtacagtatttcaagagcacgctaagggtggttttcattttacagggctgttgatgatgggttaaaaatgttcatttaagggctacccccgtgtttaatagatgaacaccacttctacacaaccctccttggtactgggggagggagagatctgacaaatactgcccattcccctaggctgactggatttgagaacaaatacccacccatttccaccatggtatggtaacttctctgagcttcagtttccaagtgaatttccatgtaataggacattcccattaaatacaagctgtttttactttttcgcctcccagggcctgtgggatctggtcccccagcctctcttgggctttcttacactaactctgtacctaccatctcctgcctcccttaggcaggcacctccaaccaccacacactccctgctgttttccctgcctggaactttccctcctgccccaccaagatcatttcatccagtcctgagctcagcttaagggaggcttcttgcctgtgggttccctcacccccatgcctgtcctccaggctggggcaggttcttagtttgcctggaattgttctgtacctctttgtagcacgtagtgttgtggaaactaagccactaattgagtttctggctcccctcctggggttgtaagttttgttcattcatgagggccgactgcatttcctggttactctatcccagtgaccagccacaggagatgtccaataaagtatgtgatgaaatggtctta

SEQ ID NO: 69059 - DNA, 11435 bp, Homo sapiens
gggcgggaggactcgactcggtgggagccgctagagccgggcgcccggggacgtagcctgtagggccaccgggtccccgtcagaggcggcggcgggagcagcggggactgcaggccggggtgcagcgaacgcgaccccgcgggctgcggcccggtgtgtgcggagcgtggcgggcgcagcttaccgggcggaggtgagcgcggcgccggctcctcctgcggcggactttgggtgcgacttgacgagcggtggttcgacaagtggccttgcgggccggatcgtcccagtggaagagttgtaaatttgcttctggccttcccctacggattatacctggccttcccctacggattatactcaacttactgtttagaaaatgtggcccacgagacgcctggttactatcaaaaggagcggggtcgacggtccccactttcccctgagcctcagcacctgcttgtttggaaggggtattgaatgtgacatccgtatccagcttcctgttgtgtcaaaacaacattgcaaaattgaaatccatgagcaggaggcaatattacataatttcagttccacaaatccaacacaagtaaatgggtctgttattgatgagcctgtacggctaaaacatggagatgtaataactattattgatcgttccttcaggtatgaaaatgaaagtcttcagaatggaaggaagtcaactgaatttccaagaaaaatacgtgaacaggagccagcacgtcgtgtctcaagatctagcttctcttctgaccctgatgagaaagctcaagattccaaggcctattcaaaaatcactgaaggaaaagtttcaggaaatcctcaggtacatatcaagaatgtcaaagaagacagtaccgcagatgactcaaaagacagtgttgctcagggaacaactaatgttcattcctcagaacatgctggacgtaatggcagaaatgcagctgatcccatttctggggattttaaagaaatttccagcgttaaattagtgagccgttatggagaattgaagtctgttcccactacacaatgtcttgacaatagcaaaaaaaatgaatctcccttttggaagctttatgagtcagtgaagaaagagttggatgtaaaatcacaaaaagaaaatgtcctacagtattgtagaaaatctggattacaaactgattacgcaacagagaaagaaagtgctgatggtttacagggggagacccaactgttggtctcgcgtaagtcaagaccaaaatctggtgggagcggccacgctgtggcagagcctgcttcacctgaacaagagcttgaccagaacaaggggaagggaagagacgtggagtctgttcagactcccagcaaggctgtgggcgccagctttcctctctatgagccggctaaaatgaagacccctgtacaatattcacagcaacaaaattctccacaaaaacataagaacaaagacctgtatactactggtagaagagaatctgtgaatctgggtaaaagtgaaggcttcaaggctggtgataaaactcttactcccaggaagctttcaactagaaatcgaacaccagctaaagttgaagatgcagctgactctgccactaagccagaaaatctctcttccaaaaccagaggaagtattcctacagatgtggaagttctgcctacggaaactgaaattcacaatgagccatttttaactctgtggctcactcaagttgagaggaagatccaaaaggattccctcagcaagcctgagaaattgggcactacagctggacagatgtgctctgggttacctggtcttagttcagttgatatcaacaactttggtgattccattaatgagagtgagggaatacctttgaaaagaaggcgtgtgtcctttggtgggcacctaagacctgaactatttgatgaaaacttgcctcctaatacgcctctcaaaaggggagaagccccaaccaaaagaaagtctctggtaatgcacactccacctgtcctgaagaaaatcatcaaggaacagcctcaaccatcaggaaaacaagagtcaggttcagaaatccatgtggaagtgaaggcacaaagcttggttataagccctccagctcctagtcctaggaaaactccagttgccagtgatcaacgccgtaggtcctgcaaaacagcccctgcttccagcagcaaatctcagacagaggttcctaagagaggaggagaaagagtggcaacctgccttcaaaagagagtgtctatcagccgaagtcaacatgatattttacagatgatatgttccaaaagaagaagtggtgcttcggaagcaaatctgattgttgcaaaatcatgggcagatgtagtaaaacttggtgcaaaacaaacacaaactaaagtcataaaacatggtcctcaaaggtcaatgaacaaaaggcaaagaagacctgctactccaaagaagcctgtgggcgaagttcacagtcaatttagtacaggccacgcaaactctccttgtaccataataatagggaaagctcatactgaaaaagtacatgtgcctgctcgaccctacagagtgctcaacaacttcatttccaaccaaaaaatggactttaaggaagatctttcaggaatagctgaaatgttcaagaccccagtgaaggagcaaccgcagttgacaagcacatgtcacatcgctatttcaaattcagagaatttgcttggaaaacagtttcaaggaactgattcaggagaagaacctctgctccccacctcagagagttttggaggaaatgtgttcttcagtgcacagaatgcagcaaaacagccatctgataaatgctctgcaagccctcccttaagacggcagtgtattagagaaaatggaaacgtagcaaaaacgcccaggaacacctacaaaatgacttctctggagacaaaaacttcagatactgagacagagccttcaaaaacagtatccactgtaaacaggtcaggaaggtctacagagttcaggaatatacagaagctacctgtggaaagtaagagtgaagaaacaaatacagaaattgttgagtgcatcctaaaaagaggtcagaaggcaacactactacaacaaaggagagaaggagagatgaaggaaatagaaagaccttttgagacatataaggaaaatattgaattaaaagaaaacgatgaaaagatgaaagcaatgaagagatcaagaacttgggggcagaaatgtgcaccaatgtctgacctgacagacctcaagagcttgcctgatacagaactcatgaaagacacggcacgtggccagaatctcctccaaacccaagatcatgccaaggcaccaaagagtgagaaaggcaaaatcactaaaatgccctgccagtcattacaaccagaaccaataaacaccccaacacacacaaaacaacagttgaaggcatccctggggaaagtaggtgtgaaagaagagctcctagcagtcggcaagttcacacggacgtcaggggagaccacgcacacgcacagagagccagcaggagatggcaagagcatcagaacgtttaaggagtctccaaagcagatcctggacccagcagcccgtgtaactggaatgaagaagtggccaagaacgcctaaggaagaggcccagtcactagaagacctggctggcttcaaagagctcttccagacaccaggtccctctgaggaatcaatgactgatgagaaaactaccaaaatagcctgcaaatctccaccaccagaatcagtggacactccaacaagcacaaagcaatggcctaagagaagtctcaggaaagcagatgtagaggaagaattcttagcactcaggaaactaacaccatcagcagggaaagccatgcttacgcccaaaccagcaggaggtgatgagaaagacattaaagcatttatgggaactccagtgcagaaactggacctggcaggaactttacctggcagcaaaagacagctacagactcctaaggaaaaggcccaggctctagaagacctggctggctttaaagagctcttccagactcctggtcacaccgaggaattagtggctgctggtaaaaccactaaaataccctgcgactctccacagtcagacccagtggacaccccaacaagcacaaagcaacgacccaagagaagtatcaggaaagcagatgtagagggagaactcttagcgtgcaggaatctaatgccatcagcaggcaaagccatgcacacgcctaaaccatcagtaggtgaagagaaagacatcatcatatttgtgggaactccagtgcagaaactggacctgacagagaacttaaccggcagcaagagacggccacaaactcctaaggaagaggcccaggctctggaagacctgactggctttaaagagctcttccagacccctggtcatactgaagaagcagtggctgctggcaaaactactaaaatgccctgcgaatcttctccaccagaatcagcagacaccccaacaagcacaagaaggcagcccaagacacctttggagaaaagggacgtacagaaggagctctcagccctgaagaagctcacacagacatcaggggaaaccacacacacagataaagtaccaggaggtgaggataaaagcatcaacgcgtttagggaaactgcaaaacagaaactggacccagcagcaagtgtaactggtagcaagaggcacccaaaaactaaggaaaaggcccaacccctagaagacctggctggcttgaaagagctcttccagacaccagtatgcactgacaagcccacgactcacgagaaaactaccaaaatagcctgcagatcacaaccagacccagtggacacaccaacaagctccaagccacagtccaagagaagtctcaggaaagtggacgtagaagaagaattcttcgcactcaggaaacgaacaccatcagcaggcaaagccatgcacacacccaaaccagcagtaagtggtgagaaaaacatctacgcatttatgggaactccagtgcagaaactggacctgacagagaacttaactggcagcaagagacggctacaaactcctaaggaaaaggcccaggctctagaagacctggctggctttaaagagctcttccagacacgaggtcacactgaggaatcaatgactaacgataaaactgccaaagtagcctgcaaatcttcacaaccagacccagacaaaaacccagcaagctccaagcgacggctcaagacatccctggggaaagtgggcgtgaaagaagagctcctagcagttggcaagctcacacagacatcaggagagactacacacacacacacagagccaacaggagatggtaagagcatgaaagcatttatggagtctccaaagcagatcttagactcagcagcaagtctaactggcagcaagaggcagctgagaactcctaagggaaagtctgaagtccctgaagacctggccggcttcatcgagctcttccagacaccaagtcacactaaggaatcaatgactaacgaaaaaactaccaaagtatcctacagagcttcacagccagacctagtggacaccccaacaagctccaagccacagcccaagagaagtctcaggaaagcagacactgaagaagaatttttagcatttaggaaacaaacgccatcagcaggcaaagccatgcacacacccaaaccagcagtaggtgaagagaaagacatcaacacgtttttgggaactccagtgcagaaactggaccagccaggaaatttacctggcagcaatagacggctacaaactcgtaaggaaaaggcccaggctctagaagaactgactggcttcagagagcttttccagacaccatgcactgataaccccacgactgatgagaaaactaccaaaaaaatactctgcaaatctccgcaatcagacccagcggacaccccaacaaacacaaagcaacggcccaagagaagcctcaagaaagcagacgtagaggaagaatttttagcattcaggaaactaacaccatcagcaggcaaagccatgcacacgcctaaagcagcagtaggtgaagagaaagacatcaacacatttgtggggactccagtggagaaactggacctgctaggaaatttacctggcagcaagagacggccacaaactcctaaagaaaaggccaaggctctagaagatctggctggcttcaaagagctcttccagacaccaggtcacactgaggaatcaatgaccgatgacaaaatcacagaagtatcctgcaaatctccacaaccagacccagtcaaaaccccaacaagctccaagcaacgactcaagatatccttggggaaagtaggtgtgaaagaagaggtcctaccagtcggcaagctcacacagacgtcagggaagaccacacagacacacagagagacagcaggagatggaaagagcatcaaagcgtttaaggaatctgcaaagcagatgctggacccagcaaactatggaactgggatggagaggtggccaagaacacctaaggaagaggcccaatcactagaagacctggccggcttcaaagagctcttccagacaccagaccacactgaggaatcaacaactgatgacaaaactaccaaaatagcctgcaaatctccaccaccagaatcaatggacactccaacaagcacaaggaggcggcccaaaacacctttggggaaaagggatatagtggaagagctctcagccctgaagcagctcacacagaccacacacacagacaaagtaccaggagatgaggataaaggcatcaacgtgttcagggaaactgcaaaacagaaactggacccagcagcaagtgtaactggtagcaagaggcagccaagaactcctaagggaaaagcccaacccctagaagacttggctggcttgaaagagctcttccagacaccaatatgcactgacaagcccacgactcatgagaaaactaccaaaatagcctgcagatctccacaaccagacccagtgggtaccccaacaatcttcaagccacagtccaagagaagtctcaggaaagcagacgtagaggaagaatccttagcactcaggaaacgaacaccatcagtagggaaagctatggacacacccaaaccagcaggaggtgatgagaaagacatgaaagcatttatgggaactccagtgcagaaattggacctgccaggaaatttacctggcagcaaaagatggccacaaactcctaaggaaaaggcccaggctctagaagacctggctggcttcaaagagctcttccagacaccaggcactgacaagcccacgactgatgagaaaactaccaaaatagcctgcaaatctccacaaccagacccagtggacaccccagcaagcacaaagcaacggcccaagagaaacctcaggaaagcagacgtagaggaagaatttttagcactcaggaaacgaacaccatcagcaggcaaagccatggacacaccaaaaccagcagtaagtgatgagaaaaatatcaacacatttgtggaaactccagtgcagaaactggacctgctaggaaatttacctggcagcaagagacagccacagactcctaaggaaaaggctgaggctctagaggacctggttggcttcaaagaactcttccagacaccaggtcacactgaggaatcaatgactgatgacaaaatcacagaagtatcctgtaaatctccacagccagagtcattcaaaacctcaagaagctccaagcaaaggctcaagatacccctggtgaaagtggacatgaaagaagagcccctagcagtcagcaagctcacacggacatcaggggagactacgcaaacacacacagagccaacaggagatagtaagagcatcaaagcgtttaaggagtctccaaagcagatcctggacccagcagcaagtgtaactggtagcaggaggcagctgagaactcgtaaggaaaaggcccgtgctctagaagacctggttgacttcaaagagctcttctcagcaccaggtcacactgaagagtcaatgactattgacaaaaacacaaaaattccctgcaaatctcccccaccagaactaacagacactgccacgagcacaaagagatgccccaagacacgtcccaggaaagaagtaaaagaggagctctcagcagttgagaggctcacgcaaacatcagggcaaagcacacacacacacaaagaaccagcaagcggtgatgagggcatcaaagtattgaagcaacgtgcaaagaagaaaccaaacccagtagaagaggaacccagcaggagaaggccaagagcacctaaggaaaaggcccaacccctggaagacctggccggcttcacagagctctctgaaacatcaggtcacactcaggaatcactgactgctggcaaagccactaaaataccctgcgaatctcccccactagaagtggtagacaccacagcaagcacaaagaggcatctcaggacacgtgtgcagaaggtacaagtaaaagaagagccttcagcagtcaagttcacacaaacatcaggggaaaccacggatgcagacaaagaaccagcaggtgaagataaaggcatcaaagcattgaaggaatctgcaaaacagacaccggctccagcagcaagtgtaactggcagcaggagacggccaagagcacccagggaaagtgcccaagccatagaagacctagctggcttcaaagacccagcagcaggtcacactgaagaatcaatgactgatgacaaaaccactaaaataccctgcaaatcatcaccagaactagaagacaccgcaacaagctcaaagagacggcccaggacacgtgcccagaaagtagaagtgaaggaggagctgttagcagttggcaagctcacacaaacctcaggggagaccacgcacaccgacaaagagccggtaggtgagggcaaaggcacgaaagcatttaagcaacctgcaaagcggaagctggacgcagaagatgtaattggcagcaggagacagccaagagcacctaaggaaaaggcccaacccctggaagatctggccagcttccaagagctctctcaaacaccaggccacactgaggaactggcaaatggtgctgctgatagctttacaagcgctccaaagcaaacacctgacagtggaaaacctctaaaaatatccagaagagttcttcgggcccctaaagtagaacccgtgggagacgtggtaagcaccagagaccctgtaaaatcacaaagcaaaagcaacacttccctgcccccactgcccttcaagaggggaggtggcaaagatggaagcgtcacgggaaccaagaggctgcgctgcatgccagcaccagaggaaattgtggaggagctgccagccagcaagaagcagagggttgctcccagggcaagaggcaaatcatccgaacccgtggtcatcatgaagagaagtttgaggacttctgcaaaaagaattgaacctgcggaagagctgaacagcaacgacatgaaaaccaacaaagaggaacacaaattacaagactcggtccctgaaaataagggaatatccctgcgctccagacgccaaaataagactgaggcagaacagcaaataactgaggtctttgtattagcagaaagaatagaaataaacagaaatgaaaagaagcccatgaagacctccccagagatggacattcagaatccagatgatggagcccggaaacccatacctagagacaaagtcactgagaacaaaaggtgcttgaggtctgctagacagaatgagagctcccagcctaaggtggcagaggagagcggagggcagaagagtgcgaaggttctcatgcagaatcagaaagggaaaggagaagcaggaaattcagactccatgtgcctgagatcaagaaagacaaaaagccagcctgcagcaagcactttggagagcaaatctgtgcagagagtaacgcggagtgtcaagaggtgtgcagaaaatccaaagaaggctgaggacaatgtgtgtgtcaagaaaataagaaccagaagtcatagggacagtgaagatatttgacagaaaaatcgaactgggaaaaatataataaagttagttttgtgataagttctagtgcagtttttgtcataaattacaagtgaattctgtaagtaaggctgtcagtctgcttaagggaagaaaactttggatttgctgggtctgaatcggcttcataaactccactgggagcactgctgggctcctggactgagaatagttgaacaccgggggctttgtgaaggagtctgggccaaggtttgccctcagctttgcagaatgaagccttgaggtctgtcaccacccacagccaccctacagcagccttaactgtgacacttgccacactgtgtcgtcgtttgtttgcctatgtcctccagggcacggtggcaggaacaactatcctcgtctgtcccaacactgagcaggcactcggtaaacacgaatgaatggatgagcgcacggatgaatggagcttacaagatctgtctttccaatggccgggggcatttggtccccaaattaaggctattggacatctgcacaggacagtcctatttttgatgtcctttcctttctgaaaataaagttttgtgctttggagaatgactcgtgagcacatctttagggaccaagagtgactttctgtaaggagtgactcgtggcttgccttggtctcttgggaatacttttctaactagggttgctctcacctgagacattctccacccgcggaatctcagggtcccaggctgtgggccatcacgacctcaaactggctcctaatctccagctttcctgtcattgaaagcttcggaagtttactggctctgctcccgcctgttttctttctgactctatctggcagcccgatgccacccagtacaggaagtgacaccagtactctgtaaagcatcatcatccttggagagactgagcactcagcaccttcagccacgatttcaggatcgcttccttgtgagccgctgcctccgaaatctcctttgaagcccagacatcatttcatccagtcctgagctcagcttaagggaggcttcttgcctgtgggttccctcacccccatgcctgtcctccaggctggggcaggttcttagtttgcctggaattgttctgtacctctttgtagcacgtagtgttgtggaaactaagccactaattgagtttctggctcccctcctggggttgtaagttttgttcattcatgagggccgactgcatttcctggttactctatcccagtgaccagccacaggagatgtccaataaagtatgtgatgaaatggtctta

SEQ ID NO: 69060 - DNA, 5962 bp, Homo sapiens
ctgaggatccccgacgtttctctggtaggccgttgctgtgcttgctgggggtgtccacggggtctgggcggtggagattggcaggctatttgggtagttttctcatcagtcgtgggctggtcagtgcctggtgtctggaagagctctttgaagccagccaggtcttctagagcctgggccttttccttaggagttggtggccatctttggctgccaggtaaatttccgggcaggtccaatttctgcacgggagttcccataaaggctttcaggtctttctcatcacctccggcgggttggggtgtgtccatagctttccctacggatggtgttcgtttcctgacccagtgggtaccccaacaatcttcaagccacagtccaagagaagtctcaggaaagcagacgtagaggaagaatccttagcactcaggaaacgaacaccatcagtagggaaagctatggacacacccaaaccagcaggaggtgatgagaaagacatgaaagcatttatgggaactccagtgcagaaattggacctgccaggaaatttacctggcagcaaaagatggccacaaactcctaaggaaaaggcccaggctctagaagacctggctggcttcaaagagctcttccagacaccaggcactgacaagcccacgactgatgagaaaactaccaaaatagcctgcaaatctccacaaccagacccagtggacaccccagcaagcacaaagcaacggcccaagagaaacctcaggaaagcagacgtagaggaagaatttttagcactcaggaaacgaacaccatcagcaggcaaagccatggacacaccaaaaccagcagtaagtgatgagaaaaatatcaacacatttgtggaaactccagtgcagaaactggacctgctaggaaatttacctggcagcaagagacagccacagactcctaaggaaaaggctgaggctctagaggacctggttggcttcaaagaactcttccagacaccaggtcacactgaggaatcaatgactgatgacaaaatcacagaagtatcctgtaaatctccacagccagagtcattcaaaacctcaagaagctccaagcaaaggctcaagatacccctggtgaaagtggacatgaaagaagagcccctagcagtcagcaagctcacacggacatcaggggagactacgcaaacacacacagagccaacaggagatagtaagagcatcaaagcgtttaaggagtctccaaagcagatcctggacccagcagcaagtgtaactggtagcaggaggcagctgagaactcgtaaggaaaaggcccgtgctctagaagacctggttgacttcaaagagctcttctcagcaccaggtcacactgaagagtcaatgactattgacaaaaacacaaaaattccctgcaaatctcccccaccagaactaacagacactgccacgagcacaaagagatgccccaagacacgtcccaggaaagaagtaaaagaggagctctcagcagttgagaggctcacgcaaacatcagggcaaagcacacacacacacaaagaaccagcaagcggtgatgagggcatcaaagtattgaagcaacgtgcaaagaagaaaccaaacccagtagaagaggaacccagcaggagaaggccaagagcacctaaggaaaaggcccaacccctggaagacctggccggcttcacagagctctctgaaacatcaggtcacactcaggaatcactgactgctggcaaagccactaaaataccctgcgaatctcccccactagaagtggtagacaccacagcaagcacaaagaggcatctcaggacacgtgtgcagaaggtacaagtaaaagaagagccttcagcagtcaagttcacacaaacatcaggggaaaccacggatgcagacaaagaaccagcaggtgaagataaaggcatcaaagcattgaaggaatctgcaaaacagacaccggctccagcagcaagtgtaactggcagcaggagacggccaagagcacccagggaaagtgcccaagccatagaagacctagctggcttcaaagacccagcagcaggtcacactgaagaatcaatgactgatgacaaaaccactaaaataccctgcaaatcatcaccagaactagaagacaccgcaacaagctcaaagagacggcccaggacacgtgcccagaaagtagaagtgaaggaggagctgttagcagttggcaagctcacacaaacctcaggggagaccacgcacaccgacaaagagccggtaggtgagggcaaaggcacgaaagcatttaagcaacctgcaaagcggaagctggacgcagaagatgtaattggcagcaggagacagccaagagcacctaaggaaaaggcccaacccctggaagatctggccagcttccaagagctctctcaaacaccaggccacactgaggaactggcaaatggtgctgctgatagctttacaagcgctccaaagcaaacacctgacagtggaaaacctctaaaaatatccagaagagttcttcgggcccctaaagtagaacccgtgggagacgtggtaagcaccagagaccctgtaaaatcacaaagcaaaagcaacacttccctgcccccactgcccttcaagaggggaggtggcaaagatggaagcgtcacgggaaccaagaggctgcgctgcatgccagcaccagaggaaattgtggaggagctgccagccagcaagaagcagagggttgctcccagggcaagaggcaaatcatccgaacccgtggtcatcatgaagagaagtttgaggacttctgcaaaaagaattgaacctgcggaagagctgaacagcaacgacatgaaaaccaacaaagaggaacacaaattacaagactcggtccctgaaaataagggaatatccctgcgctccagacgccaaaataagactgaggcagaacagcaaataactgaggtctttgtattagcagaaagaatagaaataaacagaaatgaaaagaagcccatgaagacctccccagagatggacattcagaatccagatgatggagcccggaaacccatacctagagacaaagtcactgagaacaaaaggtgcttgaggtctgctagacagaatgagagctcccagcctaaggtggcagaggagagcggagggcagaagagtgcgaaggttctcatgcagaatcagaaagggaaaggagaagcaggaaattcagactccatgtgcctgagatcaagaaagacaaaaagccagcctgcagcaagcactttggagagcaaatctgtgcagagagtaacgcggagtgtcaagaggtgtgcagaaaatccaaagaaggctgaggacaatgtgtgtgtcaagaaaataagaaccagaagtcatagggacagtgaagatatttgacagaaaaatcgaactgggaaaaatataataaagttagttttgtgataagttctagtgcagtttttgtcataaattacaagtgaattctgtaagtaaggctgtcagtctgcttaagggaagaaaactttggatttgctgggtctgaatcggcttcataaactccactgggagcactgctgggctcctggactgagaatagttgaacaccgggggctttgtgaaggagtctgggccaaggtttgccctcagctttgcagaatgaagccttgaggtctgtcaccacccacagccaccctacagcagccttaactgtgacacttgccacactgtgtcgtcgtttgtttgcctatgtcctccagggcacggtggcaggaacaactatcctcgtctgtcccaacactgagcaggcactcggtaaacacgaatgaatggatgagcgcacggatgaatggagcttacaagatctgtctttccaatggccgggggcatttggtccccaaattaaggctattggacatctgcacaggacagtcctatttttgatgtcctttcctttctgaaaataaagttttgtgctttggagaatgactcgtgagcacatctttagggaccaagagtgactttctgtaaggagtgactcgtggcttgccttggtctcttgggaatacttttctaactagggttgctctcacctgagacattctccacccgcggaatctcagggtcccaggctgtgggccatcacgacctcaaactggctcctaatctccagctttcctgtcattgaaagcttcggaagtttactggctctgctcccgcctgttttctttctgactctatctggcagcccgatgccacccagtacaggaagtgacaccagtactctgtaaagcatcatcatccttggagagactgagcactcagcaccttcagccacgatttcaggatcgcttccttgtgagccgctgcctccgaaatctcctttgaagcccagacatctttctccagcttcagacttgtagatataactcgttcatcttcatttactttccactttgccccctgtcctctctgtgttccccaaatcagagaatagcccgccatcccccaggtcacctgtctggattcctccccattcacccaccttgccaggtgcaggtgaggatggtgcaccagacagggtagctgtcccccaaaatgtgccctgtgcgggcagtgccccgtctccacgtttgtttccccagtgtctggcggggagccaggtgacatcataaatacttgctgaatgaatgcagaaatcagcggtactgacttgtactatattggctgccatgatagggttctcacagcgtcatccatgatcgtaagggagaatgacattctgcttgagggagggaatagaaaggggcagggaggggacatctgagggcttcacagggctgcaaagggtacagggattgcaccagggcagaacaggggagggtgttcaaggaagagtggctcttagcagaggcactttggaaggtgtgaggcataaatgcttccttctacgtaggccaacctcaaaactttcagtaggaatgttgctatgatcaagttgttctaacactttagacttagtagtaattatgaacctcacatagaaaaatttcatccagccatatgcctgtggagtggaatattctgtttagtagaaaaatcctttagagttcagctctaaccagaaatcttgctgaagtatgtcagcaccttttctcaccctggtaagtacagtatttcaagagcacgctaagggtggttttcattttacagggctgttgatgatgggttaaaaatgttcatttaagggctacccccgtgtttaatagatgaacaccacttctacacaaccctccttggtactgggggagggagagatctgacaaatactgcccattcccctaggctgactggatttgagaacaaatacccacccatttccaccatggtatggtaacttctctgagcttcagtttccaagtgaatttccatgtaataggacattcccattaaatacaagctgtttttactttttcgcctcccagggcctgtgggatctggtcccccagcctctcttgggctttcttacactaactctgtacctaccatctcctgcctcccttaggcaggcacctccaaccaccacacactccctgctgttttccctgcctggaactttccctcctgccccaccaagatcatttcatccagtcctgagctcagcttaagggaggcttcttgcctgtgggttccctcacccccatgcctgtcctccaggctggggcaggttcttagtttgcctggaattgttctgtacctctttgtagcacgtagtgttgtggaaactaagccactaattgagtttctggctcccctcctggggttgtaagttttgttcattcatgagggccgactgcatttcctggttactctatcccagtgaccagccacaggagatgtccaataaagtatgtgatgaaatggtctta

SEQ ID NO: 69061 - DNA, 4253 bp, Homo sapiens
tccccctggggtgttattcaaggtcacactcaggaatcactgactgctggcaaagccactaaaataccctgcgaatctcccccactagaagtggtagacaccacagcaagcacaaagaggcatctcaggacacgtgtgcagaaggtacaagtaaaagaagagccttcagcagtcaagttcacacaaacatcaggggaaaccacggatgcagacaaagaaccagcaggtgaagataaaggcatcaaagcattgaaggaatctgcaaaacagacaccggctccagcagcaagtgtaactggcagcaggagacggccaagagcacccagggaaagtgcccaagccatagaagacctagctggcttcaaagacccagcagcaggtcacactgaagaatcaatgactgatgacaaaaccactaaaataccctgcaaatcatcaccagaactagaagacaccgcaacaagctcaaagagacggcccaggacacgtgcccagaaagtagaagtgaaggaggagctgttagcagttggcaagctcacacaaacctcaggggagaccacgcacaccgacaaagagccggtaggtgagggcaaaggcacgaaagcatttaagcaacctgcaaagcggaagctggacgcagaagatgtaattggcagcaggagacagccaagagcacctaaggaaaaggcccaacccctggaagatctggccagcttccaagagctctctcaaacaccaggccacactgaggaactggcaaatggtgctgctgatagctttacaagcgctccaaagcaaacacctgacagtggaaaacctctaaaaatatccagaagagttcttcgggcccctaaagtagaacccgtgggagacgtggtaagcaccagagaccctgtaaaatcacaaagcaaaagcaacacttccctgcccccactgcccttcaagaggggaggtggcaaagatggaagcgtcacgggaaccaagaggctgcgctgcatgccagcaccagaggaaattgtggaggagctgccagccagcaagaagcagagggttgctcccagggcaagaggcaaatcatccgaacccgtggtcatcatgaagagaagtttgaggacttctgcaaaaagaattgaacctgcggaagagctgaacagcaacgacatgaaaaccaacaaagaggaacacaaattacaagactcggtccctgaaaataagggaatatccctgcgctccagacgccaaaataagactgaggcagaacagcaaataactgaggtctttgtattagcagaaagaatagaaataaacagaaatgaaaagaagcccatgaagacctccccagagatggacattcagaatccagatgatggagcccggaaacccatacctagagacaaagtcactgagaacaaaaggtgcttgaggtctgctagacagaatgagagctcccagcctaaggtggcagaggagagcggagggcagaagagtgcgaaggttctcatgcagaatcagaaagggaaaggagaagcaggaaattcagactccatgtgcctgagatcaagaaagacaaaaagccagcctgcagcaagcactttggagagcaaatctgtgcagagagtaacgcggagtgtcaagaggtgtgcagaaaatccaaagaaggctgaggacaatgtgtgtgtcaagaaaataagaaccagaagtcatagggacagtgaagatatttgacagaaaaatcgaactgggaaaaatataataaagttagttttgtgataagttctagtgcagtttttgtcataaattacaagtgaattctgtaagtaaggctgtcagtctgcttaagggaagaaaactttggatttgctgggtctgaatcggcttcataaactccactgggagcactgctgggctcctggactgagaatagttgaacaccgggggctttgtgaaggagtctgggccaaggtttgccctcagctttgcagaatgaagccttgaggtctgtcaccacccacagccaccctacagcagccttaactgtgacacttgccacactgtgtcgtcgtttgtttgcctatgtcctccagggcacggtggcaggaacaactatcctcgtctgtcccaacactgagcaggcactcggtaaacacgaatgaatggatgagcgcacggatgaatggagcttacaagatctgtctttccaatggccgggggcatttggtccccaaattaaggctattggacatctgcacaggacagtcctatttttgatgtcctttcctttctgaaaataaagttttgtgctttggagaatgactcgtgagcacatctttagggaccaagagtgactttctgtaaggagtgactcgtggcttgccttggtctcttgggaatacttttctaactagggttgctctcacctgagacattctccacccgcggaatctcagggtcccaggctgtgggccatcacgacctcaaactggctcctaatctccagctttcctgtcattgaaagcttcggaagtttactggctctgctcccgcctgttttctttctgactctatctggcagcccgatgccacccagtacaggaagtgacaccagtactctgtaaagcatcatcatccttggagagactgagcactcagcaccttcagccacgatttcaggatcgcttccttgtgagccgctgcctccgaaatctcctttgaagcccagacatctttctccagcttcagacttgtagatataactcgttcatcttcatttactttccactttgccccctgtcctctctgtgttccccaaatcagagaatagcccgccatcccccaggtcacctgtctggattcctccccattcacccaccttgccaggtgcaggtgaggatggtgcaccagacagggtagctgtcccccaaaatgtgccctgtgcgggcagtgccccgtctccacgtttgtttccccagtgtctggcggggagccaggtgacatcataaatacttgctgaatgaatgcagaaatcagcggtactgacttgtactatattggctgccatgatagggttctcacagcgtcatccatgatcgtaagggagaatgacattctgcttgagggagggaatagaaaggggcagggaggggacatctgagggcttcacagggctgcaaagggtacagggattgcaccagggcagaacaggggagggtgttcaaggaagagtggctcttagcagaggcactttggaaggtgtgaggcataaatgcttccttctacgtaggccaacctcaaaactttcagtaggaatgttgctatgatcaagttgttctaacactttagacttagtagtaattatgaacctcacatagaaaaatttcatccagccatatgcctgtggagtggaatattctgtttagtagaaaaatcctttagagttcagctctaaccagaaatcttgctgaagtatgtcagcaccttttctcaccctggtaagtacagtatttcaagagcacgctaagggtggttttcattttacagggctgttgatgatgggttaaaaatgttcatttaagggctacccccgtgtttaatagatgaacaccacttctacacaaccctccttggtactgggggagggagagatctgacaaatactgcccattcccctaggctgactggatttgagaacaaatacccacccatttccaccatggtatggtaacttctctgagcttcagtttccaagtgaatttccatgtaataggacattcccattaaatacaagctgtttttactttttcgcctcccagggcctgtgggatctggtcccccagcctctcttgggctttcttacactaactctgtacctaccatctcctgcctcccttaggcaggcacctccaaccaccacacactccctgctgttttccctgcctggaactttccctcctgccccaccaagatcatttcatccagtcctgagctcagcttaagggaggcttcttgcctgtgggttccctcacccccatgcctgtcctccaggctggggcaggttcttagtttgcctggaattgttctgtacctctttgtagcacgtagtgttgtggaaactaagccactaattgagtttctggctcccctcctggggttgtaagttttgttcattcatgagggccgactgcatttcctggttactctatcccagtgaccagccacaggagatgtccaataaagtatgtgatgaaatggtctta

SEQ ID NO: 69062 - DNA, 9211 bp, Homo sapiens
gggcgggaggactcgactcggtgggagccgctagagccgggcgcccggggacgtagcctgtagggccaccgggtccccgtcagaggcggcggcgggagcagcggggactgcaggccggggtgcagcgaacgcgaccccgcgggctgcggcccggtgtgtgcggagcgtggcgggcgcagcttaccgggcggaggtgagcgcggcgccggctcctcctgcggcggactttgggtgcgacttgacgagcggtggttcgacaagtggccttgcgggccggatcgtcccagtggaagagttgtaaatttgcttctggccttcccctacggattatacctggccttcccctacggattatactcaacttactgtttagaaaatgtggcccacgagacgcctggttactatcaaaaggagcggggtcgacggtccccactttcccctgagcctcagcacctgcttgtttggaaggggtattgaatgtgacatccgtatccagcttcctgttgtgtcaaaacaacattgcaaaattgaaatccatgagcaggaggcaatattacataatttcagttccacaaatccaacacaagtaaatgggtctgttattgatgagcctgtacggctaaaacatggagatgtaataactattattgatcgttccttcaggtatgaaaatgaaagtcttcagaatggaaggaagtcaactgaatttccaagaaaaatacgtgaacaggagccagcacgtcgtgtctcaagatctagcttctcttctgaccctgatgagaaagctcaagattccaaggcctattcaaaaatcactgaaggaaaagtttcaggaaatcctcaggtacatatcaagaatgtcaaagaagacagtaccgcagatgactcaaaagacagtgttgctcagggaacaactaatgttcattcctcagaacatgctggacgtaatggcagaaatgcagctgatcccatttctggggattttaaagaaatttccagcgttaaattagtgagccgttatggagaattgaagtctgttcccactacacaatgtcttgacaatagcaaaaaaaatgaatctcccttttggaagctttatgagtcagtgaagaaagagttggatgtaaaatcacaaaaagaaaatgtcctacagtattgtagaaaatctggattacaaactgattacgcaacagagaaagaaagtgctgatggtttacagggggagacccaactgttggtctcgcgtaagtcaagaccaaaatctggtgggagcggccacgctgtggcagagcctgcttcacctgaacaagagcttgaccagaacaaggggaagggaagagacgtggagtctgttcagactcccagcaaggctgtgggcgccagctttcctctctatgagccggctaaaatgaagacccctgtacaatattcacagcaacaaaattctccacaaaaacataagaacaaagacctgtatactactggtagaagagaatctgtgaatctgggtaaaagtgaaggcttcaaggctggtgataaaactcttactcccaggaagctttcaactagaaatcgaacaccagctaaagttgaagatgcagctgactctgccactaagccagaaaatctctcttccaaaaccagaggaagtattcctacagatgtggaagttctgcctacggaaactgaaattcacaatgagccatttttaactctgtggctcactcaagttgagaggaagatccaaaaggattccctcagcaagcctgagaaattgggcactacagctggacagatgtgctctgggttacctggtcttagttcagttgatatcaacaactttggtgattccattaatgagagtgagggaatacctttgaaaagaaggcgtgtgtcctttggtgggcacctaagacctgaactatttgatgaaaacttgcctcctaatacgcctctcaaaaggggagaagccccaaccaaaagaaagtctctggtaatgcacactccacctgtcctgaagaaaatcatcaaggaacagcctcaaccatcaggaaaacaagagtcaggttcagaaatccatgtggaagtgaaggcacaaagcttggttataagccctccagctcctagtcctaggaaaactccagttgccagtgatcaacgccgtaggtcctgcaaaacagcccctgcttccagcagcaaatctcagacagaggttcctaagagaggaggagaaagagtggcaacctgccttcaaaagagagtgtctatcagccgaagtcaacatgatattttacagatgatatgttccaaaagaagaagtggtgcttcggaagcaaatctgattgttgcaaaatcatgggcagatgtagtaaaacttggtgcaaaacaaacacaaactaaagtcataaaacatggtcctcaaaggtcaatgaacaaaaggcaaagaagacctgctactccaaagaagcctgtgggcgaagttcacagtcaatttagtacaggccacgcaaactctccttgtaccataataatagggaaagctcatactgaaaaagtacatgtgcctgctcgaccctacagagtgctcaacaacttcatttccaaccaaaaaatggactttaaggaagatctttcaggaatagctgaaatgttcaagaccccagtgaaggagcaaccgcagttgacaagcacatgtcacatcgctatttcaaattcagagaatttgcttggaaaacagtttcaaggaactgattcaggagaagaacctctgctccccacctcagagagttttggaggaaatgtgttcttcagtgcacagaatgcagcaaaacagccatctgataaatgctctgcaagccctcccttaagacggcagtgtattagagaaaatggaaacgtagcaaaaacgcccaggaacacctacaaaatgacttctctggagacaaaaacttcagatactgagacagagccttcaaaaacagtatccactgtaaacaggtcaggaaggtctacagagttcaggaatatacagaagctacctgtggaaagtaagagtgaagaaacaaatacagaaattgttgagtgcatcctaaaaagaggtcagaaggcaacactactacaacaaaggagagaaggagagatgaaggaaatagaaagaccttttgagacatataaggaaaatattgaattaaaagaaaacgatgaaaagatgaaagcaatgaagagatcaagaacttgggggcagaaatgtgcaccaatgtctgacctgacagacctcaagagcttgcctgatacagaactcatgaaagacacggcacgtggccagaatctcctccaaacccaagatcatgccaaggcaccaaagagtgagaaaggcaaaatcactaaaatgccctgccagtcattacaaccagaaccaataaacaccccaacacacacaaaacaacagttgaaggcatccctggggaaagtaggtgtgaaagaagagctcctagcagtcggcaagttcacacggacgtcaggggagaccacgcacacgcacagagagccagcaggagatggcaagagcatcagaacgtttaaggagtctccaaagcagatcctggacccagcagcccgtgtaactggaatgaagaagtggccaagaacgcctaaggaagaggcccagtcactagaagacctggctggcttcaaagagctcttccagacaccaggtccctctgaggaatcaatgactgatgagaaaactaccaaaatagcctgcaaatctccaccaccagaatcagtggacactccaacaagcacaaagcaatggcctaagagaagtctcaggaaagcagatgtagaggaagaattcttagcactcaggaaactaacaccatcagcagggaaagccatgcttacgcccaaaccagcaggaggtgatgagaaagacattaaagcatttatgggaactccagtgcagaaactggacctggcaggaactttacctggcagcaaaagacagctacagactcctaaggaaaaggcccaggctctagaagacctggctggctttaaagagctcttccagactcctggtcacaccgaggaattagtggctgctggtaaaaccactaaaataccctgcgactctccacagtcagacccagtggacaccccaacaagcacaaagcaacgacccaagagaagtatcaggaaagcagatgtagagggagaactcttagcgtgcaggaatctaatgccatcagcaggcaaagccatgcacacgcctaaaccatcagtaggtgaagagaaagacatcatcatatttgtgggaactccagtgcagaaactggacctgacagagaacttaaccggcagcaagagacggccacaaactcctaaggaagaggcccaggctctggaagacctgactggctttaaagagctcttccagacccctggtcatactgaagaagcagtggctgctggcaaaactactaaaatgccctgcgaatcttctccaccagaatcagcagacaccccaacaagcacaagaaggcagcccaagacacctttggagaaaagggacgtacagaaggagctctcagccctgaagaagctcacacagacatcaggggaaaccacacacacagataaagtaccaggaggtgaggataaaagcatcaacgcgtttagggaaactgcaaaacagaaactggacccagcagcaagtgtaactggtagcaagaggcacccaaaaactaaggaaaaggcccaacccctagaagacctggctggcttgaaagagctcttccagacaccagtatgcactgacaagcccacgactcacgagaaaactaccaaaatagcctgcagatcacaaccagacccagtggacacaccaacaagctccaagccacagtccaagagaagtctcaggaaagtggacgtagaagaagaattcttcgcactcaggaaacgaacaccatcagcaggcaaagccatgcacacacccaaaccagcagtaagtggtgagaaaaacatctacgcatttatgggaactccagtgcagaaactggacctgacagagaacttaactggcagcaagagacggctacaaactcctaaggaaaaggcccaggctctagaagacctggctggctttaaagagctcttccagacacgaggtcacactgaggaatcaatgactaacgataaaactgccaaagtagcctgcaaatcttcacaaccagacccagacaaaaacccagcaagctccaagcgacggctcaagacatccctggggaaagtgggcgtgaaagaagagctcctagcagttggcaagctcacacagacatcaggagagactacacacacacacacagagccaacaggagatggtaagagcatgaaagcatttatggagtctccaaagcagatcttagactcagcagcaagtctaactggcagcaagaggcagctgagaactcctaagggaaagtctgaagtccctgaagacctggccggcttcatcgagctcttccagacaccaagtcacactaaggaatcaatgactaacgaaaaaactaccaaagtatcctacagagcttcacagccagacctagtggacaccccaacaagctccaagccacagcccaagagaagtctcaggaaagcagacactgaagaagaatttttagcatttaggaaacaaacgccatcagcaggcaaagccatgcacacacccaaaccagcagtaggtgaagagaaagacatcaacacgtttttgggaactccagtgcagaaactggaccagccaggaaatttacctggcagcaatagacggctacaaactcgtaaggaaaaggcccaggctctagaagaactgactggcttcagagagcttttccagacaccatgcactgataaccccacgactgatgagaaaactaccaaaaaaatactctgcaaatctccgcaatcagacccagcggacaccccaacaaacacaaagcaacggcccaagagaagcctcaagaaagcagacgtagaggaagaatttttagcattcaggaaactaacaccatcagcaggcaaagccatgcacacgcctaaagcagcagtaggtgaagagaaagacatcaacacatttgtggggactccagtggagaaactggacctgctaggaaatttacctggcagcaagagacggccacaaactcctaaagaaaaggccaaggctctagaagatctggctggcttcaaagagctcttccagacaccaggtcacactgaggaatcaatgaccgatgacaaaatcacagaagtatcctgcaaatctccacaaccagacccagtcaaaaccccaacaagctccaagcaacgactcaagatatccttggggaaagtaggtgtgaaagaagaggtcctaccagtcggcaagctcacacagacgtcagggaagaccacacagacacacagagagacagcaggagatggaaagagcatcaaagcgtttaaggaatctgcaaagcagatgctggacccagcaaactatggaactgggatggagaggtggccaagaacacctaaggaagaggcccaatcactagaagacctggccggcttcaaagagctcttccagacaccagaccacactgaggaatcaacaactgatgacaaaactaccaaaatagcctgcaaatctccaccaccagaatcaatggacactccaacaagcacaaggaggcggcccaaaacacctttggggaaaagggatatagtggaagagctctcagccctgaagcagctcacacagaccacacacacagacaaagtaccaggagatgaggataaaggcatcaacgtgttcagggaaactgcaaaacagaaactggacccagcagcaagtgtaactggtagcaagaggcagccaagaactcctaagggaaaagcccaacccctagaagacttggctggcttgaaagagctcttccagacaccaatatgcactgacaagcccacgactcatgagaaaactaccaaaatagcctgcagatctccacaaccagacccagtgggtaccccaacaatcttcaagccacagtccaagagaagtctcaggaaagcagacgtagaggaagaatccttagcactcaggaaacgaacaccatcagtagggaaagctatggacacacccaaaccagcaggaggtgatgagaaagacatgaaagcatttatgggaactccagtgcagaaattggacctgccaggaaatttacctggcagcaaaagatggccacaaactcctaaggaaaaggcccaggctctagaagacctggctggcttcaaagagctcttccagacaccaggcactgacaagcccacgactgatgagaaaactaccaaaatagcctgcaaatctccacaaccagacccagtggacaccccagcaagcacaaagcaacggcccaagagaaacctcaggaaagcagacgtagaggaagaatttttagcactcaggaaacgaacaccatcagcaggcaaagccatggacacaccaaaaccagcagtaagtgatgagaaaaatatcaacacatttgtggaaactccagtgcagaaactggacctgctaggaaatttacctggcagcaagagacagccacagactcctaaggaaaaggctgaggctctagaggacctggttggcttcaaagaactcttccagacaccaggtcacactgaggaatcaatgactgatgacaaaatcacagaagtatcctgtaaatctccacagccagagtcattcaaaacctcaagaagctccaagcaaaggctcaagatacccctggtgaaagtggacatgaaagaagagcccctagcagtcagcaagctcacacggacatcaggggagactacgcaaacacacacagagccaacaggagatagtaagagcatcaaagcgtttaaggagtctccaaagcagatcctggacccagcagcaagtgtaactggtagcaggaggcagctgagaactcgtaaggaaaaggcccgtgctctagaagacctggttgacttcaaagagctcttctcagcaccaggtcacactgaagagtcaatgactattgacaaaaacacaaaaattccctgcaaatctcccccaccagaactaacagacactgccacgagcacaaagagatgccccaagacacgtcccaggaaagaagtaaaagaggagctctcagcagttgagaggctcacgcaaacatcagggcaaagcacacacacacacaaagaaccagcaagcggtgatgagggcatcaaagtattgaagcaacgtgcaaagaagaaaccaaacccagtagaagaggaacccagcaggagaaggccaagagcacctaaggaaaaggcccaacccctggaagacctggccggcttcacagagctctctgaaacatcaggtcacactcaggaatcactgactgctggcaaagccactaaaataccctgcgaatctcccccactagaagtggtagacaccacagcaagcacaaagaggcatctcaggacacgtgtgcagaaggtacaagtaaaagaagagccttcagcagtcaagttcacacaaacatcaggggaaaccacggatgcagacaaagaaccagcaggtgaagataaaggcatcaaagcattgaaggaatctgcaaaacagacaccggctccagcagcaagtgtaactggcagcaggagacggccaagagcacccagggaaagtgcccaagccatagaagacctagctggcttcaaagacccagcagcaggtcacactgaagaatcaatgactgatgacaaaaccactaaaataccctgcaaatcatcaccagaactagaagacaccgcaacaagctcaaagagacggcccaggacacgtgcccagaaagtagaagtgaaggaggagctgttagcagttggcaagctcacacaaacctcaggggagaccacgcacaccgacaaagagccggtaggtgagggcaaaggcacgaaagcatttaagcaacctgcaaagcggaagctggacgcagaagatgtaattggcagcaggagacagccaagagcacctaaggaaaaggcccaacccctggaagatctggccagcttccaagagctctctcaaacaccagtcgcatattccacatcacccaactaaaaatattaaacagggtaccgagct

SEQ ID NO: 69063 - DNA, 2763 bp, Homo sapiens
gggcgggaggactcgactcggtgggagccgctagagccgggcgcccggggacgtagcctgtagggccaccgggtccccgtcagaggcggcggcgggagcagcggggactgcaggccggggtgcagcgaacgcgaccccgcgggctgcggcccggtgtgtgcggagcgtggcgggcgcagcttaccgggcggaggtgagcgcggcgccggctcctcctgcggcggactttgggtgcgacttgacgagcggtggttcgacaagtggccttgcgggccggatcgtcccagtggaagagttgtaaatttgcttctggccttcccctacggattatacctggccttcccctacggattatactcaacttactgtttagaaaatgtggcccacgagacgcctggttactatcaaaaggagcggggtcgacggtccccactttcccctgagcctcagcacctgcttgtttggaaggggtattgaatgtgacatccgtatccagcttcctgttgtgtcaaaacaacattgcaaaattgaaatccatgagcaggaggcaatattacataatttcagttccacaaatccaacacaagtaaatgggtctgttattgatgagcctgtacggctaaaacatggagatgtaataactattattgatcgttccttcaggtatgaaaatgaaagtcttcagaatggaaggaagtcaactgaatttccaagaaaaatacgtgaacaggagccagcacgtcgtgtctcaagatctagcttctcttctgaccctgatgagaaagctcaagattccaaggcctattcaaaaatcactgaaggaaaagtttcaggaaatcctcaggtacatatcaagaatgtcaaagaagacagtaccgcagatgactcaaaagacagtgttgctcagggaacaactaatgttcattcctcagaacatgctggacgtaatggcagaaatgcagctgatcccatttctggggattttaaagaaatttccagcgttaaattagtgagccgttatggagaattgaagtctgttcccactacacaatgtcttgacaatagcaaaaaaaatgaatctcccttttggaagctttatgagtcagtgaagaaagagttggatgtaaaatcacaaaaagaaaatgtcctacagtattgtagaaaatctggattacaaactgattacgcaacagagaaagaaagtgctgatggtttacagggggagacccaactgttggtctcgcgtaagtcaagaccaaaatctggtgggagcggccacgctgtggcagagcctgcttcacctgaacaagagcttgaccagaacaaggggaagggaagagacgtggagtctgttcagactcccagcaaggctgtgggcgccagctttcctctctatgagccggctaaaatgaagacccctgtacaatattcacagcaacaaaattctccacaaaaacataagaacaaagacctgtatactactggtagaagagaatctgtgaatctgggtaaaagtgaaggcttcaaggctggtgataaaactcttactcccaggaagctttcaactagaaatcgaacaccagctaaagttgaagatgcagctgactctgccactaagccagaaaatctctcttccaaaaccagaggaagtattcctacagatgtggaagttctgcctacggaaactgaaattcacaatgagccatttttaactctgtggctcactcaagttgagaggaagatccaaaaggattccctcagcaagcctgagaaattgggcactacagctggacagatgtgctctgggttacctggtcttagttcagttgatatcaacaactttggtgattccattaatgagagtgagggaatacctttgaaaagaaggcgtgtgtcctttggtgggcacctaagacctgaactatttgatgaaaacttgcctcctaatacgcctctcaaaaggggagaagccccaaccaaaagaaagtctctggtaatgcacactccacctgtcctgaagaaaatcatcaaggaacagcctcaaccatcaggaaaacaagagtcaggttcagaaatccatgtggaagtgaaggcacaaagcttggttataagccctccagctcctagtcctaggaaaactccagttgccagtgatcaacgccgtaggtcctgcaaaacagcccctgcttccagcagcaaatctcagacagaggttcctaagagaggaggagaaagagtggcaacctgccttcaaaagagagtgtctatcagccgaagtcaacatgatattttacagatgatatgttccaaaagaagaagtggtgcttcggaagcaaatctgattgttgcaaaatcatgggcagatgtagtaaaacttggtgcaaaacaaacacaaactaaagtcataaaacatggtcctcaaaggtcaatgaacaaaaggcaaagaagacctgctactccaaagaagcctgtgggcgaagttcacagtcaatttagtacaggccacgcaaactctccttgtaccataataatagggaaagctcatactgaaaaagtacatgtgcctgctcgaccctacagagtgctcaacaacttcatttccaaccaaaaaatggactttaaggaagatctttcaggtaaaaacgtagtcttagatcttataaatcttttgactctactgttttttactgtgttaatgtttgttttgctaactttgtttatctgctgtgaaagagattataaaataaacgactcaatcaccct

SEQ ID NO: 69064 - DNA, 1610 bp, Homo sapiens
  misc_feature (1245)..(1245): n is a, c, g, or t
agcgcctctacttggctgccccgtctgggaaatgggaagcgcctctgcccggccgccccgtctgggaagtgaggagcacctctgcccggccgccaccccgtctgggaagtggggagcacctctacctggccgccccgtctgggaaatgggaagcgcctctgcccggccgccccgtctgggaagtgaggagcgcctctgcccagctgccaccccgtctgggatgtgaggagcgcctctgcctggctgccccatctgggaagtggggagcgcctctacctggctgccccatctgggaaatgggaagcacctctgcccggccaccccatctgggaagtgaggagcgcctctgcccagctgacaccccatctgggatgtgaggagcacctctgcccggccgccccgtctgggaagtgaggagcgcctctgcccggccgccccgtctgggaagtgaggagcgcctctgcccggccgcccatcgtctgggaagtgaggagtgtctctgcccggccaccccgtctgggaagtgaggagcgcctctgcccggctgccccgtctgggaggtgaggagcgtttctgcccggccgcccatcatctgggaagtggggagcccctctgcccggctgccccgtctgggaagtggggagcgcctctgcccagccaccccatctgggaagtgaggaacgcctctgcccggccaccccgtctgggaagtggggagcgcctctgcctggccgcccatcgtctgggaagtggggagcgcctctacctggctgccccatctgggaaatgggaagcgcctctgcccggccaccccatctgggaagtgaggagcgcctctgcccagctgacaccccatctgggatgtgaggagcacctctgcccggccgccccgtctgggaagtgaggagcgcctctgcccggccgccccgtctgggaagtgaggagcgtctctgcccagccacccatcgtctgggatgtgaggagcgcctctgcccggccaccctgtctgggaagtgaggagcacctctgcccggccgccctatctgggaggtgtacccaatagctccgaagagacagcgaccatcgagaacgggccatgatgacgatggcggttttgtcgaaaagaaaagggggaaatgtggggaaaagaaagagagatcagattgttactgtgtctgtgtagaaagaagtagatataggagactccattttgttctgtacttagaaaaattcttctgccttggnatgctgttaatctataaccttacccccaaccctgtgctctctgaaacatgtgctgtgtcaactcagggttaaatggattaagggcagtgcaagatgtgctttgttaaacagatgcttgaaggcagcatgctcgttaagagtcatcaccactccctaatctcaagtacccagggacacaaacactgtgtaggaaaaccagagacctttgttcacatgtttatctgctgaccttctctccactattatcctatgaccctgccacatccccctctccgagaaacacccaagaatgatcaataaacattaaaaaaaaaagtacaagaaaaaaaaaaagaaataataaatgcttatttttgttttaagcc

SEQ ID NO: 69065 - DNA, 425 bp, Homo sapiens
gaataattccacttcctgctgtgatagagaacaggactcccagaagccggatcttgcacaagccctttcctcagtttccccatctataaaataaggtagctggaactagaatcaccaaggctttttcagcccttgggttctttggttctctctctcttacacacatatgtgaaggtgcacaatgtgctgtgttcttacacacaaacacatttctacatcttgctgacaatctctttccatctatcggttggaagccctgattccgcctccaatctcctgcacttctgacatcactccctctgcaggcctcctttatgactaaatccagccattaagcttcaaatgagttacctgctggcattgtgtaagggcagccagcagatttagtcacctaatcgcctctcttatcagtgttctctcccagc

SEQ ID NO: 69066 - DNA, 308 bp, Homo sapiens
tggtaaatactagagaagagaacatggaatcttcagcttgataatacacttaacattccttcagtgtagaactcctacacacttctacaggagtttcctcagggcctattccctgagaagatagacaactttaatatcattgttctactaatacaggattcattagttttaaagaaacatcaattcccctagctctggattggcaactcataaaaagaaatatcccttaggagagctctgtatacatctgcttcattatgaagttgtatccacttcaattttttcctattaatatagatatgcatgag

SEQ ID NO: 69067 - DNA, 343 bp, Homo sapiens
tgaaaaatgcttacaatttcatgttgtctaaccacaaaaatgttaccaatatgagacaaagcattaatcacatagaactaagcatttgacaatgtatatacacttcaaaatgttgttttataaaataaatattttgtcaagttaaaaatatatttttagacactatagaaggataacaatgttccaaatactgtctgtttcttttataaaacttagcagtatcctatcgtacagtttttcagctgttttgccagtcataaccataggaacgttgatgttcaacagcatgttctgaacccagcacagggcatgggagaagccaatgactttagggcttttattt

SEQ ID NO: 69068 - DNA, 683 bp, Homo sapiens
tttatttttctctcctagagaaatatacctacctgtcactaaaatacatgtcaagttacataatctgttaagtgtgaatctttttgtgttcctttccaagtttggaagcagaagagagacaacggagtaggcagatggagaaacaaatattgactttattactaaataaatctggtattggaataggattcctaaagctgagtcccaaaatgagactgatttgctgttctaacagaaaccagaagattcagtgagaagcgtcagaagcatctccctaacatgagaaatgaaacttttgaaaacatcaccaaagttgttcctgtcttgtactacagggctctctctactgacttgagatctcaggagaaatcatgactcctttcgcctcacctggctgaaccacctggatgtctttccatcattctctgtctattattaccctatagaatgaccttctttcttatatgtgttcaggaagggcaaaaaaaaaaatctcctagatgtatttctctctttttaaaaactgtaagtactcagaacaataccaagaaaaatacaaaagcaaagctttttatagctaattagaaacttccttgcaattctgaagtgtatgtgatattgtgtattgttacaataatacacaatattattaaagtatatgtgatattatgtattgtttaccc

SEQ ID NO: 69069 - DNA, 313 bp, Homo sapiens
attttacttcaacagtggaaactatgacacaacagggatggtctaaccccaatttgagcactctgttctcattttcattaggaatcacttccctgtaatcataaaatggaaatatatttactgtagacatgttgtttggtgaaagcaacactaaaaatgagtagatgaatataacagctacaggataaaataagagttcccatttttaaaaagaaggactatgtttacaacacagctctccttaatgttatagtgttattatagcagtgaattttcaaataaaatatttaaattggaatgttagaagttttct

SEQ ID NO: 69070 - DNA, 223 bp, Homo sapiens
tttcttaatggtaagtgaaatgaacatgagttgattcttactttggcctgaggaaagctttgtcacagctactctaggagctactgtttcttgaacacaatttcccaagtgaaggtacggcttgggcagggagttttgagtacctgcataaggtcatgtagctagcgggtgagagagctgcaatgaacacaggtctcattggttcctggatatgtgttctttc

SEQ ID NO: 69071 - DNA, 542 bp, Homo sapiens
gatcacaggtgcccgtcaccactccaggctaatttttgtatttttagtagagacggggtttcatcatcttggccagccctggtcttgaactcctgacctcaggtgatccacccgccttggcctcccaaagtgctgggattacaggtgtgagccactgcacctggcccaattttttctatctttaatcccaacctattgccacagtttttgacttctttttcagtgtacttataaaaaacattaaaaggccaggtgcagtggcttatgtgtgattctagtgctttgggaggccaaggtgggaggactgcttgaggccaggagtttgagaccagcctgggcaacatgatgagaccctgtctctacagaaaattaaaaaataaaaattatccaggtgtggtgatacacacttgtggtcctggctatttgggaggctgaggtgggagggttgctggagcccagaagttcgaggttgcagttagctgtgatcgtgccactgcattccagcctgagtgacaaagcgagaccctgtttctaaaaaaaaa

SEQ ID NO: 69072 - DNA, 596 bp, Homo sapiens
gaggccggagacatcctgagagaatacaaactgtcagatgggaatgtcatccacattggggaccaactgtatcaagtgcccgaagttctttttgcccctgaccagctgggaatccacagcccgggactctcaataatggcctccagcaacataatgaactgtgacactgacatccagaagaaagtttttgcagagattgtactgtctgggggcaccactctcttttctgggccagaggaaaggctcatgaaagaactggaacagctagcttccaaagggaacaatcggagaaactggttgttttacggaggctttgactggaatggtgtcctttcctttaaggaatcaaacttaacttacggatccaacaaaagccccttgagaaaactggactcatacttgtctacgcagtctctgaacagagttcctgacctgtgagatctggaacaaaatctacaatatctccaagaatgtataaaacagaattgcagtctgaccacttcaagaccactactctaggctttttgggtttgttttctccctggaccatggtcactcatattggctcagaataaacttctttgaaatactttaca

SEQ ID NO: 69073 - DNA, 227 bp, Homo sapiens
catggtacaacattgatgaaccttgaaaaataggctaagtgaaagaaaccagacaacacaaaatatcacatagtactgggctcccatttatttgaaatgtccaaaataggcaaatttgtagacgaaaagtagatcagtggtttcctgcagctgaagtgtaggttgaaagtggagcatgactgaatgccctttctaaaacaagtaaacctataattcatatttcctta

SEQ ID NO: 69074 - DNA, 542 bp, Homo sapiens
gccaagaaatacaggaaagggtgttcaacctcgccagccatcagagaaatgcaaactccactcctagaacagctgacatgaaaaagaatgaccatagcaactgaacaaatggaagcctcattcgtgcctggtgggaatgtcaattggtttaaccctttgggaaactgtgaggcagtatcctccaacgcagaatataagcagatcctatgagccagcaacgccacctccacgcagacagccaatgggaatgtacaccaagaaatacatgcaagaatgttcacagctgcattactcataatagccccaaactggacctggccacatgcaaatttccatccagaaggaatgaatcaattttggtacatccacacaaaggaatactatacagcaatgcaaaaggtgaactaccgttttgcataccaacacagatgaatcttggacatcatgctgagttaaagcagccaaataccaaagaatgcttgcaaatatttacttattcagaaagtggcaaactaataaataatgctagaagtcaggagaga

SEQ ID NO: 69075 - DNA, 306 bp, Homo sapiens
gtgtaatgatttaaaggaattaataaattgaacagtaacaaaagcagtatttacttggataggctactttaggaaattttagagtcatgatactatgaggaagagaaaaattctttctagtggacattccaaaggaaaaatatcaaaattatcaggagagtatctgcctggatagtgtttcaggttttcttgttggcttttatcagcattctctgatgaaccccagggagccctggttgtgaaggcatcttatttagaaggaaagattgtggccaatttttcttctaacacaggcacttgtctgac

SEQ ID NO: 69076 - DNA, 854 bp, Homo sapiens
  misc_feature (232)..(232): n is a, c, g, or t
tattaacacatttttatgtataccaattttcaacattttaagtcactagaggaatagagcaagtgtccatctcagcataggcacccccttcgtttttgctctgcacctttgtctctgaagctttttctccttttcatttcacctctaccctcccctactctgtggaccaaagcccttgctctgtgcccttgcttgtatggggttgtctttttagtaaattttagaaacaccnaacttgagagtatctcaaagagcatctattccaactcgttgaatatacagatgaaaaaactgaggtctcagaagaagtgatccctcagtgaatgttcaacagggcaaaataaaagaaaggagaaagaattatgggtcagctgaaccacagcttaggataaatactacaggttttgaagtcagccctgtataaaatctcaatgctggcgctaatgtgtatcccttgaacctcagcttttacatcagacataaagacatgacaacatgttcttatagagttattgtaagaatgagaagtcacacaggtaaagcaatgggtgccaaatagattcttttgaaaagataggccaggcgcagtggctcacgactataatccccagcactctgggaggctgaggcaggtggatcacaaggtctggagttcaagactagcctggccaagatggtgaaaccccgtctctactaaaacaaaaattagccgggagcagtggcatgcacctgtgatcccagctactctggaggctgaggcaggagaatagcttgaacccgggtggcggaggttgcagtgagccgagatcgcaccattgcactccagcctgggcgacatagcgagactcagtctc

SEQ ID NO: 69077 - DNA, 246 bp, Homo sapiens
gagagtgtagaagaaaaagcagttgtttatctcttaaggaaacagacaatcttcaggcagggggcagccttttcgctgaaccttgaagtctgtgaagagtttcaaagtaaaggcccctctaggctaaggaaactgtgtgaacaaaaatgaagattatacattttggcaaggggctggggactagagagcacagaagacataggggagtcatagatatggctggacacactggtgagagccctgcat

SEQ ID NO: 69078 - DNA, 1375 bp, Homo sapiens
agcgggctccccggggcccccaatcctcaccatggagggagaggggaacccaggctaaggctcaggagctgggtccaggctccttcttcggggaatctgggcccaggaggtgacctgagggctttgggctgcaggctcggggccaggcttgtatgtcctgccgtccaccgtgggcttcatcaaccacgactgcaccaggtggccagtcccgcctactcgctcgtccggaggcccagtgaggcaccacctcaggacaccagcccgggccccatctacttcttggaccccaaagtcacacgctttggccgcagctgcacccctgcctactccatgcagggccgggccaagtctcggggtccggaggtgacgccaggccctggggcctacagcccagagaaggtgccccctgtgcgccatcggacaccgccggctttcaccctgggctgccgcctccccctgaagcccctggacacctcagcccctgcccctaatgcctacaccatgccccctctgtggggctcacagatcttcaccaagcccagcagccccagctacacggtggtggccgcaccccccccgcccgccccccgcaggatcctgctgagataccaggcccgggccagtacgacagcccggacgcaaacacctaccgccagcgcctgcctgccttcaccatgctggggcggccccgggccccgcgacccctggaggagacccccggccctggcgcccactgcccagagcaggtcaccgtgaacaaagccagggctccagcgttctctatgggcatccgccactcgaaacgggccagcaccatggccgccaccacgccctcccggcctgcggggcacaggctgcccggccgctgctgctaggccaggcctgtttcccacacagtgaacgggggctggcgggcctctcctggggcctggctttggctggaggggctagaaggcgagaggggctgggaaaggagtcttccctcccctttcctgaactgtccaggtccttctaggacacctgatccttccagtccctgggggctgtgacccatggccctgtgcagggtacagggtgagtctccttccagtgccccagtttcttccaggtcacgccaggccaggccaggccaggtggggaaagggacaccttccggccctccccagtagctggctggagatggagcttcttgtgtcccagaactcggcgtccagctccactagggcctggatccccatcacagcttgggttagccccggtcccagcccaaactcaggctggaggcagccccgaggcctgtgcctttcccactccaccttctacagttgcttagccaataaacctttcctgggctggagagctgtcagcatcaaaa

SEQ ID NO: 69079 - DNA, 283 bp, Homo sapiens
ggtttctatttaggctgattttgtgtgtgcagagtgttcgggggtggaattcatctgagagtgagtagatatttctggggctccagatgcacagtcctacatcgttccaggaaagtctgttggtgaaggccccgcctggtgctgggtgcaggggttggggctaggcagagctgacagctgggaggatttgggggctgaggtttaggtgcaggagaaggtgagggtgggaagcccacattgccaagagggaggaaaagggacttagggatgaaatattgagatg

SEQ ID NO: 69080 - DNA, 522 bp, Homo sapiens
gaattcctgaagcacatctctgagtctgtcctcctctggactaaggcagcctagcgtccagggctcagtactcagctgctcagcctctgaggtcatgagggcttctggcatgctgggtgctgcccatcaaccctcccagaatcccctcttcctttcctgacctcatcacttcaaccttctcagggcttcaagatcccacatccctgggcccctcctgtgagcctgctggaaacacactgaaactggaatcctccgacctgctgccgcctctccccggtccctgcaacctcctggctcctccacccttcatcttcatcctgcctgagctgccacagctccgattgtttttggagttgacctagaggactcagaattattagagaccccaggatcctctcctgaggaggaggggcgcccagtctcctcttctacctctgacctggccttgtttctttccccagggcttcgccttgtaagtgcctaggctgaatcttctaaataaatacgatccacacctccaaa

SEQ ID NO: 69081 - DNA, 363 bp, Homo sapiens
gctctaaaacccattttgtgaaatagcaatgtaatttgaatattttaggaactgacctcaatgcttagagcttcctttgtatgttcttaaacgatgccttaacatcgcatttacttatatgttaacatgaaagttataagttgtcttattgtaacgttgacttgtcccttcagagaatcagccttccattatgctcaagtattcatcaaccttcagggctgggatggtataaaataatggcatgagatatacctaatgctagatgacgagttagtgggtgcagcgcaccagcatggcacatgtatacatatgtaactaacctgcacaatgtgcacatgtaccctaaaacttaaagtataatta

SEQ ID NO: 69082 - DNA, 727 bp, Homo sapiens
ggccagttaaaaatacagagactgacccaccaaccaggaggcaccgtgtcttcgggtggcactaactttatgcctgtgacctccaccgtgcccagtggtgcagaaaccgtatgtgaggggatctgggagcatggagagtcactgcaacctgtcccgtgacagctgagatctgggttgggtctcctgaattcaggattctgagtccagtggagtgatggcaggttgccccatcctgccgcatgctttgaggggaccctatcgctgctgccctgcactctcaggacttattcgctggacagagtgggcagaaaagagttccttcatggatcctgtcaccaaatgcataccaaggctccctccatcttaggcactacgctacccatagtgaactacagccatggccctgtcctcatgagagagacagacattggccaggtggacaaataaaataggtaattaaaaatctgtggcactcctgtaatcccagcactttgagatgccgaggtgggtggttcacgaggtcaggagttcaagaccagcctgaccaacaaacccgtctctactaaaaatacaaaattagccggacgtagtagcacttgcctgtaatcccagctactcaggaggctgacgcagaattgcttgaacctgggaggcagagatagcagtgagctgagattgcaccactgcactctagcctgggcaacagagcgagactccatctcaaaaa

SEQ ID NO: 69083 - DNA, 853 bp, Homo sapiens
tggtacattttccaagtgttgaaacaactgtcgactcataattctataagacattcacagatgaaggaaaactaagagaatttgtcataatagaactgctctaaaagaatggccaaaggaagttctcttatcagaaaggaaatggtaaaaggagacctggaacatcaggaaggaagaaagaacaatgggaagagtaaaactctgagtgagtgtagtgggcttttcttcctctgttgacttttgaagaattatgtttgacagttgaggcaaaacgataacattctctgatgtgttaaaaaaaatagctgaaaaaagaaaagaaagaacagtacctgagaaggaaaataaaatctcactgatacaatctttggcacctcctattacctagtaaagcatcagtagaagaaattggtgatggagtatttttattcatctatttggtaaatattgagcacgcactgtatgtcaggtactgttctatccactggagttttagcagtgaacaatagagagggagaaccagacatcattttatcagtaacccagtcctgccataactcactccctcccactataatggcattaatccattcatgagggctgcccccatgacctaatcacctcttaaaggtcccacctctatttgcatgggggttaagtttccaacacatgaaatgtgggggacacagtcaaatcatagcaggtgacttatgggttcttcaataatttgtttttcagaactctaagaggttattaccattgtatcccattgagttttatcccattgtatcccaatgagtgtgtcattgattgattttgctgccttctagttaatgtcataacattgaaaatg

SEQ ID NO: 69084 - DNA, 390 bp, Homo sapiens
aagcttaatgtgaaccaaacaggttgttctcattcatccctccaactacatgtatgtttctttttaaatttgtctttgattttaatgccaccctaacattttcagaaattggttgaatgcacaacttaaatccgcagcttcaatttgattaagaatttgttaacaacaatttagtgggaaatggtagtgtatatcagcaatcaaatggcatctttttctccttctccattaaaaagtatatatttttcgaaatagaagacactaaaaaaatgactcaggcagtaatttgttcataggattttgctgacatttataaactatttgagctttactgctgccttgttgctggcaagaagcgtcagcagtggaagtgttcctggagttaaatgc

SEQ ID NO: 69085 - DNA, 477 bp, Homo sapiens
ctcttctcccaaggcaccggggaacactgtggaattacaaggataacaaacttggtgtctaactctaaagttaattgcatcacaggaacagatgtaagatttcaaatgttacaagatctacaaaagagtcagatgatggcaggattatatgttcttgaggtttaaaatagtgataacccagacttaggttgaaacaaacagcaacccctgtagcttctgtagaggaagtgaggcctgctttgatgggaattctcatttggacatgcaggaaacatgatgagtatttctcctgggcctctacctgtaatagtagcaaccctcagtggaaaaaaaggacacttttgtggaaggggtaacttttcttcctttttgcttctttcctcagggacattccactttcccaggcttttgtatgacctggtatggtttttgtgattatgacaggattttctgttcttatgcactgtgtgtaagttc

SEQ ID NO: 69086 - DNA, 389 bp, Homo sapiens
ggacccaaaatctaattatttagatgctaatcaactgcaggataattcctaaggcatttgaatctgaggacattttcaggaaagtctctgctccttaaatttaggtttttaacctcaaagatacagttactgaaatttaaccattagatgactccagtaacacccacattggcaaaaaacatttggataaacatttgaacatttttgattggttccgaaaatatattatatctaaataaaaaaatatagtcagtagatttttggaggaaaggatggaagaataaaaaaactctttatgtcatacaaagctgtaattcacatttcttttttaaaaagaacaaactaaatgtgtatgttaaatgttaaatcagaacacctgactacttaag

SEQ ID NO: 69087 - DNA, 453 bp, Homo sapiens
ttttgatttattagtagcgacagggtctcactatgttgtgtaagctggtcccaaactttttgccccatgtgattttcccaaagtgttgagattatagatatgagcctctgcactcagccagtattcataaatttaataagacttggtatgtgtcgtaacagaacacactaggagcaagtaagaatattgtgtgtattctcttgcttttgcctggtaagttttgtacatatctgttaagcctagttggtgatatgatatggttggcctaaggttagaggatgtccattttctctaaacctcatgctgcaatataatcctcctgtttgatgtgggacctggtgggtggtgtttgggtcatgggggagcaaattcctcataaatggtttggcaccatccttttgataatcaaaaaggttacgctctattgattcaaatgagagctggttggttaaa

SEQ ID NO: 69088 - DNA, 322 bp, Homo sapiens
ataatggataattaacccttgaacaatggaaagttaactctccatagaaatgccaaaaactgaaatgttttgttattgaatttattctcctttgggagttaacactaatggagaacatctccattagtacaaacctggcaccaaacaacctgttcatccttaagctatgaatgctgcactcaccttccagttcattctggcaggatttgtaacacaaggtgcgctccctcggggtgacgtgcaatggtagcaaaagcgcattgtgagggggaaaatctaataagttggggcgccgtaaattcacgtttgtcaaaatcgaaaa

SEQ ID NO: 69089 - DNA, 1012 bp, Homo sapiens
ggtcgcagctgaccctcgctcccgcccccgcctggagtccgacgtggaagttgctggctgactgggcttgcgaggaaaccgcctcggagctgcagccgaaggccaaggaatcactgaagatcggcgagggaggacagggggttcatcatgggtggctttttctcaagtatattttccagtctgtttggaactcgggaaatgagaattttaattttgggattagatggagcaggaaaaaccacaattttgtacagattacaagtgggagaagttgttactactatacctaccattggatttaatgtagagacggtgacgtacaaaaaccttaaattccaagtctgggatttaggaggacagacaagtatcaggccatactggagatgttactattcaaacacagatgcagtcatttatgtagtagacagttgtgaccgagaccgaattggcatttccaaatcagagttagttgccatgttggaggaagaagagctgagaaaagccattttagtggtgtttgcaaataaacaggacatggaacaggccatgacttcctcagagatggcaaattcacttgggttacctgccttgaaggaccgaaaatggcagatattcaaaacgtcagcaaccaaaggcaccggccttgatgaggcaatggaatggttagttgaaacattaaaaagcagacagtaattcagtccattcttctcccctgaaatgaagactacatcacctctctccctttggaaacagtcaagtgtacttcacactactagatgttaaaactatatgattattggcatatactgactgactgcaatatttgtagtaaatagggaaaataagtatttagttggagggataatttgatcgaatcacctgaatgttctatgtaatgtaaaatattcttttcttgctttcttgtgttaaggtatatattctatttgtatggaattcttattcaaatacagttctattaaagagtatactcctattggatgaaaaaaaccta

SEQ ID NO: 69090 - DNA, 797 bp, Homo sapiens
tgcaaaacaaagtattagtagaaaacacctaaaatgttaacagtgatcatatttgggaggtaggattatgagtgaagcttcttttctttatacttctctatataatttctatataatttcataatgtgtaatatattaattataaaatacacgtttaaaatgtatttttggacattttctaaactcgagagagcacattagttaaaagaaattaaatattttcaatttcatttaggaagaagagctgagaaaagccattttagtggtgtttgcaaataaacaggacatggaacaggccatgacttcctcagagatggcaaattcacttgggttacctgccttgaaggaccgaaaatggcagatattcaaaacgtcagcaaccaaaggcaccggccttgatgaggcaatggaatggcaagtatcatgcttccagaagccatctgtgcatttgtgtgtgcttgcagctatgcacgtccacgtgtaatttttctcccgtgttgaggatgaaactttgatttacttagcagcttatttcataagttcctcaagcgttttctctcactggtcttcaggtgcatctgtcttctcaaccacacctacctgattacagttacttagataagcaaattctttgccaatttttagccttttccctgcctcacctcaccctccaattccttatccttcaggaattagcttaagactctcttctgaagagcttttcctaatgtatctctattcctactgcctaatcactcacttaaagttagatgcccttgtcacagattagtgacata

SEQ ID NO: 69091 - DNA, 3628 bp, Homo sapiens
  misc_feature (3203)..(3203): n is a, c, g, or t
  misc_feature (3215)..(3215): n is a, c, g, or t
  misc_feature (3229)..(3229): n is a, c, g, or t
  misc_feature (3276)..(3276): n is a, c, g, or t
  misc_feature (3279)..(3279): n is a, c, g, or t
  misc_feature (3283)..(3283): n is a, c, g, or t
  misc_feature (3287)..(3287): n is a, c, g, or t
  misc_feature (3289)..(3290): n is a, c, g, or t
  misc_feature (3293)..(3293): n is a, c, g, or t
  misc_feature (3301)..(3302): n is a, c, g, or t
ggtcgcagctgaccctcgctcccgcccccgcctggagtccgacgtggaagttgctggctgactgggcttgcgaggaaaccgcctcggagctgcagccgaaggccaaggaatcactgaagatcggcgagggaggacagggggttcatcatgggtggctttttctcaagtatattttccagtctgtttggaactcgggaaatgagaattttaattttgggattagatggagcaggaaaaaccacaattttgtacagattacaagtgggagaagttgttactactatacctaccattggatttaatgtagagacggtgacgtacaaaaaccttaaattccaagtctgggatttaggaggacagacaagtatcaggccatactggagatgttactattcaaacacagatgcagtcatttatgtagtagacagttgtgaccgagaccgaattggcatttccaaatcagagttagttgccatgttggaggaagaagagctgagaaaagccattttagtggtgtttgcaaataaacaggacatggaacaggccatgacttcctcagagatggcaaattcacttgggttacctgccttgaaggaccgaaaatggcagatattcaaaacgtcagcaaccaaaggcaccggccttgatgaggcaatggaatggttagttgaaacattaaaaagcagacagtaattcagtccattcttctcccctgaaatgaagactacatcacctctctccctttggaaacagtcaagtgtacttcacactactagatgttaaaactatatgattattggcatatactgactgactgcaatatttgtagtaaatagggaaaataagtatttagttggagggataatttgatcgaatcacctgaatgttctatgtaatgtaaaatattcttttcttgctttcttgtgttaaggtatatattctatttgtatggaattcttattcaaatacagttctattaaagagtatactcctattggatgaaaaaaacctatttttgaatagtagttgcagcttgtttgtataaatactaaaaaatatcttaacagatttttttccccttaaaatgaattatctttccaaagattagactcagtatgagagtaggtgaggaacatagtttgtgtaatataatctttatttgcttacctgaccactttttattaagctgttttgtttaaaagcttttggttataggcatgaatattgttttgatggttaacttcactgacttatctgtaagtgtcattttatagtactttacagttgtcaaaaaaaatcttacatatattgatctagttgatcggtagaggaagcttgtgaagtaggtaggacaggttatgatgtcttcactgtatggacgtgaacccagggttctaataggttggcttgcccaaggtcacctgctagcttgtaaggtaggaatagggctcaaagtaaaacttttggttcagaagcttgactcataaactatactatatattcccaaaaatgtcagtattgacaacacagtctaactcttaaataaaattatgctaattagttacattcaaaataatgtttataaatttatttgtctatactagtagaagtgatcagtgacatactataaataatcctaaatggttatatttgatagaattcataacacattaaagagaaaatttcacattaaaggaaggtttaaaaatctattttcagattataaaaggtgtctttactggttttcattccttttatctacatgtaattggacatgtaaacttgttaaaaatcaaaatcttactgattgtacagggagaaattaagcattctgttttaaaaattaggcttattgctagactgtaagtttaaaaacaattcatgttcaaaggagcttttcaaattacccagtccaccacagaatcagctaatgtgacagaagtaaatatagtgcgtcataattgctaaaaacagggtgaatttctttcacttaagttggaaaaccagcctctaaaaaattaggtgctggtaatgagagcttaataccatggttccctgcaggtctcagaaacattagtagttcctttcttggccctcactgtccttccagtgttggcctctggcctcttcccctcacatttatgttcattctccgggcttatattcattctctgctgctttctcccttcacccgtgggactctcacccttcttgctcattctccagcacccattcctactttagtctctttgaaatcttttttggagattttccttcagctacaaatgttccagtacaaccaatattactcctgaggggcaaagactttttcatatttatgtccctagtatctggtatggcgcctggcatatggcatttcagaatatgttcatagttgaaacagtaggatagatatttgtcatcttgacaagtagccctttgcaatttatacttgagttcactcctggtcaatggcacatggctggaaaatgcagaaagcaagttcacttacagcctgaggcttataaagcttgtacagctgcctcccggcagtccaggaaaactgcaaaaaatgggaagtaaggtcctggcaggcagacccggcatgtagccgctggccatcttgaatcctagggcatgaagttgccccaaagttcagcacttggttaagcctgatccctctggtttatcacaaagaataggatgggataaagaaagtggacacttaaataagctataaattatatggtccttgtctagcaggagacaactgcacaggtatactaccagcgtttggatattgatatatacatggcaaatctgaatattgttttatgagaggcctggcaatgggtaaaacaccaaacttgaaatcagaacataggtgcaaatggccactcctgtagtttcttttctgtaaaatgggatctggacgaatgataccaaacgtttctttctaacattgtattttataactctggcctatgattgtgttgtgtcttgcattaaaaaaaaaaatttgagagtggtagaattacttctgttatctgaaatacctgagatgcactttaaactgttgaaatgtaagctctgagggcagggaccgtatcttatttactgttagtatccgttgcatctagtgtggtgcacctggcacacagtaggcactcaataaatatgtattgattaaaaacaaaagacanaaaaaaaaaaanaaaaaaaaaaaaanaaaaaaaaaaaaaaaaaaaaaaacaaaaaaaaaaaaaaagggggggnggngcgncaanannacnacccccgnngggggccacagataatagccgacccccgcgttttctgtgtaacaaaggaggctgcccaaaaatgaagagcagccgagtaattaataatagagtcacgcacgccggcgcgcaagctatcaacaaacaacggcatgatggcgcagacaaccgcgcgcgacacagacgagcgaaatactgatgggagagaagaaacaccaccacccactcccgggggggggagagaaaacaaacaggggggaagacaaaacacccccacgacagagagaaatagaacaaacagccaacgaggacaaccacactcaaactcaacagagaagtaaaacccc

SEQ ID NO: 69092 - DNA, 3241 bp, Homo sapiens
ctctcgcgttctcctccgtcctctctcggttccccttgattcctgcggggtccagggacccggacagcttggggacgtccgcagagcctgggttcgagttctttacccttatcatgaagttttccctcatccccagctccacttgctgggcagagttgttcttgcggaggctggcaacgcgtcagtcgcaggtggctttttctcaagtatattttccagtctgtttggaactcgggaaatgagaattttaattttgggattagatggagcaggaaaaaccacaattttgtacagattacaagtgggagaagttgttactactatacctaccattggatttaatgtagagacggtgacgtacaaaaaccttaaattccaagtctgggatttaggaggacagacaagtatcaggccatactggagatgttactattcaaacacagatgcagtcatttatgtagtagacagttgtgaccgagaccgaattggcatttccaaatcagagttagttgccatgttggaggaagaagagctgagaaaagccattttagtggtgtttgcaaataaacaggacatggaacaggccatgacttcctcagagatggcaaattcacttgggttacctgccttgaaggaccgaaaatggcagatattcaaaacgtcagcaaccaaaggcaccggccttgatgaggcaatggaatggttagttgaaacattaaaaagcagacagtaattcagtccattcttctcccctgaaatgaagactacatcacctctctccctttggaaacagtcaagtgtacttcacactactagatgttaaaactatatgattattggcatatactgactgactgcaatatttgtagtaaatagggaaaataagtatttagttggagggataatttgatcgaatcacctgaatgttctatgtaatgtaaaatattcttttcttgctttcttgtgttaaggtatatattctatttgtatggaattcttattcaaatacagttctattaaagagtatactcctattggatgaaaaaaacctatttttgaatagtagttgcagcttgtttgtataaatactaaaaaatatcttaacagatttttttccccttaaaatgaattatctttccaaagattagactcagtatgagagtaggtgaggaacatagtttgtgtaatataatctttatttgcttacctgaccactttttattaagctgttttgtttaaaagcttttggttataggcatgaatattgttttgatggttaacttcactgacttatctgtaagtgtcattttatagtactttacagttgtcaaaaaaaatcttacatatattgatctagttgatcggtagaggaagcttgtgaagtaggtaggacaggttatgatgtcttcactgtatggacgtgaacccagggttctaataggttggcttgcccaaggtcacctgctagcttgtaaggtaggaatagggctcaaagtaaaacttttggttcagaagcttgactcataaactatactatatattcccaaaaatgtcagtattgacaacacagtctaactcttaaataaaattatgctaattagttacattcaaaataatgtttataaatttatttgtctatactagtagaagtgatcagtgacatactataaataatcctaaatggttatatttgatagaattcataacacattaaagagaaaatttcacattaaaggaaggtttaaaaatctattttcagattataaaaggtgtctttactggttttcattccttttatctacatgtaattggacatgtaaacttgttaaaaatcaaaatcttactgattgtacagggagaaattaagcattctgttttaaaaattaggcttattgctagactgtaagtttaaaaacaattcatgttcaaaggagcttttcaaattacccagtccaccacagaatcagctaatgtgacagaagtaaatatagtgcgtcataattgctaaaaacagggtgaatttctttcacttaagttggaaaaccagcctctaaaaaattaggtgctggtaatgagagcttaataccatggttccctgcaggtctcagaaacattagtagttcctttcttggccctcactgtccttccagtgttggcctctggcctcttcccctcacatttatgttcattctccgggcttatattcattctctgctgctttctcccttcacccgtgggactctcacccttcttgctcattctccagcacccattcctactttagtctctttgaaatcttttttggagattttccttcagctacaaatgttccagtacaaccaatattactcctgaggggcaaagactttttcatatttatgtccctagtatctggtatggcgcctggcatatggcatttcagaatatgttcatagttgaaacagtaggatagatatttgtcatcttgacaagtagccctttgcaatttatacttgagttcactcctggtcaatggcacatggctggaaaatgcagaaagcaagttcacttacagcctgaggcttataaagcttgtacagctgcctcccggcagtccaggaaaactgcaaaaaatgggaagtaaggtcctggcaggcagacccggcatgtagccgctggccatcttgaatcctagggcatgaagttgccccaaagttcagcacttggttaagcctgatccctctggtttatcacaaagaataggatgggataaagaaagtggacacttaaataagctataaattatatggtccttgtctagcaggagacaactgcacaggtatactaccagcgtttggatattgatatatacatggcaaatctgaatattgttttatgagaggcctggcaatgggtaaaacaccaaacttgaaatcagaacataggtgcaaatggccactcctgtagtttcttttctgtaaaatgggatctggacgaatgataccaaacgtttctttctaacattgtattttataactctggcctatgattgtgttgtgtcttgcattaaaaaaaaaaatttgagagtggtagaattacttctgttatctgaaatacctgagatgcactttaaactgttgaaatgtaagctctgagggcagggaccgtatcttatttactgttagtatccgttgcatctagtgtggtgcacctggcacacagtaggcactcaataaatatgtattgattaaaaacaaaagac

SEQ ID NO: 69093 - DNA, 3178 bp, Homo sapiens
ggtcgcagctgaccctcgctcccgcccccgcctggagtccgacgtggaagttgctggctgactgggcttgcgaggaaaccgcctcggagctgcagccgaaggccaaggaatcactgaagatcggcgaggtggctttttctcaagtatattttccagtctgtttggaactcgggaaatgagaattttaattttgggattagatggagcaggaaaaaccacaattttgtacagattacaagtgggagaagttgttactactatacctaccattggatttaatgtagagacggtgacgtacaaaaaccttaaattccaagtctgggatttaggaggacagacaagtatcaggccatactggagatgttactattcaaacacagatgcagtcatttatgtagtagacagttgtgaccgagaccgaattggcatttccaaatcagagttagttgccatgttggaggaagaagagctgagaaaagccattttagtggtgtttgcaaataaacaggacatggaacaggccatgacttcctcagagatggcaaattcacttgggttacctgccttgaaggaccgaaaatggcagatattcaaaacgtcagcaaccaaaggcaccggccttgatgaggcaatggaatggttagttgaaacattaaaaagcagacagtaattcagtccattcttctcccctgaaatgaagactacatcacctctctccctttggaaacagtcaagtgtacttcacactactagatgttaaaactatatgattattggcatatactgactgactgcaatatttgtagtaaatagggaaaataagtatttagttggagggataatttgatcgaatcacctgaatgttctatgtaatgtaaaatattcttttcttgctttcttgtgttaaggtatatattctatttgtatggaattcttattcaaatacagttctattaaagagtatactcctattggatgaaaaaaacctatttttgaatagtagttgcagcttgtttgtataaatactaaaaaatatcttaacagatttttttccccttaaaatgaattatctttccaaagattagactcagtatgagagtaggtgaggaacatagtttgtgtaatataatctttatttgcttacctgaccactttttattaagctgttttgtttaaaagcttttggttataggcatgaatattgttttgatggttaacttcactgacttatctgtaagtgtcattttatagtactttacagttgtcaaaaaaaatcttacatatattgatctagttgatcggtagaggaagcttgtgaagtaggtaggacaggttatgatgtcttcactgtatggacgtgaacccagggttctaataggttggcttgcccaaggtcacctgctagcttgtaaggtaggaatagggctcaaagtaaaacttttggttcagaagcttgactcataaactatactatatattcccaaaaatgtcagtattgacaacacagtctaactcttaaataaaattatgctaattagttacattcaaaataatgtttataaatttatttgtctatactagtagaagtgatcagtgacatactataaataatcctaaatggttatatttgatagaattcataacacattaaagagaaaatttcacattaaaggaaggtttaaaaatctattttcagattataaaaggtgtctttactggttttcattccttttatctacatgtaattggacatgtaaacttgttaaaaatcaaaatcttactgattgtacagggagaaattaagcattctgttttaaaaattaggcttattgctagactgtaagtttaaaaacaattcatgttcaaaggagcttttcaaattacccagtccaccacagaatcagctaatgtgacagaagtaaatatagtgcgtcataattgctaaaaacagggtgaatttctttcacttaagttggaaaaccagcctctaaaaaattaggtgctggtaatgagagcttaataccatggttccctgcaggtctcagaaacattagtagttcctttcttggccctcactgtccttccagtgttggcctctggcctcttcccctcacatttatgttcattctccgggcttatattcattctctgctgctttctcccttcacccgtgggactctcacccttcttgctcattctccagcacccattcctactttagtctctttgaaatcttttttggagattttccttcagctacaaatgttccagtacaaccaatattactcctgaggggcaaagactttttcatatttatgtccctagtatctggtatggcgcctggcatatggcatttcagaatatgttcatagttgaaacagtaggatagatatttgtcatcttgacaagtagccctttgcaatttatacttgagttcactcctggtcaatggcacatggctggaaaatgcagaaagcaagttcacttacagcctgaggcttataaagcttgtacagctgcctcccggcagtccaggaaaactgcaaaaaatgggaagtaaggtcctggcaggcagacccggcatgtagccgctggccatcttgaatcctagggcatgaagttgccccaaagttcagcacttggttaagcctgatccctctggtttatcacaaagaataggatgggataaagaaagtggacacttaaataagctataaattatatggtccttgtctagcaggagacaactgcacaggtatactaccagcgtttggatattgatatatacatggcaaatctgaatattgttttatgagaggcctggcaatgggtaaaacaccaaacttgaaatcagaacataggtgcaaatggccactcctgtagtttcttttctgtaaaatgggatctggacgaatgataccaaacgtttctttctaacattgtattttataactctggcctatgattgtgttgtgtcttgcattaaaaaaaaaaatttgagagtggtagaattacttctgttatctgaaatacctgagatgcactttaaactgttgaaatgtaagctctgagggcagggaccgtatcttatttactgttagtatccgttgcatctagtgtggtgcacctggcacacagtaggcactcaataaatatgtattgattaaaaacaaaagac

SEQ ID NO: 69094 - DNA, 2083 bp, Homo sapiens
ggtcgcagctgaccctcgctcccgcccccgcctggagtccgacgtggaagttgctggctgactgggcttgcgaggaaaccgcctcggagctgcagccgaaggccaaggaatcactgaagatcggcgagggaggacagggggttcatcatgggtggctttttctcaagtatattttccagtctgtttggaactcgggaaatgagaattttaattttgggattagatggagcaggaaaaaccacaattttgtacagattacaagtgggagaagttgttactactatacctaccattggatttaatgtagagacggtgacgtacaaaaaccttaaattccaagtctgggatttaggaggacagacaagtatcaggccatactggagatgttactattcaaacacagatgcagtcatttatgtagtagacagttgtgaccgagaccgaattggcatttccaaatcagagttagttgccatgttggaggaagaagagctgagaaaagccattttagtggtgtttgcaaataaacaggacatggaacaggccatgacttcctcagagatggcaaattcacttgggttacctgccttgaaggaccgaaaatggcagatattcaaaacgtcagcaaccaaaggcaccggccttgatgaggcaatggaatggttagttgaaacattaaaaagcagacagtaattcagtccattcttctcccctgaaatgaagactacatcacctctctccctttggaaacagtcaagtgtacttcacactactagatgttaaaactatatgattattggcatatactgactgactgcaatatttgtagtaaatagggaaaataagtatttagttggagggataatttgatcgaatcacctgaatgttctatgtaatgtaaaatattcttttcttgctttcttgtgttaaggtatatattctatttgtatggaattcttattcaaatacagttctattaaagagtatactcctattggatgaaaaaaacctatttttgaatagtagttgcagcttgtttgtataaatactaaaaaatatcttaacagatttttttccccttaaaatgaattatctttccaaagattagactcagtatgagagtaggtgaggaacatagtttgtgtaatataatctttatttgcttacctgaccactttttattaagctgttttgtttaaaagcttttggttataggcatgaatattgttttgatggttaacttcactgacttatctgtaagtgtcattttatagtactttacagttgtcaaaaaaaatcttacatatattgatctagttgatcggtagaggaagcttgtgaagtaggtaggacaggttatgatgtcttcactgtatggacgtgaacccagggttctaataggttggcttgcccaaggtcacctgctagcttgtaaggtaggaatagggctcaaagtaaaacttttggttcagaagcttgactcataaactatactatatattcccaaaaatgtcagtattgacaacacagtctaactcttaaataaaattatgctaattagttacattcaaaataatgtttataaatttatttgtctatactagtagaagtgatcagtgacatactataaataatcctaaatggttatatttgatagaattcataacacattaaagagaaaatttcacattaaaggaaggtttaaaaatctattttcagattataaaaggtgtctttactggttttcattccttttatctacatgtaattggacatgtaaacttgttaaaaatcaaaatcttactgattgtacagggagaaattaagcattctgttttaaaaattaggcttattgctagactgtaagtttaaaaacaattcatgttcaaaggagcttttcaaattacccagtccaccacagaatcagctaatgtgacagaagtaaatatagtgcgtcataattgctaaaaacagggtgaatttctttcacttaagttggaaaaccagcctctaaaaaattaggtgcatttaacgcatggcagccggcagcctattcgcaggacatgcaggcagggggttcttt

SEQ ID NO: 69095 - DNA, 2779 bp, Homo sapiens
ttatgtttaattatttattattaaatagaagttaattttaaaattttttcgtggccttcaggaagaagagctgagaaaagccattttagtggtgtttgcaaataaacaggacatggaacaggccatgacttcctcagagatggcaaattcacttgggttacctgccttgaaggaccgaaaatggcagatattcaaaacgtcagcaaccaaaggcaccggccttgatgaggcaatggaatggttagttgaaacattaaaaagcagacagtaattcagtccattcttctcccctgaaatgaagactacatcacctctctccctttggaaacagtcaagtgtacttcacactactagatgttaaaactatatgattattggcatatactgactgactgcaatatttgtagtaaatagggaaaataagtatttagttggagggataatttgatcgaatcacctgaatgttctatgtaatgtaaaatattcttttcttgctttcttgtgttaaggtatatattctatttgtatggaattcttattcaaatacagttctattaaagagtatactcctattggatgaaaaaaacctatttttgaatagtagttgcagcttgtttgtataaatactaaaaaatatcttaacagatttttttccccttaaaatgaattatctttccaaagattagactcagtatgagagtaggtgaggaacatagtttgtgtaatataatctttatttgcttacctgaccactttttattaagctgttttgtttaaaagcttttggttataggcatgaatattgttttgatggttaacttcactgacttatctgtaagtgtcattttatagtactttacagttgtcaaaaaaaatcttacatatattgatctagttgatcggtagaggaagcttgtgaagtaggtaggacaggttatgatgtcttcactgtatggacgtgaacccagggttctaataggttggcttgcccaaggtcacctgctagcttgtaaggtaggaatagggctcaaagtaaaacttttggttcagaagcttgactcataaactatactatatattcccaaaaatgtcagtattgacaacacagtctaactcttaaataaaattatgctaattagttacattcaaaataatgtttataaatttatttgtctatactagtagaagtgatcagtgacatactataaataatcctaaatggttatatttgatagaattcataacacattaaagagaaaatttcacattaaaggaaggtttaaaaatctattttcagattataaaaggtgtctttactggttttcattccttttatctacatgtaattggacatgtaaacttgttaaaaatcaaaatcttactgattgtacagggagaaattaagcattctgttttaaaaattaggcttattgctagactgtaagtttaaaaacaattcatgttcaaaggagcttttcaaattacccagtccaccacagaatcagctaatgtgacagaagtaaatatagtgcgtcataattgctaaaaacagggtgaatttctttcacttaagttggaaaaccagcctctaaaaaattaggtgctggtaatgagagcttaataccatggttccctgcaggtctcagaaacattagtagttcctttcttggccctcactgtccttccagtgttggcctctggcctcttcccctcacatttatgttcattctccgggcttatattcattctctgctgctttctcccttcacccgtgggactctcacccttcttgctcattctccagcacccattcctactttagtctctttgaaatcttttttggagattttccttcagctacaaatgttccagtacaaccaatattactcctgaggggcaaagactttttcatatttatgtccctagtatctggtatggcgcctggcatatggcatttcagaatatgttcatagttgaaacagtaggatagatatttgtcatcttgacaagtagccctttgcaatttatacttgagttcactcctggtcaatggcacatggctggaaaatgcagaaagcaagttcacttacagcctgaggcttataaagcttgtacagctgcctcccggcagtccaggaaaactgcaaaaaatgggaagtaaggtcctggcaggcagacccggcatgtagccgctggccatcttgaatcctagggcatgaagttgccccaaagttcagcacttggttaagcctgatccctctggtttatcacaaagaataggatgggataaagaaagtggacacttaaataagctataaattatatggtccttgtctagcaggagacaactgcacaggtatactaccagcgtttggatattgatatatacatggcaaatctgaatattgttttatgagaggcctggcaatgggtaaaacaccaaacttgaaatcagaacataggtgcaaatggccactcctgtagtttcttttctgtaaaatgggatctggacgaatgataccaaacgtttctttctaacattgtattttataactctggcctatgattgtgttgtgtcttgcattaaaaaaaaaaatttgagagtggtagaattacttctgttatctgaaatacctgagatgcactttaaactgttgaaatgtaagctctgagggcagggaccgtatcttatttactgttagtatccgttgcatctagtgtggtgcacctggcacacagtaggcactcaataaatatgtattgattaaaaacaaaagac

SEQ ID NO: 69096 - DNA, 1222 bp, Homo sapiens
ggtcgcagctgaccctcgctcccgcccccgcctggagtccgacgtggaagttgctggctgactgggcttgcgaggaaaccgcctcggagctgcagccgaaggccaaggaatcactgaagatcggcgagggaggacagggggttcatcatgggtggctttttctcaagtatattttccagtctgtttggaactcgggaaatgagaattttaattttgggattagatggagcaggaaaaaccacaattttgtacagattacaagtgggagaagttgttactactatacctaccattggatttaatgtagagacggtgacgtacaaaaaccttaaattccaagtctgggatttaggaggacagacaagtatcaggccatactggagatgttactattcaaacacagatgcagtcatttatgtagtagacagttgtgaccgagaccgaattggcatttccaaatcagagttagttgccatgttggaggaagaagagctgagaaaagccattttagtggtgtttgcaaataaacaggacatggaacaggccatgacttcctcagagatggcaaattcacttgggttacctgccttgaaggaccgaaaatggcagatattcaaaacgtcagcaaccaaaggcaccggccttgatgaggcaatggaatggttagttgaaacattaaaaagcagacagtaattcagtccattcttctcccctgaaatgaagactacatcacctctctccctttggaaacagtcaagtgtacttcacactactagatgttaaaactatatgattattggcatatactgactgactgcaatatttgtagtaaatagggaaaataagtatttagttggagggataatttgatcgaatcacctgaatgttctatgtaatgtaaaatattcttttcttgctttcttgtgttaaggtatatattctatttgtatggaattcttattcaaatacagttctattaaagagtatactcctattggatgaaaaaaacctaaaaaaaaaatggccacaggagatggggagaggagtctgaactaaacccctggcttttgtgcacactgcatacgttccagaactcctggatggtaaccatctttggaatgcagcgcttgctgcaatggtgatcaggattacttgccgtggtttttttgccctcgaaggttcttggcacacttctttaccctactggaccggccggtgccct

SEQ ID NO: 69097 - DNA, 737 bp, Homo sapiens
ggtcgcagctgaccctcgctcccgcccccgcctggagtccgacgtggaagttgctggctgactgggcttgcgaggaaaccgcctcggagctgcagccgaaggccaaggaatcactgaagatcggcgagggaggacagggggttcatcatgggtggctttttctcaagtatattttccagtctgtttggaactcgggaaatgagaattttaattttgggattagatggagcaggaaaaaccacaattttgtacagattacaagtgggagaagttgttactactatacctaccattggatttaatgtagagacggtgacgtacaaaaaccttaaattccaagtctgggatttaggaggacagacaagtatcaggccatactggagatgttactattcaaacacagatgcagtcatttatgtagtagacagttgtgaccgagaccgaattggcatttccaaatcagagttagttgccatgttggaggaagaagagctgagaaaagccattttagtggtgtttgcaaataaacaggacatggaacaggccatgacttcctcagagatggcaaattcacttgggttacctgccttgaaggaccgaaaatggcagatattcaaaacgtcagcaaccaaaggcaccggccttgatgaggcaatggaatggttagttgtaacattataaaagcatacgcccgttattacgggcgtactgcggatgaatttttgcacactgatcag

SEQ ID NO: 69098 - DNA, 489 bp, Homo sapiens
  misc_feature (23)..(24): n is a, c, g, or t
gcggcgcctactactactaaatnngcggccgctcgactccttgtctagcaggagacaactgcacaggtatactaccagcgtttggatattgatatatacatggcaaatctgaatattgttttatgagaggcctggcaatgggtaaaacaccaaacttgaaatcagaacataggtgcaaatggccactcctgtagtttcttttctgtaaaatgggatctggacgaatgataccaaacgtttctttctaacattgtattttataactctggcctatgattgtgttgtgtcttgcattaaaaaaaaaaatttgagagtggtagaattacttctgttatctgaaatacctgagatgcactttaaactgttgaaatgtaagctctgagggcagggaccgtatcttatttactgttagtatccgttgcatctagtgtggtgcacctggcacacagtaggcactcaataaatatgtattgattaaaaacaaaagac

SEQ ID NO: 69099 - DNA, 3201 bp, Homo sapiens
ggtcgcagctgaccctcgctcccgcccccgcctggagtccgacgtggaagttgctggctgactgggcttgcgaggaaaccgcctcggagctgcagccgaaggccaaggaatcactgaagatcggcgagggaggacagggggttcatcatgggtggctttttctcaagtatattttccagtctgtttggaactcgggaaatgagaattttaattttgggattagatggagcaggaaaaaccacaattttgtacagattacaagtgggagaagttgttactactatacctaccattggatttaatgtagagacggtgacgtacaaaaaccttaaattccaagtctgggatttaggaggacagacaagtatcaggccatactggagatgttactattcaaacacagatgcagtcatttatgtagtagacagttgtgaccgagaccgaattggcatttccaaatcagagttagttgccatgttggaggaagaagagctgagaaaagccattttagtggtgtttgcaaataaacaggacatggaacaggccatgacttcctcagagatggcaaattcacttgggttacctgccttgaaggaccgaaaatggcagatattcaaaacgtcagcaaccaaaggcaccggccttgatgaggcaatggaatggttagttgaaacattaaaaagcagacagtaattcagtccattcttctcccctgaaatgaagactacatcacctctctccctttggaaacagtcaagtgtacttcacactactagatgttaaaactatatgattattggcatatactgactgactgcaatatttgtagtaaatagggaaaataagtatttagttggagggataatttgatcgaatcacctgaatgttctatgtaatgtaaaatattcttttcttgctttcttgtgttaaggtatatattctatttgtatggaattcttattcaaatacagttctattaaagagtatactcctattggatgaaaaaaacctatttttgaatagtagttgcagcttgtttgtataaatactaaaaaatatcttaacagatttttttccccttaaaatgaattatctttccaaagattagactcagtatgagagtaggtgaggaacatagtttgtgtaatataatctttatttgcttacctgaccactttttattaagctgttttgtttaaaagcttttggttataggcatgaatattgttttgatggttaacttcactgacttatctgtaagtgtcattttatagtactttacagttgtcaaaaaaaatcttacatatattgatctagttgatcggtagaggaagcttgtgaagtaggtaggacaggttatgatgtcttcactgtatggacgtgaacccagggttctaataggttggcttgcccaaggtcacctgctagcttgtaaggtaggaatagggctcaaagtaaaacttttggttcagaagcttgactcataaactatactatatattcccaaaaatgtcagtattgacaacacagtctaactcttaaataaaattatgctaattagttacattcaaaataatgtttataaatttatttgtctatactagtagaagtgatcagtgacatactataaataatcctaaatggttatatttgatagaattcataacacattaaagagaaaatttcacattaaaggaaggtttaaaaatctattttcagattataaaaggtgtctttactggttttcattccttttatctacatgtaattggacatgtaaacttgttaaaaatcaaaatcttactgattgtacagggagaaattaagcattctgttttaaaaattaggcttattgctagactgtaagtttaaaaacaattcatgttcaaaggagcttttcaaattacccagtccaccacagaatcagctaatgtgacagaagtaaatatagtgcgtcataattgctaaaaacagggtgaatttctttcacttaagttggaaaaccagcctctaaaaaattaggtgctggtaatgagagcttaataccatggttccctgcaggtctcagaaacattagtagttcctttcttggccctcactgtccttccagtgttggcctctggcctcttcccctcacatttatgttcattctccgggcttatattcattctctgctgctttctcccttcacccgtgggactctcacccttcttgctcattctccagcacccattcctactttagtctctttgaaatcttttttggagattttccttcagctacaaatgttccagtacaaccaatattactcctgaggggcaaagactttttcatatttatgtccctagtatctggtatggcgcctggcatatggcatttcagaatatgttcatagttgaaacagtaggatagatatttgtcatcttgacaagtagccctttgcaatttatacttgagttcactcctggtcaatggcacatggctggaaaatgcagaaagcaagttcacttacagcctgaggcttataaagcttgtacagctgcctcccggcagtccaggaaaactgcaaaaaatgggaagtaaggtcctggcaggcagacccggcatgtagccgctggccatcttgaatcctagggcatgaagttgccccaaagttcagcacttggttaagcctgatccctctggtttatcacaaagaataggatgggataaagaaagtggacacttaaataagctataaattatatggtccttgtctagcaggagacaactgcacaggtatactaccagcgtttggatattgatatatacatggcaaatctgaatattgttttatgagaggcctggcaatgggtaaaacaccaaacttgaaatcagaacataggtgcaaatggccactcctgtagtttcttttctgtaaaatgggatctggacgaatgataccaaacgtttctttctaacattgtattttataactctggcctatgattgtgttgtgtcttgcattaaaaaaaaaaatttgagagtggtagaattacttctgttatctgaaatacctgagatgcactttaaactgttgaaatgtaagctctgagggcagggaccgtatcttatttactgttagtatccgttgcatctagtgtggtgcacctggcacacagtaggcactcaataaatatgtattgattaaaaacaaaagac

SEQ ID NO: 69100 - DNA, 3230 bp, Homo sapiens
ggtcgcagctgaccctcgctcccgcccccgcctggagtccgacgtggaagttgctggctgactgggcttgcgaggaaaccgcctcggagctgcagccgaaggccaaggaatcactgaagatcggcgagggaggacagggggttcatcatgggtggctttttctcaagtatattttccagtctgtttggaactcgggaaatgagaattttaattttgggattagatggagcaggaaaaaccacaattttgtacagattacaagtgggagaagttgttactactatacctaccattggatttaatgtagagacggtgacgtacaaaaaccttaaattccaagtctgggatttaggaggacagacaagtatcaggccatactggagatgttactattcaaacacagatgcagtcatttatgtagtagacagttgtgaccgagaccgaattggcatttccaaatcagagttagttgccatgttggaggaagaagagctgagaaaagccattttagtggtgtttgcaaataaacaggacatggaacaggccatgacttcctcagagatggcaaattcacttgggttacctgccttgaaggaccgaaaatggcagatattcaaaacgtcagcaaccaaaggcaccggccttgatgaggcaatggaatggttagttgaaacattaaaaagcagacagtaattcagtccattcttctcccctgaaatgaagactacatcacctctctccctttggaaacagtcaagtgtacttcacactactagatgttaaaactatatgattattggcatatactgactgactgcaatatttgtagtaaatagggaaaataagtatttagttggagggataatttgatcgaatcacctgaatgttctatgtaatgtaaaatattcttttcttgctttcttgtgttaaggtatatattctatttgtatggaattcttattcaaatacagttctattaaagagtatactcctattggatgaaaaaaacctatttttgaatagtagttgcagcttgtttgtataaatactaaaaaatatcttaacagatttttttccccttaaaatgaattatctttccaaagattagactcagtatgagagtaggtgaggaacatagtttgtgtaatataatctttatttgcttacctgaccactttttattaagctgttttgtttaaaagcttttggttataggcatgaatattgttttgatggttaacttcactgacttatctgtaagtgtcattttatagtactttacagttgtcaaaaaaaatcttacatatattgatctagttgatcggtagaggaagcttgtgaagtaggtaggacaggttatgatgtcttcactgtatggacgtgaacccagggttctaataggttggcttgcccaaggtcacctgctagcttgtaaggtaggaatagggctcaaagtaaaacttttggttcagaagcttgactcataaactatactatatattcccaaaaatgtcagtattgacaacacagtctaactcttaaataaaattatgctaattagttacattcaaaataatgtttataaatttatttgtctatactagtagaagtgatcagtgacatactataaataatcctaaatggttatatttgatagaattcataacacattaaagagaaaatttcacattaaaggaaggtttaaaaatctattttcagattataaaaggtgtctttactggttttcattccttttatctacatgtaattggacatgtaaacttgttaaaaatcaaaatcttactgattgtacagggagaaattaagcattctgttttaaaaattaggcttattgctagactgtaagtttaaaaacaattcatgttcaaaggagcttttcaaattacccagtccaccacagaatcagctaatgtgacagaagtaaatatagtgcgtcataattgctaaaaacagggtgaatttctttcacttaagttggaaaaccagcctctaaaaaattaggtgctggtaatgagagcttaataccatggttccctgcaggtctcagaaacattagtagttcctttcttggccctcactgtccttccagtgttggcctctggcctcttcccctcacatttatgttcattctccgggcttatattcattctctgctgctttctcccttcacccgtgggactctcacccttcttgctcattctccagcacccattcctactttagtctctttgaaatcttttttggagattttccttcagctacaaatgttccagtacaaccaatattactcctgaggggcaaagactttttcatatttatgtccctagtatctggtatggcgcctggcatatggcatttcagaatatgttcatagttgaaacagtaggatagatatttgtcatcttgacaagtagccctttgcaatttatacttgagttcactcctggtcaatggcacatggctggaaaatgcagaaagcaagttcacttacagcctgaggcttataaagcttgtacagctgcctcccggcagtccaggaaaactgcaaaaaatgggaagtaaggtcctggcaggcagacccggcatgtagccgctggccatcttgaatcctagggcatgaagttgccccaaagttcagcacttggttaagcctgatccctctggtttatcacaaagaataggatgggataaagaaagtggacacttaaataagctataaattatatggtccttgtctagcaggagacaactgcacaggtatactaccagcgtttggatattgatatatacatggcaaatctgaatattgttttatgagaggcctggcaatgggtaaaacaccaaacttgaaatcagaacataggtgcaaatggccactcctgtagtttcttttctgtaaaatgggatctggacgaatgataccaaacgtttctttctaacattgtattttataactctggcctatgattgtgttgtgtcttgcattaaaaaaaaaaatttgagagtggtagaattacttctgttatctgaaatacctgagatgcactttaaactgttgaaatgtaagctctgagggcagggaccgtatcttatttactgttagtatccgttgcatctagtgtggtgcacctggcacacagtaggcactcaataaatatgtattgattaaaaacaaaagacgtcttcaatatgccagatatatttgtcct

SEQ ID NO: 69101 - DNA, 3115 bp, Homo sapiens
ctagaggatcccctctctcacactggactgaagatcggcgagggaggacaggcggttcatcatgggtggctttttctcaagtatattttccagtctgtttggaactcgggaaatgagaattttaattttgggattagatggagcaggaaaaaccacaattttgtacagattacaagtgggagaagttgttactactatacctaccattggatttaatgtagagacggtgacgtacaaaaaccttaaattccaagtctgggatttaggaggacagacaagtatcaggccatactggagatgttactattcaaacacagatgcagtcatttatgtagtagacagttgtgaccgagaccgaattggcatttccaaatcagagttagttgccatgttggaggaagaagagctgagaaaagccattttagtggtgtttgcaaataaacaggacatggaacaggccatgacttcctcagagatggcaaattcacttgggttacctgccttgaaggaccgaaaatggcagatattcaaaacgtcagcaaccaaaggcaccggccttgatgaggcaatggaatggttagttgaaacattaaaaagcagacagtaattcagtccattcttctcccctgaaatgaagactacatcacctctctccctttggaaacagtcaagtgtacttcacactactagatgttaaaactatatgattattggcatatactgactgactgcaatatttgtagtaaatagggaaaataagtatttagttggagggataatttgatcgaatcacctgaatgttctatgtaatgtaaaatattcttttcttgctttcttgtgttaaggtatatattctatttgtatggaattcttattcaaatacagttctattaaagagtatactcctattggatgaaaaaaacctatttttgaatagtagttgcagcttgtttgtataaatactaaaaaatatcttaacagatttttttccccttaaaatgaattatctttccaaagattagactcagtatgagagtaggtgaggaacatagtttgtgtaatataatctttatttgcttacctgaccactttttattaagctgttttgtttaaaagcttttggttataggcatgaatattgttttgatggttaacttcactgacttatctgtaagtgtcattttatagtactttacagttgtcaaaaaaaatcttacatatattgatctagttgatcggtagaggaagcttgtgaagtaggtaggacaggttatgatgtcttcactgtatggacgtgaacccagggttctaataggttggcttgcccaaggtcacctgctagcttgtaaggtaggaatagggctcaaagtaaaacttttggttcagaagcttgactcataaactatactatatattcccaaaaatgtcagtattgacaacacagtctaactcttaaataaaattatgctaattagttacattcaaaataatgtttataaatttatttgtctatactagtagaagtgatcagtgacatactataaataatcctaaatggttatatttgatagaattcataacacattaaagagaaaatttcacattaaaggaaggtttaaaaatctattttcagattataaaaggtgtctttactggttttcattccttttatctacatgtaattggacatgtaaacttgttaaaaatcaaaatcttactgattgtacagggagaaattaagcattctgttttaaaaattaggcttattgctagactgtaagtttaaaaacaattcatgttcaaaggagcttttcaaattacccagtccaccacagaatcagctaatgtgacagaagtaaatatagtgcgtcataattgctaaaaacagggtgaatttctttcacttaagttggaaaaccagcctctaaaaaattaggtgctggtaatgagagcttaataccatggttccctgcaggtctcagaaacattagtagttcctttcttggccctcactgtccttccagtgttggcctctggcctcttcccctcacatttatgttcattctccgggcttatattcattctctgctgctttctcccttcacccgtgggactctcacccttcttgctcattctccagcacccattcctactttagtctctttgaaatcttttttggagattttccttcagctacaaatgttccagtacaaccaatattactcctgaggggcaaagactttttcatatttatgtccctagtatctggtatggcgcctggcatatggcatttcagaatatgttcatagttgaaacagtaggatagatatttgtcatcttgacaagtagccctttgcaatttatacttgagttcactcctggtcaatggcacatggctggaaaatgcagaaagcaagttcacttacagcctgaggcttataaagcttgtacagctgcctcccggcagtccaggaaaactgcaaaaaatgggaagtaaggtcctggcaggcagacccggcatgtagccgctggccatcttgaatcctagggcatgaagttgccccaaagttcagcacttggttaagcctgatccctctggtttatcacaaagaataggatgggataaagaaagtggacacttaaataagctataaattatatggtccttgtctagcaggagacaactgcacaggtatactaccagcgtttggatattgatatatacatggcaaatctgaatattgttttatgagaggcctggcaatgggtaaaacaccaaacttgaaatcagaacataggtgcaaatggccactcctgtagtttcttttctgtaaaatgggatctggacgaatgataccaaacgtttctttctaacattgtattttataactctggcctatgattgtgttgtgtcttgcattaaaaaaaaaaatttgagagtggtagaattacttctgttatctgaaatacctgagatgcactttaaactgttgaaatgtaagctctgagggcagggaccgtatcttatttactgttagtatccgttgcatctagtgtggtgcacctggcacacagtaggcactcaataaatatgtattgattaaaaacaaaagac

SEQ ID NO: 69102 - DNA, 2981 bp, Homo sapiens
ggtcgcagctgaccctcgctcccgcccccgcctggagtccgacgtggaagttgctggctgactgggcttgcgaggaaaccgcctcggagctgcagccgaaggccaaggaatcactgaagatcggcgagggaggacagggggttcatcatgggccatactggagatgttactattcaaacacagatgcagtcatttatgtagtagacagttgtgaccgagaccgaattggcatttccaaatcagagttagttgccatgttggaggaagaagagctgagaaaagccattttagtggtgtttgcaaataaacaggacatggaacaggccatgacttcctcagagatggcaaattcacttgggttacctgccttgaaggaccgaaaatggcagatattcaaaacgtcagcaaccaaaggcaccggccttgatgaggcaatggaatggttagttgaaacattaaaaagcagacagtaattcagtccattcttctcccctgaaatgaagactacatcacctctctccctttggaaacagtcaagtgtacttcacactactagatgttaaaactatatgattattggcatatactgactgactgcaatatttgtagtaaatagggaaaataagtatttagttggagggataatttgatcgaatcacctgaatgttctatgtaatgtaaaatattcttttcttgctttcttgtgttaaggtatatattctatttgtatggaattcttattcaaatacagttctattaaagagtatactcctattggatgaaaaaaacctatttttgaatagtagttgcagcttgtttgtataaatactaaaaaatatcttaacagatttttttccccttaaaatgaattatctttccaaagattagactcagtatgagagtaggtgaggaacatagtttgtgtaatataatctttatttgcttacctgaccactttttattaagctgttttgtttaaaagcttttggttataggcatgaatattgttttgatggttaacttcactgacttatctgtaagtgtcattttatagtactttacagttgtcaaaaaaaatcttacatatattgatctagttgatcggtagaggaagcttgtgaagtaggtaggacaggttatgatgtcttcactgtatggacgtgaacccagggttctaataggttggcttgcccaaggtcacctgctagcttgtaaggtaggaatagggctcaaagtaaaacttttggttcagaagcttgactcataaactatactatatattcccaaaaatgtcagtattgacaacacagtctaactcttaaataaaattatgctaattagttacattcaaaataatgtttataaatttatttgtctatactagtagaagtgatcagtgacatactataaataatcctaaatggttatatttgatagaattcataacacattaaagagaaaatttcacattaaaggaaggtttaaaaatctattttcagattataaaaggtgtctttactggttttcattccttttatctacatgtaattggacatgtaaacttgttaaaaatcaaaatcttactgattgtacagggagaaattaagcattctgttttaaaaattaggcttattgctagactgtaagtttaaaaacaattcatgttcaaaggagcttttcaaattacccagtccaccacagaatcagctaatgtgacagaagtaaatatagtgcgtcataattgctaaaaacagggtgaatttctttcacttaagttggaaaaccagcctctaaaaaattaggtgctggtaatgagagcttaataccatggttccctgcaggtctcagaaacattagtagttcctttcttggccctcactgtccttccagtgttggcctctggcctcttcccctcacatttatgttcattctccgggcttatattcattctctgctgctttctcccttcacccgtgggactctcacccttcttgctcattctccagcacccattcctactttagtctctttgaaatcttttttggagattttccttcagctacaaatgttccagtacaaccaatattactcctgaggggcaaagactttttcatatttatgtccctagtatctggtatggcgcctggcatatggcatttcagaatatgttcatagttgaaacagtaggatagatatttgtcatcttgacaagtagccctttgcaatttatacttgagttcactcctggtcaatggcacatggctggaaaatgcagaaagcaagttcacttacagcctgaggcttataaagcttgtacagctgcctcccggcagtccaggaaaactgcaaaaaatgggaagtaaggtcctggcaggcagacccggcatgtagccgctggccatcttgaatcctagggcatgaagttgccccaaagttcagcacttggttaagcctgatccctctggtttatcacaaagaataggatgggataaagaaagtggacacttaaataagctataaattatatggtccttgtctagcaggagacaactgcacaggtatactaccagcgtttggatattgatatatacatggcaaatctgaatattgttttatgagaggcctggcaatgggtaaaacaccaaacttgaaatcagaacataggtgcaaatggccactcctgtagtttcttttctgtaaaatgggatctggacgaatgataccaaacgtttctttctaacattgtattttataactctggcctatgattgtgttgtgtcttgcattaaaaaaaaaaatttgagagtggtagaattacttctgttatctgaaatacctgagatgcactttaaactgttgaaatgtaagctctgagggcagggaccgtatcttatttactgttagtatccgttgcatctagtgtggtgcacctggcacacagtaggcactcaataaatatgtattgattaaaaacaaaagac

SEQ ID NO: 69103 - DNA, 1045 bp, Homo sapiens
ggtcgcagctgaccctcgctcccgcccccgcctggagtccgacgtggaagttgctggctgactgggcttgcgaggaaaccgcctcggagctgcagccgaaggccaaggaatcactgaagatcggcgagggaggacagggggttcatcatgggtggctttttctcaagtatattttccagtctgtttggaactcgggaaatgagaattttaattttgggattagatggagcaggaaaaaccacaattttgtacagattacaagtgggagaagttgttactactatacctaccattggatttaatgtagagacggtgacgtacaaaaaccttaaattccaagtctgggatttaggaggacagacaagtatcaggccatactggagatgttactattcaaacacagatgcagtcatttatgtagtagacagttgtgaccgagaccgaattggcatttccaaatcagagttagttgccatgttggaggaagaagagctgagaaaagccattttagtggtgtttgcaaataaacaggacatggaacaggccatgacttcctcagagatggcaaattcacttgggttacctgccttgaaggaccgaaaatggcagatattcaaaacgtcagcaaccaaaggcaccggccttgatgaggcaatggaatggcaagtatcatgcttccagaagccatctgtgcatttgtgtgtgcttgcagctatgcacgtccacgtgtaatttttctcccgtgttgaggatgaaactttgatttacttagcagcttatttcataagttcctcaagcgttttctctcactggtcttcaggtgcatctgtcttctcaaccacacctacctgattacagttacttagataagcaaattctttgccaatttttagccttttccctgcctcacctcaccctccaattccttatccttcaggaattagcttaagactctcttctgaagagcttttcctaatgtatctctattcctactgcctaatcactcacttaaagttagatgcccttgtcacagattagtgacata

SEQ ID NO: 69104 - DNA, 701 bp, Homo sapiens
cgcgcagaggccggcgcgcctggagctggcgggttggcagcggccgggcggggaggccgaaagtttctctgcccgcctcggccagtgagtgggagccgggagctgcatcccgcgcagtgggaccggcccggcccgctcagcagctctggaaaaagagagacgggaacacaccgggaaacactgggaaaaaaaaaaagtctcaagtgcgcccgaggcgcagggggcaggtctgcggctctcgcgggctctgtgacgggcttggctatgacctcagtcccctcgcgagccacgacgtgccccttgctgccacagcctttccaagactcctgcccgtgccctgtccgcgatcttcaggccccggagtcaccatggggcaggcgtcagatagcctcatctcgcggccacaggttccactagtgaggcacctgcgcggtgcttcgcagtacaggctgcgtcgtgtcctctcatatctcatggaagcgtcaaccggtatgtccgacggcgctgctggaggtctggcgttcgtcccaggacctccggtcagaggcaacgtccaagttccagaatagtggcgcacagacgcgaccgagccttcgttctacagtcaacggtcactgcctatgcacagcccaggggctcaccatcaggccgagattacgcgggcactggtccagcaggggattcagcggggccaggctggg

SEQ ID NO: 69105 - DNA, 427 bp, Homo sapiens
ctgcatggagggtggaatttataagccttgataaagacacttagttgaaactctaggggcagagataacacccttagcagaaagggcgggggtctctcaggatttctgcttcgatgtgctctttccttctcaccttgttcctttttcctcatttgccctccagccccaattatcaatcatggagggtgcccctggatgctccttctgggctgtggggtggcatgggctgcgcaggcctggatttgagaagcactccgaccaaggcacctccctcaccctcacccagggaagtgactcaggagttgaggaagactgagctctacacccctcacgatgcagaggccttgtatccaactctatagtcataatttttatttattttccttggagatagtgccaatatttatgtaagcattagtccccatgg

SEQ ID NO: 69106 - DNA, 2125 bp, Homo sapiens
  misc_feature (922)..(922): n is a, c, g, or t
  misc_feature (1159)..(1159): n is a, c, g, or t
  misc_feature (1296)..(1296): n is a, c, g, or t
  misc_feature (1863)..(1863): n is a, c, g, or t
gacagtgggacccgcgacctgccgtggtctcaggcactggaggacacctgcaacgccgtgcgctagactatgctactgaaggacctctaccgcggctcagccctggactaaggcaccggaggatccccgccctgccccgccccgcggtgtcctggactgtgcactgcagaacccccacccttccacaccctggactctggctcccgaggaccttggccccggctcgccctgaactactcctgcccctcagcgccctggactgtggttccagaggacctggtcctggggcaacttgtgctaccgcgtggactccaggaccccagtccttccacgccctagaccaaggcacgggagaacctctgactcgccgcccccgacctagggcaccagaggacccacaccttgccgtgccccggactacagcacggaaggacccccgatccgccgggcactgggctcctgcacagagggacccccgccatggaggtctggactacccctgccccaccgcaccctggactactgcacgccaagaccctcgcctgaacacgccctacactctggcatgggggaacccggccccgcagagccctggactctggcattggaggactcctcggctaggttctggactcctgcaccagaggactcctgccctgccacaccctggacacctgcactagagaaccctgccccgtcgccccctagactatggcacgggaggacccctgccaccgacttcggcacggtaagacccctgacccgccttgcactggattccagcactggaggaccccctgccacggcgctctctggactacccctgcgccaccgcgtcctgcactacagcacagcaggaccgccgtcccaccgcgcactggactgaggcacagcagcacccgggcctcgtggttggtggacngcaggacgaggtgaccccccgccccgctgcgcgttggactatggcacaggaggaccaccattcccgcatgccctggaccactgcaggacaggtcccccactccgcagcggcctggaatatggcactgcaggacccccgccctgctgctccacggactccaccactgaagaccctcgcccccctgcaccctggacaaaggcacgggaggacccggcttcaccgcccagtgggctatcncataggaaaacccccagcccacccccatcgcgccagagactctgacaagagagaacccctgccccctgctccccggactacagcaaggcaggaaccaccctcctccaggatcctcactatggcaactgtggaacccngccctggtacgccctggactaagtcaccgaaggaccccgaccccaccacaccgtgaactccagcactggaggaccattgccttactgcggactcaagcactggactatcgcagggctggatccctgtcccgccatgccctacactatggcacgggaggacccagcctcactgagctctggactccagcaccggaggacacctacacggaggactcctgctccgccacgtcctggactcctgcacaagagaacccccgccccgcggcaccctggatatagcaaggcaggaatcccgccctgcagtgttctggactgcggcacctgagaatccatgccccatcgcgccctggactgctgctccacaggactcctgttccactgcaccctggactatggcaccagaggacccagccccctggcgtcttggactaaggcacagtaggaccccgcagcatcgtgtactcctgcacaggaggaccctcgcagggctgcgtcctggactgagctactgaaggagcctcacccctgcctcaccctggtctaaggcactggagaactcttgctccncagagctgcggactcttgcacgagagaacctgcgcccagccgtgccctggactgtggcacagtagggcccacaccgggccatggactcctgtactggaggaagagtggtgataaatgtccaggtttacaagttgaaaagtagcagtcaatgtgctacaatggatggatttgatgtaaaattacaaatgctgaaaacattatgtgtaattgcctagccagatcaattacacaagacaaagaaataaaagaaatccatataggg

SEQ ID NO: 69107 - DNA, 538 bp, Homo sapiens
ttaaaatgtattttgtctaaccggaatatgatcacttcaatttgtgtttttttagacagggtctggactttgttgtctacgctgcagtgcagtggttacgatcacggctcagtgcagcctcaacctccaggctgcctccagtgcagcctcatcctcctacctcacctcagcctcccgaagtgctgggattataggcatgagccaccgtgcctggcctaagatttgtaacattaatagttatccaggaaaatgcaaacaacagtaagataccactttatatccactagcatggctagagtcaaaagacagacattaacaagcatttgccaggatgtggagaaaccctcatcaccctactggtgggatcaaatgataaagccacgttgaaaaacagtctagtatttccccagatggttaaacttagcattacttcatgatccagcaatgccagccctacatataaacccaaaagaagtgaaaacatgtccacactaaaatttatacacacacgtttcaagctcggtaacctctggcacga

SEQ ID NO: 69108 - DNA, 1380 bp, Homo sapiens
attctgggactgcagtctaaatctgagttggcaaataccatgtttatctgttgtttgataaaatactgacaaaatcttataaaaactggattacttgaataactgctttgagaaaatagaatgtagtgaatacttctctcttttctgcttcagcaattaaatgacttgcatatgtgatttctaagaaagagcttgttggttcactcttttaaaaaacaaaaataaaaacatttcattgttttaaaatgaatactagaggtcaggcacagtggctcgcacctgtaatctcagcctcccgaagtgctgggattataggcatgagccaccgtgcctggcctaagatttgtaacattaatagttatccaggaaaatgcaaacaacagtaagataccactttatatccactagcatggctagagtcaaaagacagacattaacaagcatttgccaggatgtggagaaaccctcatcaccctactggtgggatcaaatgataaagccacgttgaaaaacagtctagtatttccccagatggttaaacttagcattacttcatgatccagcaatgccagccctacatataaacccaaaagaagtgaaaacatgtccacactaaaatttatacacacacgtttatagcaatattattcataatagccaagaaatagaaacaacctaaatgactcccaactgacaaatggataaacattctaatgtatatccatacaatagaatgttatttggccattaaaaaaatgaaatactgatacatgttacaacatagatgaatcttgaaaatattatgcaaagtgagagaagttagtcataaaagaccatgtattatattgtttcatatgtgttaaatgtctggaataggcaaatctttatagacagaaagtagaatagtgattgtcaagactgcagggaatagggggctggagaacaataggtaaatggtacatggtttcttttggaggtgataaaatattctaaatttgactgtggtgatggttgcatgtactatgaatatactgtaagccactgaatttcagacttgaaatgagtgaattgtgtggttctaaaaaaaaaaaaaaaagaaaagaaaaaaaaagttgtgtgccaaaaggtctttgtcacctgagctatatgtcaataaagttttaccaaaaaaagaaattatgaaaagaataagcagatttttgcaagagtatttaccaattggagtgcctctaagccaaaaattccaattgtcttatataaagacgtatatgataccccaaaccattgtattgtatactttaaaatggtgcagatagtaaattttatgtaatgttttacctcaatttttataaaaatctatttgcttaaaaacgttaatat

SEQ ID NO: 69109 - DNA, 623 bp, Homo sapiens
cgcctcagcctcccagagtgctgggattacaggcatgagccaccatgcctggccaaaagttttgactcttaatgaagcccactttatccattttttctttcgtcacctgtgctttcggtgtctcttctctttttttgtgcttgctctttaattcatcttcatctaccttttttttgttttaaacacatagaaggttacacaaacatatcttcctactcagccttggtttataatttactgttgccctaagaatttcagaaaggaaaagaattcttgcttccctggctaggctcttggggtcttgatgtgcaagaagaaatgctgttgtgaatacaaagaatgatgaggaagtatacaaaaggtgccctaggctggctgcgggggtccagcaggctggctacattattctgtggtcaacctcttacaaatggggtgctcctgtccgtctccgtggccagctgccaccagccctatggtgtgaatggcaaggaagtggggactggcggctggccgaactccaggatgcagccttggctggcagagaaccaaaggcagagggggaaaaacactcttgagtatgagagaaataatgctagctccgaaacctataattcgcaagttta

SEQ ID NO: 69110 - DNA, 505 bp, Homo sapiens
agagggctcctgagggcaaccctgagggttacccaggccccagcaccacctgggaggacatccctggtctccaagcctccctcttccctgcttagcatcaaagacctaaaggggttaggaaagttcttaaaagtgatgagcattttaactgttaggctgtggaccaccccgtgtctctggaggcactttttccagtcttcccttcatagcagccaactctacaatcccacaagacctggtcttttagggctgaccgtttgagattcttatagttagtttttatatttacagagagaggccatttataaggaaggcctttaactgttttgagaggggcatttgactctcccataaatcctgctcatttctgtctccctgctggtacccaaaaatacccggaagtagcccccagaccttaaatagttgaaaagggtgtcaggggtgggggaaggattgtgtgtgtgtgaagtgtgtaaaggaataaaccaaccctttgacagaaaaa

SEQ ID NO: 69111 - DNA, 428 bp, Homo sapiens
ttgccctttccctcgattcctctgcaggactgggctttattaatctccatttccttgagcttggctatagtaggtgttcaataaacatttgttttgttgtgtgctttgtaaataggcaatgaagctgatttcacaagataggcacaaaagttagtttcattacaacacattaccaacagctgtatttttaacttttaacatatctcattctaaatcctgtggcagcacaacctccttccgtcatacctggagataaattttctttcaaaatctaatatgcactgtatttatagaatatgaaacataccgaccatgttttgcaaaaatgggaaaggcataacttagctttggggcatgtaagtaacaactcctgataggagaagaaatgtattcagaaagctcaaattagaaataaaatgggagactct

SEQ ID NO: 69112 - DNA, 3120 bp, Homo sapiens
  misc_feature (828)..(828): n is a, c, g, or t
aggtgggcgtggccagaccagctttaggtccggggagtgtctcgccagcggcagcacacccctgtaagtggtggccagggctgccgtggcaaaatgagctgtcaactttaggttgacaggggtgtggccgcgaccgcaagggcttttgttgccgggtggacccaacagggatgggctgctggggacagctgctggtgtggttcggagccgcgggcgccattctctgctctagcccggggtcccaggagacttttctgcggtcctcgcccctgccgctggcaagtcccagcccccgggacccgaaagtcagcgccccgcctagtatcttggagccagcctccccgctgaattctccgggcaccgaggggtcttggctgttttctacctgcggggccagcggccggcatgggcccacacagacacaatgtgacggggcgtacgcggggaccagcgtggtggtgaccgtgggggccgccgggcagctgagaggcgtgcagctgtggcgcgtgccgggccctggccagtatctgatctcagcctacggagccgcgggcggcaaaggcgccaagaaccacctgtcgcgggcgcatggcgtcttcgtctcagcaatcttctccctcggtctcggggagtcgctgtacatcctggtggggcagcagggagaggacgcctgtcccggaggtagcccggagagccagctcgtctgcctcggggagtctcgagccgttgaagagcacgcggcgatggatgggagcgaaggggtcccggggtcgcggcgctgggcgggaggtggcgggggtggcgggggcgccacctacgttttccggntgcgcgctggcgagctggaaccgttgctggtggcggccggaggcggcggtcgggcctacctgaggccgcgggaccgaggccggactcaggcctcccccgagaaactggagaaccgctcggaggcgcccgggagcggcgggagaggcggggcggcaggtggtgggggcggctggacgtcgcgggctccctctccgcaggccggccgctcactgcaggagggggcggagggcggccagggctgctccgaggcttgggcgacccttggctgggccgcggccggcggcttcgggggcggcggcggggcctgcactgcgggcggaggcggcggcggctacagggggggcgacgcttcagagactgacaacctctgggctgatggggaagatggagtatccttcatacaccccagcagcgagctcttcctgcagcctctggcagtcaccgagaaccacggagaggtagagatccgaaggcacctcaactgcagtcactgccctttgagagactgccaatggcaggcagagctccagctggctgaatgcctgtgcccagaaggcatggagctagctgtggataacgtcacctgcatggacctgcacaagcccccaggccctctggttctgatggtggctgtggtggcaacctcaacactgagcctccttatggtgtgtggggtcctgattctggtgaagcagaagaagtggcagggcctgcaggagatgaggctgccgagccctgagcttgagctgagcaagcttcgaacctctgccatcaggacagcccccaatccctattattgccaggtggggcttggcccggcccagtcctggcctctgccaccaggtgtcaccgaggtttccccagccaatgttactctgctcagagccctgggccatggtgcctttggggaggtgtatgagggactggtaattggccttcctggggactccagtcccctgcaggtagctatcaagaccctgccagaactctgctcgcctcaggatgagctggatttcctcatggaggccctcatcatcagcaagtttcgccatcagaacattgtgcggtgtgtggggctcagcctcagggccacccctcgcctcattctgctggaactgatgtctggaggggacatgaagagtttcctgaggcacagtcggccacacctgggccagccatcacctctggtcatgcgggacctgctgcaactggcccaggacatagcccagggctgccactacctggaggaaaatcacttcatccacagggatattgccgcccggaactgcctgctgagctgcgctggacccagccgagtggccaagattggggactttgggatggcacgagatatctaccgggccagttattaccgcaggggggaccgggccttgctcccagtcaagtggatgcccccagaggccttcctggagggcatcttcacatccaagacagattcctggtcttttggggtgctgctctgggagatcttctcactgggctacatgccctatcctgggcgcaccaaccaggaggtgctggacttcgtcgttggaggaggccggatggaccctcctaggggctgcccagggcctgtgtaccgcatcatgacccagtgttggcagcacgagcctgagctccgccctagctttgccagcatcttggagcgtctgcagtactgcactcaggacccggatgtgctgaattcactcctgccaatggagctggggcccaccccagaggaggaagggacttctgggctggggaacagatctttggagtgcctaagacccccacagccccaggaactgagtccagagaagttgaaaagctggggaggtagccctcttggcccctggctgtcctctggcctcaagcccctcaaatccaggggcctccaacctcagaacctttggaatcccacttatcgctcctgagccccaaggggccctgagggtaaggactgaggcactgagggtccctccctatactcctcaggctcctgggtggcctgttatgccagcggcctctgttccctgcagtctgtgctgtgtgtctgggcctgtctcggggctggcctggcagcgctgcacttgccatgctggaaaccagcccaggcctcccagggaagggcccagccacttccagcttttgatcttggggccagaggccgccttacacacaccccaggtgtccatggggagcactggattgctctcccattatgagcgtccttcatctgggcagaccccccaccctgcagatgcttctaataaaaagctcttctcatcc

SEQ ID NO: 69113 - DNA, 2985 bp, Homo sapiens
  misc_feature (828)..(828): n is a, c, g, or t
aggtgggcgtggccagaccagctttaggtccggggagtgtctcgccagcggcagcacacccctgtaagtggtggccagggctgccgtggcaaaatgagctgtcaactttaggttgacaggggtgtggccgcgaccgcaagggcttttgttgccgggtggacccaacagggatgggctgctggggacagctgctggtgtggttcggagccgcgggcgccattctctgctctagcccggggtcccaggagacttttctgcggtcctcgcccctgccgctggcaagtcccagcccccgggacccgaaagtcagcgccccgcctagtatcttggagccagcctccccgctgaattctccgggcaccgaggggtcttggctgttttctacctgcggggccagcggccggcatgggcccacacagacacaatgtgacggggcgtacgcggggaccagcgtggtggtgaccgtgggggccgccgggcagctgagaggcgtgcagctgtggcgcgtgccgggccctggccagtatctgatctcagcctacggagccgcgggcggcaaaggcgccaagaaccacctgtcgcgggcgcatggcgtcttcgtctcagcaatcttctccctcggtctcggggagtcgctgtacatcctggtggggcagcagggagaggacgcctgtcccggaggtagcccggagagccagctcgtctgcctcggggagtctcgagccgttgaagagcacgcggcgatggatgggagcgaaggggtcccggggtcgcggcgctgggcgggaggtggcgggggtggcgggggcgccacctacgttttccggntgcgcgctggcgagctggaaccgttgctggtggcggccggaggcggcggtcgggcctacctgaggccgcgggaccgaggccggactcaggcctcccccgagaaactggagaaccgctcggaggcgcccgggagcggcgggagaggcggggcggcagggggcgacgcttcagagactgacaacctctgggctgatggggaagatggagtatccttcatacaccccagcagcgagctcttcctgcagcctctggcagtcaccgagaaccacggagaggtagagatccgaaggcacctcaactgcagtcactgccctttgagagactgccaatggcaggcagagctccagctggctgaatgcctgtgcccagaaggcatggagctagctgtggataacgtcacctgcatggacctgcacaagcccccaggccctctggttctgatggtggctgtggtggcaacctcaacactgagcctccttatggtgtgtggggtcctgattctgggtacgaagcgtctagcaggcacagttgattcaaggctgctcctctccatgaagcagaagaagtggcagggcctgcaggagatgaggctgccgagccctgagcttgagctgagcaagcttcgaacctctgccatcaggacagcccccaatccctattattgccaggtggggcttggcccggcccagtcctggcctctgccaccaggtgtcaccgaggtttccccagccaatgttactctgctcagagccctgggccatggtgcctttggggaggtgtatgagggactggtaattggccttcctggggactccagtcccctgcaggtagctatcaagaccctgccagaactctgctcgcctcaggatgagctggatttcctcatggaggccctcatcatcagcaagtttcgccatcagaacattgtgcggtgtgtggggctcagcctcagggccacccctcgcctcattctgctggaactgatgtctggaggggacatgaagagtttcctgaggcacagtcggccacacctgggccagccatcacctctggtcatgcgggacctgctgcaactggcccaggacatagcccagggctgccactacctggaggaaaatcacttcatccacagggatattgccgcccggaactgcctgctgagctgcgctggacccagccgagtggccaagattggggactttgggatggcacgagatatctaccgggccagttattaccgcaggggggaccgggccttgctcccagtcaagtggatgcccccagaggccttcctggagggcatcttcacatccaagacagattcctggtcttttggggtgctgctctgggagatcttctcactgggctacatgccctatcctgggcgcaccaaccaggaggtgctggacttcgtcgttggaggaggccggatggaccctcctaggggctgcccagggcctgtgtaccgcatcatgacccagtgttggcagcacgagcctgagctccgccctagctttgccagcatcttggagcgtctgcagtactgcactcaggacccggatgtgctgaattcactcctgccaatggagctggggcccaccccagaggaggaagggacttctgggctggggaacagatctttggagtgcctaagacccccacagccccaggaactgagtccagagaagttgaaaagctggggaggtagccctcttggcccctggctgtcctctggcctcaagcccctcaaatccaggggcctccaacctcagaacctttggaatcccacttatcgctcctgagccccaaggggccctgagggtaaggactgaggcactgagggtccctccctatactcctcaggctcctgggtggcctgttatgccagcggcctctgttccctgcagtctgtgctgtgtgtctgggcctgtctcggggctggcctggcagcgctgcacttgccatgctggaaaccagcccaggcctcccagggaagggcccagccacttccagcttttgatcttggggccagaggccgccttacacacaccccaggtgtccatggggagcactggattgctctcccattatgagcgtccttcatctgggcagaccccccaccctgcagatgcttctaataaaaagctcttctcatcc

SEQ ID NO: 69114 - DNA, 2937 bp, Homo sapiens
  misc_feature (828)..(828): n is a, c, g, or t
aggtgggcgtggccagaccagctttaggtccggggagtgtctcgccagcggcagcacacccctgtaagtggtggccagggctgccgtggcaaaatgagctgtcaactttaggttgacaggggtgtggccgcgaccgcaagggcttttgttgccgggtggacccaacagggatgggctgctggggacagctgctggtgtggttcggagccgcgggcgccattctctgctctagcccggggtcccaggagacttttctgcggtcctcgcccctgccgctggcaagtcccagcccccgggacccgaaagtcagcgccccgcctagtatcttggagccagcctccccgctgaattctccgggcaccgaggggtcttggctgttttctacctgcggggccagcggccggcatgggcccacacagacacaatgtgacggggcgtacgcggggaccagcgtggtggtgaccgtgggggccgccgggcagctgagaggcgtgcagctgtggcgcgtgccgggccctggccagtatctgatctcagcctacggagccgcgggcggcaaaggcgccaagaaccacctgtcgcgggcgcatggcgtcttcgtctcagcaatcttctccctcggtctcggggagtcgctgtacatcctggtggggcagcagggagaggacgcctgtcccggaggtagcccggagagccagctcgtctgcctcggggagtctcgagccgttgaagagcacgcggcgatggatgggagcgaaggggtcccggggtcgcggcgctgggcgggaggtggcgggggtggcgggggcgccacctacgttttccggntgcgcgctggcgagctggaaccgttgctggtggcggccggaggcggcggtcgggcctacctgaggccgcgggaccgaggccggactcaggcctcccccgagaaactggagaaccgctcggaggcgcccgggagcggcgggagaggcggggcggcagggggcgacgcttcagagactgacaacctctgggctgatggggaagatggagtatccttcatacaccccagcagcgagctcttcctgcagcctctggcagtcaccgagaaccacggagaggtagagatccgaaggcacctcaactgcagtcactgccctttgagagactgccaatggcaggcagagctccagctggctgaatgcctgtgcccagaaggcatggagctagctgtggataacgtcacctgcatggacctgcacaagcccccaggccctctggttctgatggtggctgtggtggcaacctcaacactgagcctccttatggtgtgtggggtcctgattctggtgaagcagaagaagtggcagggcctgcaggagatgaggctgccgagccctgagcttgagctgagcaagcttcgaacctctgccatcaggacagcccccaatccctattattgccaggtggggcttggcccggcccagtcctggcctctgccaccaggtgtcaccgaggtttccccagccaatgttactctgctcagagccctgggccatggtgcctttggggaggtgtatgagggactggtaattggccttcctggggactccagtcccctgcaggtagctatcaagaccctgccagaactctgctcgcctcaggatgagctggatttcctcatggaggccctcatcatcagcaagtttcgccatcagaacattgtgcggtgtgtggggctcagcctcagggccacccctcgcctcattctgctggaactgatgtctggaggggacatgaagagtttcctgaggcacagtcggccacacctgggccagccatcacctctggtcatgcgggacctgctgcaactggcccaggacatagcccagggctgccactacctggaggaaaatcacttcatccacagggatattgccgcccggaactgcctgctgagctgcgctggacccagccgagtggccaagattggggactttgggatggcacgagatatctaccgggccagttattaccgcaggggggaccgggccttgctcccagtcaagtggatgcccccagaggccttcctggagggcatcttcacatccaagacagattcctggtcttttggggtgctgctctgggagatcttctcactgggctacatgccctatcctgggcgcaccaaccaggaggtgctggacttcgtcgttggaggaggccggatggaccctcctaggggctgcccagggcctgtgtaccgcatcatgacccagtgttggcagcacgagcctgagctccgccctagctttgccagcatcttggagcgtctgcagtactgcactcaggacccggatgtgctgaattcactcctgccaatggagctggggcccaccccagaggaggaagggacttctgggctggggaacagatctttggagtgcctaagacccccacagccccaggaactgagtccagagaagttgaaaagctggggaggtagccctcttggcccctggctgtcctctggcctcaagcccctcaaatccaggggcctccaacctcagaacctttggaatcccacttatcgctcctgagccccaaggggccctgagggtaaggactgaggcactgagggtccctccctatactcctcaggctcctgggtggcctgttatgccagcggcctctgttccctgcagtctgtgctgtgtgtctgggcctgtctcggggctggcctggcagcgctgcacttgccatgctggaaaccagcccaggcctcccagggaagggcccagccacttccagcttttgatcttggggccagaggccgccttacacacaccccaggtgtccatggggagcactggattgctctcccattatgagcgtccttcatctgggcagaccccccaccctgcagatgcttctaataaaaagctcttctcatcc

SEQ ID NO: 69115 - DNA, 452 bp, Homo sapiens
tgttacccgctggccaatggagctttgtggtctgtttccgtctgccctctgcctgaactctcatccggcttgtactgcctgctggacccctccacctggaggccagcccatgtctcaggcccagcctagcctcttctcctcaaattctaagtgttttctctttaggtttccctggctttgtgaatggatcatgtgtctctaggtataaacctgacatcatctttccacccggcttacctccagcagatctccccagttctgtctccatcttctacctgcatggacctgcacaagcccccaggccctctggttctgatggtggctgtggtggcaacctcaacactgagcctccttatggtgtgtggggtcctgattctgggtacgaagcgtctagcaggcacagttgattcaaggctgctcctctccagtgagctgggatgggtttctgcggg

SEQ ID NO: 69116 - DNA, 2730 bp, Homo sapiens
  misc_feature (828)..(828): n is a, c, g, or t
aggtgggcgtggccagaccagctttaggtccggggagtgtctcgccagcggcagcacacccctgtaagtggtggccagggctgccgtggcaaaatgagctgtcaactttaggttgacaggggtgtggccgcgaccgcaagggcttttgttgccgggtggacccaacagggatgggctgctggggacagctgctggtgtggttcggagccgcgggcgccattctctgctctagcccggggtcccaggagacttttctgcggtcctcgcccctgccgctggcaagtcccagcccccgggacccgaaagtcagcgccccgcctagtatcttggagccagcctccccgctgaattctccgggcaccgaggggtcttggctgttttctacctgcggggccagcggccggcatgggcccacacagacacaatgtgacggggcgtacgcggggaccagcgtggtggtgaccgtgggggccgccgggcagctgagaggcgtgcagctgtggcgcgtgccgggccctggccagtatctgatctcagcctacggagccgcgggcggcaaaggcgccaagaaccacctgtcgcgggcgcatggcgtcttcgtctcagcaatcttctccctcggtctcggggagtcgctgtacatcctggtggggcagcagggagaggacgcctgtcccggaggtagcccggagagccagctcgtctgcctcggggagtctcgagccgttgaagagcacgcggcgatggatgggagcgaaggggtcccggggtcgcggcgctgggcgggaggtggcgggggtggcgggggcgccacctacgttttccggntgcgcgctggcgagctggaaccgttgctggtggcggccggaggcggcggtcgggcctacctgaggccgcgggaccgaggccggactcaggcctcccccgagaaactggagaaccgctcggaggcgcccgggagcggcgggagaggcggggcggcagggggcgacgcttcagagactgacaacctctgggctgatggggaagatggagtatccttcatacaccccagcagcgagctcttcctgcagcctctggcagtcaccgagaaccacggagaggtagagatccgaaggcacctcaactgcagtcactgccctttgagagactgccaatggcaggcagagctccagctggctgaatgcctgtgcccagaaggcatggagctagctgtggataacgtcacctgcatggacctgcacaagcccccaggccctctggttctgatggtggctgtggtggcaacctcaacactgagcctccttatggtgtgtggggtcctgattctgggtggggcttggcccggcccagtcctggcctctgccaccaggtgtcaccgaggtttccccagccaatgttactctgctcagaccctgccagaactctgctcgcctcaggatgagctggatttcctcatggaggccctcatcatcagcaagtttcgccatcagaacattgtgcggtgtgtggggctcagcctcagggccacccctcgcctcattctgctggaactgatgtctggaggggacatgaagagtttcctgaggcacagtcggccacacctgggccagccatcacctctggtcatgcgggacctgctgcaactggcccaggacatagcccagggctgccactacctggaggaaaatcacttcatccacagggatattgccgcccggaactgcctgctgagctgcgctggacccagccgagtggccaagattggggactttgggatggcacgagatatctaccgggccagttattaccgcaggggggaccgggccttgctcccagtcaagtggatgcccccagaggccttcctggagggcatcttcacatccaagacagattcctggtcttttggggtgctgctctgggagatcttctcactgggctacatgccctatcctgggcgcaccaaccaggaggtgctggacttcgtcgttggaggaggccggatggaccctcctaggggctgcccagggcctgtgtaccgcatcatgacccagtgttggcagcacgagcctgagctccgccctagctttgccagcatcttggagcgtctgcagtactgcactcaggacccggatgtgctgaattcactcctgccaatggagctggggcccaccccagaggaggaagggacttctgggctggggaacagatctttggagtgcctaagacccccacagccccaggaactgagtccagagaagttgaaaagctggggaggtagccctcttggcccctggctgtcctctggcctcaagcccctcaaatccaggggcctccaacctcagaacctttggaatcccacttatcgctcctgagccccaaggggccctgagggtaaggactgaggcactgagggtccctccctatactcctcaggctcctgggtggcctgttatgccagcggcctctgttccctgcagtctgtgctgtgtgtctgggcctgtctcggggctggcctggcagcgctgcacttgccatgctggaaaccagcccaggcctcccagggaagggcccagccacttccagcttttgatcttggggccagaggccgccttacacacaccccaggtgtccatggggagcactggattgctctcccattatgagcgtccttcatctgggcagaccccccaccctgcagatgcttctaataaaaagctcttctcatcc

SEQ ID NO: 69117 - DNA, 538 bp, Homo sapiens
ttttcaaaattagaaaataaacacattaatgtaaatatgttgagacagacaaagaaatttgtctgctacttaataaacacgcgatttatactttttgtcttctaattaattgtcgaccctgaataaggtggtacaactaaggcatattatggaaaactggcattattgcttaatgtaacatgagggattggaatttctttaaagtaattttaagatatgattatttagcagaaatattcactggagcattttacttttagaaattatcgtcacacaaggaagcctttataggaccgactacctaattgcagtcaaagatctcttgaatgaatgaacacacacacacagaagaacacacattttaagaatatagtggtcctatatttttaaaaatttttgccacattttttatatctgaacagaacgtatgtgtctaagcagatgttttaagttatatccttcatgtaggtgagtctgtaaatgtaccatttaacttaaatggctttgtgggaaggtagtttgaggagtttaaaaagga

SEQ ID NO: 69118 - DNA, 434 bp, Homo sapiens
aaacacacacactctccctggaaagctccttctcacccctggatctcagcttacatggctcctcctcagacctcagagacacctttcctgaccaccccatctaaagaaggctgccgtctcaaaaaaaaaaaaaaaaaaaaaggaagaagaagaaggctgccccaggctttctattctctgtctcagccccttgtttctttcctagcttctattataacttccaattattttgtctagttcttgttctctctcctgtctctcctatcccttcccatacaaatgcttcatgagggcaagggtcatgcctgcttattctcaatagtctcctcagtgcctggccacagcagatactcaaaaaatatttgttggatgaatgaatgaattagcaaatgaatgaatgaatgaatgaatgaatgaatgaatgaatggactgg

SEQ ID NO: 69119 - DNA, 800 bp, Homo sapiens
aaggggtgccaacagcacaagaaaaggagagagagagggggtgggtttggctggagcgtcaggggttgagagctgaggccaagtgtggttggaccagatgaggtgatgatgccgtctctcccccacaccctagggactcgtacacatgcatacgcatacttacacatacccacacttgcatcactctattccctccacagtcccaagctccccatcatttagaagagacctgtcccattatagcattgggacactgctgagggttttcttcccagactcggagctgcttccccctaacagaaccaaatcccccgaacagagcccccctctgaggacctgggaagcctgcaccctggggccctactgtttcgagcgtctgggcatcctccatctcttcccaccatggctgatgcccttgcccatggagctgatgtcaactgggtcaatgggggccaagataatgccacaccgctgatccaggccacagctgctgtaagagccctgctgacctctccaccccaccctagggctctgacacctactcctgactctgggccctgcccttacctcctttccccaccacctgttccctagggcttccacccatagggagagatcaacaatagagactggttgctaagagtgtgtgatttggaggcagagaacctgagtttgaacccaggctctcacctcttacaggagaatcatttgaacccaggaggtggaggttgcagtgagccaagatcgcactacttcacttcagcctgggcaacagagtgagactctgcctcaaaaaaaaa

SEQ ID NO: 69120 - DNA, 865 bp, Homo sapiens
tgtatttttagtagagacggggtttcaccatgttggccaggacggtctcgatctcctgacctcgtgatccgcctgcctcggcctcccaaagtgttgggattacaggcgtgagccaccgcgcccggccaaagatagtgtcgttcatttcttaattccctcctcttcaggctacgactggcaaagatgagggaggctgaagcggcccaggggcaggcaggtaaagaatacacccaccccaccccccaggcccaacacctgaactctgggcttctggtccacggtgacctctctccctagtgcccagctgcattcattccgttatttaacaaatgcgtattgggcgcatgcgacgtgccaggccctggcaaggcataggtgctggcgcagtgccccggcgcgcacgttcccacccaggctcggagcgcgaggtccccaggtgggccccaaccgccggatcctgcccttctgcactggggcccagccgcctcccggcctttcctccctcccccaggagatgagacgtatcttgacatcttccgcgacttctccctcatggcgtcagacgacccggagaagctgagccgtcgcagtcatgacctccacacgctgtgacccgaggcccacggggcccgcgcctgcctcccttccccgccaccgggccctctgccattaaagcctccgtgcttcgctcttcccttctggttcacttcttgggcgccaccttcgggcccgtagggtgttgggcgctgcggctcccgaggtgcggggagcagctgggggtttgcgagctccagtccagcaaggtgcgactccggggagcgaggcggcagcttcgatcctatatcccggaccgtaccagcctgct

SEQ ID NO: 69121 - DNA, 317 bp, Homo sapiens
agatggagtctcgctctgtcacccaggctggagtgcagtggtgcgatctcggcttactggaacctccacctcccaggttcaagcgattctgtgttattttcccatcctcagaggtctgcggggtttccgagaggctcgccgggatttctggcggggggctgagagcctggaggctgccctgacccacaacgcagaggttcccaggcgccgggcccaggaggcagaagaggcaggagctgctttgaggacggctcgagctgggtaccggggacgggcactggattatgccctgcaggtgcctgccccaatctgtcttc

SEQ ID NO: 69122 - DNA, 2766 bp, Homo sapiens
cccagcactgcctggaagtgtggggtgagagctcctcctaggacacccctttccccttggggaaagaattgtgcccccaggcccttccccgcggaggtccctctcctccttccccctcatctccccttcctgggacagaaagtgcctccacctgcatccccaggggcccggcctccagggcccgctggccccacagcaggcaagctgagatgacggtcaagctggatttcgaggagtgtctcaaggactcaccccgtttccgagcctctattgagctggtggaagccgaagtgtcagaattggagacccgtctggaaaagctcctgaaactgggcactggtctcctggaaagtgggcgccattaccttgctgccagccgcgccttcgttgtcggcatttgtgacctggcccgcctgggtccaccagagcccatgatggcggagtgtctggaaaaattcaccgtgagcctgaaccacaagctggacagccatgcggagcttctagatgccacccaacacacactgcagcagcagatccagaccctggtcaaggaaggtctgcggggtttccgagaggctcgccgggatttctggcggggggctgagagcctggaggctgccctgacccacaacgcagaggttcccaggcgccgggcccaggaggcagaagaggcaggagctgctttgaggacggctcgagctgggtaccggggacgggcactggattatgccctgcagatcaacgtgattgaggacaagaggaagtttgacatcatggagtttgtgctgcgtttggtggaggcccaggctacccatttccagcagggccatgaggagctgagccggctgtcccagtatcgaaaggagctgggcgcccagttgcaccagctggtcttgaattcagcacgagagaagagggacatggagcagagacacgtgctgctgaaacagaaggagctgggtggggaggagccagaaccaagcttaagagaggggcctggtggcctggtgatggaaggacatctcttcaaacgggccagcaacgcatttaagacctggagcagacgctggttcaccattcagagcaaccaactggtttaccagaagaagtacaaggaccctgtgactgtggtggtggatgaccttcgtctctgcacagtgaaactctgccctgactcagaaaggcggttctgctttgaggtggtgtccaccagcaagtcctgcctcctccaggctgactcagagcgcctcctgcagctgtgggtcagtgctgtgcagagcagcattgcttctgccttcaagtcaggctcgccttgatgacagcccccggggtccaggccagggctcaggacacctggccataggctctgctgccaccctgggctctggtggaatggccaggggaagggagcctgggggagtcgggcacgtggtggcccaggtccagagtgtggatggcaatgcccagtgctgcgactgccgggagccagccccggagtgggccagcatcaaccttggtgtcaccctctgcattcagtgttccggcatccacaggagccttggtgttcacttctccaaagtccggtctctgacccttgactcatgggagccagaactagtgaagctcatgtgtgagctgggaaatgtcatcatcaaccagatctatgaggcccgcgtggaggccatggcagtgaagaaaccagggcccagctgctcccggtgagcttggggtttagcctcccaggggaatgggggacccctggagcagaagagggaagactgcgtgcttctcccctcccacaggcaggagaaggaggcctggattcacgctaaatacgtggagaagaagttcctgaccaagctgcctgagattcgagggcgaagaggtggccgggggcgcccaagggggcagcctcctgtgcccccaaagccttccatcaggccccggccagggagcttgagatccaagccagagcccccctctgaggacctgggaagcctgcaccctggggccctactgtttcgagcgtctgggcatcctccatctcttcccaccatggctgatgcccttgcccatggagctgatgtcaactgggtcaatgggggccaagataatgccacaccgctgatccaggccacagctgctaattctcttctggcctgtgagtttctcctccagaacggggcgaacgtgaaccaagcggacagtgcgggccggggcccgctgcaccacgcaaccattcttggccacacggggctcgcctgcctgttcctgaaacggggagctgatctgggggctcgagactctgaaggcagggaccctctgaccatcgccatggaaacagccaacgctgacatcgtcaccctgctacgactggcaaagatgagggaggctgaagcggcccaggggcaggcaggagatgagacgtatcttgacatcttccgcgacttctccctcatggcgtcagacgacccggagaagctgagccgtcgcagtcatgacctccacacgctgtgacccgaggcccacggggcccgcgcctgcctcccttccccgccaccgggccctctgccattaaagcctccgtgcttcgctcttcaaaaaaaaaaaaaaagaaaaaacagagagcaagaagcaaagaagcgggaagaagaagagagggagcgggcgagcagcgcccagccacgaggagaagaccagaggagagaaaagaggaaggaggggcgagcagaaggcagaggggtgcaccgagtcaccgaacgaggg

SEQ ID NO: 69123 - DNA, 2980 bp, Homo sapiens
cccagcactgcctggaagtgtggggtgagagctcctcctaggacacccctttccccttggggaaagaattgtgcccccaggcccttccccgcggaggtccctctcctccttccccctcatctccccttcctgggacagaaagtgcctccacctgcatccccaggggcccggcctccagggcccgctggccccacagcaggcaagctgagatgacggtcaagctggatttcgaggagtgtctcaaggactcaccccgtttccgagcctctattgagctggtggaagccgaagtgtcagaattggagacccgtctggaaaagctcctgaaactgggcactggtctcctggaaagtgggcgccattaccttgctgccagccgcgccttcgttgtcggcatttgtgacctggcccgcctgggtccaccagagcccatgatggcggagtgtctggaaaaattcaccgtgagcctgaaccacaagctggacagccatgcggagcttctagatgccacccaacacacactgcagcagcagatccagaccctggtcaaggaaggtctgcggggtttccgagaggctcgccgggatttctggcggggggctgagagcctggaggctgccctgacccacaacgcagaggttcccaggcgccgggcccaggaggcagaagaggcaggagctgctttgaggacggctcgagctgggtaccggggacgggcactggattatgccctgcagatcaacgtgattgaggacaagaggaagtttgacatcatggagtttgtgctgcgtttggtggaggcccaggctacccatttccagcagggccatgaggagctgagccggctgtcccagtatcgaaaggagctgggcgcccagttgcaccagctggtcttgaattcagcacgagagaagagggacatggagcagagacacgtgctgctgaaacagaaggagctgggtggggaggagccagaaccaagcttaagagaggggcctggtggcctggtgatggaaggacatctcttcaaacgggccagcaacgcatttaagacctggagcagacgctggttcaccattcagagcaaccaactggtttaccagaagaagtacaaggaccctgtgactgtggtggtggatgaccttcgtctctgcacagtgaaactctgccctgactcagaaaggcggttctgctttgaggtggtgtccaccagcaagtcctgcctcctccaggctgactcagagcgcctcctgcagctgtgggtcagtgctgtgcagagcagcattgcttctgccttcaagtcaggctcgccttgatgacagcccccggggtccaggccagggctcaggacacctggccataggctctgctgccaccctgggctctggtggaatggccaggggaagggagcctgggggagtcgggcacgtggtggcccaggtccagagtgtggatggcaatgcccagtgctgcgactgccgggagccagccccggagtgggccagcatcaaccttggtgtcaccctctgcattcagtgttccggcatccacaggagccttggtgttcacttctccaaagtccggtctctgacccttgactcatgggagccagaactagtgaagctcatgtgtgagctgggaaatgtcatcatcaaccagatctatgaggcccgcgtggaggccatggcagtgaagaaaccagggcccagctgctcccggcaggagaaggaggcctggattcacgctaaatacgtggagaagaagttcctgaccaagctgcctgagattcgagggcgaagaggtggccgggggcgcccaagggggcagcctcctgtgcccccaaagccttccatcaggccccggccagggagcttgagatccaagccagagcccccctctgaggacctgggaagcctgcaccctggggccctactgtttcgagcgtctgggcatcctccatctcttcccaccatggctgatgcccttgcccatggagctgatgtcaactgggtcaatgggggccaagataatgccacaccgctgatccaggccacagctgctaattctcttctggcctgtgagtttctcctccagaacggggcgaacgtgaaccaagcggacagtgcgggccggggcccgctgcaccacgcaaccattcttggccacacggggctcgcctgcctgttcctgaaacggggagctgatctgggggctcgagactctgaaggcagggaccctctgaccatcgccatggaaacagccaacgctgacatcgtcaccctgctacgactggcaaagatgagggaggctgaagcggcccaggggcaggcaggtaaagaatacacccaccccaccccccaggcccaacacctgaactctgggcttctggtccacggtgacctctctccctagtgcccagctgcattcattccgttatttaacaaatgcgtattgggcgcatgcgacgtgccaggccctggcaaggcataggtgctggcgcagtgccccggcgcgcacgttcccacccaggctcggagcgcgaggtccccaggtgggccccaaccgccggatcctgcccttctgcactggggcccagccgcctcccggcctttcctccctcccccaggagatgagacgtatcttgacatcttccgcgacttctccctcatggcgtcagacgacccggagaagctgagccgtcgcagtcatgacctccacacgctgtgacccgaggcccacggggcccgcgcctgcctcccttccccgccaccgggccctctgccattaaagcctccgtgcttcgctcttcccttctggttcacttcttgggcgccaccttcgggcccgtagggtgttgggcgctgcggctcccgaggtgcggggagcagctgggggtttgcgagctccagtccagcaaggtgcgactccggggagcgaggcggcagcttcgatcctatatcccggaccgtaccagcctgct

SEQ ID NO: 69124 - DNA, 2054 bp, Homo sapiens
cccagcactgcctggaagtgtggggtgagagctcctcctaggacacccctttccccttggggaaagaattgtgcccccaggcccttccccgcggaggtccctctcctccttccccctcatctccccttcctgggacagaaagtgcctccacctgcatccccaggggcccggcctccagggcccgctggccccacagcaggcaagctgagatgacggtcaagctggatttcgaggagtgtctcaaggactcaccccgtttccgagcctctattgagctggtggaagccgaagtgtcagaattggagacccgtctggaaaagctcctgaaactgggcactggtctcctggaaagtgggcgccattaccttgctgccagccgcgccttcgttgtcggcatttgtgacctggcccgcctgggtccaccagagcccatgatggcggagtgtctggaaaaattcaccgtgagcctgaaccacaagctggacagccatgcggagcttctagatgccacccaacacacactgcagcagcagatccagaccctggtcaaggaaggtctgcggggtttccgagaggctcgccgggatttctggcggggggctgagagcctggaggctgccctgacccacaacgcagaggttcccaggcgccgggcccaggaggcagaagaggcaggagctgctttgaggacggctcgagctgggtaccggggacgggcactggattatgccctgcagatcaacgtgattgaggacaagaggaagtttgacatcatggagtttgtgctgcgtttggtggaggcccaggctacccatttccagcagggccatgaggagctgagccggctgtcccagtatcgaaaggagctgggcgcccagttgcaccagctggtcttgaattcagcacgagagaagagggacatggagcagagacacgtgctgctgaaacagaaggagctgggtggggaggagccagaaccaagcttaagagaggggcctggtggcctggtgatggaaggacatctcttcaaacgggccagcaacgcatttaagacctggagcagacgctggttcaccattcagagcaaccaactggtttaccagaagaagtacaaggaccctgtgactgtggtggtggatgaccttcgtctctgcacagtgaaactctgccctgactcagaaaggcggttctgctttgaggtggtgtccaccagcaagtcctgcctcctccaggctgactcagagcgcctcctgcagctgtgggtcagtgctgtgcagagcagcattgcttctgccttcaagtcaggctcgccttgatgacagcccccggggtccaggccagggctcaggacacctggccataggctctgctgccaccctgggctctggtggaatggccaggggaagggagcctgggggagtcgggcacgtggtggcccaggtccagagtgtggatggcaatgcccagtgctgcgactgccgggagccagccccggagtgggccagcatcaaccttggtgtcaccctctgcattcagtgttccggcatccacaggagccttggtgttcacttctccaaagtccggtctctgacccttgactcatgggagccagaactagtgaagctcatgtgtgagctgggaaatgtcatcatcaaccagatctatgaggcccgcgtggaggccatggcagtgaagaaaccagggcccagctgctcccggtgagcttggggtttagcctcccaggggaatgggggacccctggagcagaagagggaagactgcgtgcttctcccctcccacaggcaggagaaggaggcctggattcacgctaaatacgtggagaagaagttcctgaccaagctgcctgagattcgagggcgaagaggtggccgggggcgcccaagggggcagcctcctgtgcccccaaagccttccatcaggccccggccagggagcttgagatccaagccaggtatagggttggttgggcattcattgagcatctgctgtgtgctcggcatcgtgccaggtagcgccgggaggcacagagtgtg

SEQ ID NO: 69125 - DNA, 1113 bp, Homo sapiens
aaggggtgccaacagcacaagaaaaggagagagagagggggtgggtttggctggagcgtcaggggttgagagctgaggccaagtgtggttggaccagatgaggtgatgatgccgtctctcccccacaccctagggactcgtacacatgcatacgcatacttacacatacccacacttgcatcactctattccctccacagtcccaagctccccatcatttagaagagacctgtcccattatagcattgggacactgctgagggttttcttcccagactcggagctgcttccccctaacagaaccaaatcccccgaacagagcccccctctgaggacctgggaagcctgcaccctggggccctactgtttcgagcgtctgggcatcctccatctcttcccaccatggctgatgcccttgcccatggagctgatgtcaactgggtcaatgggggccaagataatgccacaccgctgatccaggccacagctgctaattctcttctggcctgtgagtttctcctccagaacggggcgaacgtgaaccaagcggacagtgcgggccggggcccgctgcaccacgcaaccattcttggccacacggggctcgcctgcctgttcctgaaacggggagctgatctgggggctcgagactctgaaggcagggaccctctgaccatcgccatggaaacagccaacgctgacatcgtcaccctgctacgactggcaaagatgagggaggctgaagcggcccaggggcaggcaggagatgagacgtatcttgacatcttccgcgacttctccctcatggcgtcagacgacccggagaagctgagccgtcgcagtcatgacctccacacgctgtgacccgaggcccacggggcccgcgcctgcctcccttccccgccaccgggccctctgccattaaagcctccgtgcttcgctcttcaaaaaaaaaaaaaaagaaaaaacagagagcaagaagcaaagaagcgggaagaagaagagagggagcgggcgagcagcgcccagccacgaggagaagaccagaggagagaaaagaggaaggaggggcgagcagaaggcagaggggtgcaccgagtcaccgaacgaggg

SEQ ID NO: 69126 - DNA, 571 bp, Homo sapiens
tgtatttttagtagagacggggtttcaccatgttggccaggacggtctcgatctcctgacctcgtgatccgcctgcctcggcctcccaaagtgttgggattacaggcgtgagccaccgcgcccggccaaagatagtgtcgttcatttcttaattccctcctcttcaggctacgactggcaaagatgagggaggctgaagcggcccaggggcaggcaggagatgagacgtatcttgacatcttccgcgacttctccctcatggcgtcagacgacccggagaagctgagccgtcgcagtcatgacctccacacgctgtgacccgaggcccacggggcccgcgcctgcctcccttccccgccaccgggccctctgccattaaagcctccgtgcttcgctcttcccttctggttcacttcttgggcgccaccttcgggcccgtagggtgttgggcgctgcggctcccgaggtgcggggagcagctgggggtttgcgagctccagtccagcaaggtgcgactccggggagcgaggcggcagcttcgatcctatatcccggaccgtaccagcctgct

SEQ ID NO: 69127 - DNA, 541 bp, Homo sapiens
cttggcccaccctgagaggcgtaattcgcccatcaacattgctgtcaggcatctttttagcactagacgtgaccccgggggtgggggcagatgaacggaacgcaacccagctcaaaggatgggaagttgtgggggaggctacgactggcaaagatgagggaggctgaagcggcccaggggcaggcaggagatgagacgtatcttgacatcttccgcgacttctccctcatggcgtcagacgacccggagaagctgagccgtcgcagtcatgacctccacacgctgtgacccgaggcccacggggcccgcgcctgcctcccttccccgccaccgggccctctgccattaaagcctccgtgcttcgctcttcccttctggttcacttcttgggcgccaccttcgggcccgtagggtgttgggcgctgcggctcccgaggtgcggggagcagctgggggtttgcgagctccagtccagcaaggtgcgactccggggagcgaggcggcagcttcgatcctatatcccggaccgtaccagcctgct

SEQ ID NO: 69128 - DNA, 460 bp, Homo sapiens
gcctcggaaaggggctgggccagcgccggggccaggctcgagaaaggctgcgcgaagctacgactggcaaagatgagggaggctgaagcggcccaggggcaggcaggagatgagacgtatcttgacatcttccgcgacttctccctcatggcgtcagacgacccggagaagctgagccgtcgcagtcatgacctccacacgctgtgacccgaggcccacggggcccgcgcctgcctcccttccccgccaccgggccctctgccattaaagcctccgtgcttcgctcttcccttctggttcacttcttgggcgccaccttcgggcccgtagggtgttgggcgctgcggctcccgaggtgcggggagcagctgggggtttgcgagctccagtccagcaaggtgcgactccggggagcgaggcggcagcttcgatcctatatcccggaccgtaccagcctgct

SEQ ID NO: 69129 - DNA, 486 bp, Homo sapiens
gcctcggaaaggggctgggccagcgccggggccaggctcgagaaaggctgcgcgaagtgtgcactgggacgtggagtagaaggctacgactggcaaagatgagggaggctgaagcggcccaggggcaggcaggagatgagacgtatcttgacatcttccgcgacttctccctcatggcgtcagacgacccggagaagctgagccgtcgcagtcatgacctccacacgctgtgacccgaggcccacggggcccgcgcctgcctcccttccccgccaccgggccctctgccattaaagcctccgtgcttcgctcttcccttctggttcacttcttgggcgccaccttcgggcccgtagggtgttgggcgctgcggctcccgaggtgcggggagcagctgggggtttgcgagctccagtccagcaaggtgcgactccggggagcgaggcggcagcttcgatcctatatcccggaccgtaccagcctgct

SEQ ID NO: 69130 - DNA, 750 bp, Homo sapiens
taaattgtagcaatagacattttattagaaaaagaattttactgccatctgctggaaagttgtcttcataactatatgaaatctgggttgtccaagataggaatagcatcctttagatgttccaatctgcacaattgtccacccttctctggaatgtctcgtggaacagtcagcccaggtgtctgtcctctcagtaagatcctcatgggcaaaaagcacagcctctcttccgtccctcatcctaaagctgcctatgtctgtaatgatttccttctcttacagacgctggttcaccattcagagcaaccaactggtttaccagaagaagtacaaggtgagtggacctgggtcctggatgcctgggccccagggagactcagctcttgcctgcagctggacatctggccccttatcaccttatcctgccaggaccctgtgactgtggtggtggatgaccttcgtctctgcacagtgaaactctgccctgactcagaaaggcggttctgctttgaggtggtgtccaccagcaagtgagtgcaatccccaggggtgatactctaatatatctaaacaactgccaatctgaaaggcagggcccaccacaatggaggccccccatgcagctccagactttaatttaattctttggcggctggactggggggccattgtggaagagggtacagggtgatgggggatatttaggagaatattaccaactggtacagaagtctttcaatgcaactggaa

SEQ ID NO: 69131 - DNA, 446 bp, Homo sapiens
ttccagcagggccatgaggagctgagccggctgtcccagtatcgaaaggagctgggcgcccaggtggggccccagggcacagcaggtggtagagggaggttagggactcctaactggggggccttggacatctgagatgcccttcctgtgcccagttgcaccagctggtcttgaattcagcacgagagaagagggacatggagcagagacacgtgctgctgaaacagaaggtgaggggccaggtgcggtggcccacgaccgtcatcccaacatgttgggaggctgaggtgggaagattgcttgaggcctggagttcaagattagcctaggcatcgtagtgaaactccatctctacagaaaattttaaaattagctggtgtggtggcatgcacctctagttctagctactcaggaggctgaggtgggaggattgcttgagcccagga

SEQ ID NO: 69132 - DNA, 518 bp, Homo sapiens
agcttgtactatggatttatatatgaatacatgcaaagagctagagccaagcctagcttggttacagttagctgtaaccccttccacactcctgattaccacactccaccctcccattctctgaactggcgccaccctaagacatcttgaaatccaccactagggatgccaccctcaaccccccttctcgacttctccatgcagaattctcttctggcctgtgagtttctcctccagaacggggcgaacgtgaaccaagcggacagtgcgggccggggcccgctgcaccacgcaaccattcttggccacacggggtagggatgatggcatggggaggaaggctgggagaagttgggcggccggctgaccctggctcttctctccaggctcgcctgcctgttcctgaaacggggagctgatctgggggctcgagactctgaaggcagggaccctctgaccatcgccatggaaacagccaacgctgacatcgtcaccctgtaagaatgcctgaaggggcg

SEQ ID NO: 69133 - DNA, 832 bp, Homo sapiens
cccagcactgcctggaagtgtggggtgagagctcctcctaggacacccctttccccttggggaaagaattgtgcccccaggcccttccccgcggaggtccctctcctccttccccctcatctccccttcctgggacagaaagtgcctccacctgcatccccaggggcccggcctccagggcccgctggccccacagcaggcaagctgagatgacggtcaagctggatttcgaggagtgtctcaaggactcaccccgtttccgagcctctattgagctggtggaagccgaagtgtcagaattggagacccgtctggaaaagctcctgaaactgggcactggtctcctggaaagtgggcgccattaccttgctgccagccgcgccttcgttgtcggcatttgtgacctggcccgcctgggtccaccagagcccatgatggcggagtgtctggaaaaattcaccgtgagcctgaaccacaagctggacagccatgcggagcttctagatgccacccaacacacactgcagcagcagatccagaccctggtcaaggagtgagatggggccgggcgcagtggctcatgcctgtaatcccaacactttggaaggccaaggcgggaggattgcttgagcccaggagttggacaccaacctagccaacatggcgaaactgtctccacaaaaaatacaaaaattaggccgggcacggtggctcatgcctatgatcccggcattttgggaggccaaggcgggcggatcacctgaggtcgggagttcgagaccagcctgtctaacatggcaaaaccccagctctactaaaaaatacgaaaaaa

SEQ ID NO: 69134 - DNA, 2682 bp, Homo sapiens
cccagcactgcctggaagtgtggggtgagagctcctcctaggacacccctttccccttggggaaagaattgtgcccccaggcccttccccgcggaggtccctctcctccttccccctcatctccccttcctgggacagaaagtgcctccacctgcatccccaggggcccggcctccagggcccgctggccccacagcaggcaagctgagatgacggtcaagctggatttcgaggagtgtctcaaggactcaccccgtttccgagcctctattgagctggtggaagccgaagtgtcagaattggagacccgtctggaaaagctcctgaaactgggcactggtctcctggaaagtgggcgccattaccttgctgccagccgcgccttcgttgtcggcatttgtgacctggcccgcctgggtccaccagagcccatgatggcggagtgtctggaaaaattcaccgtgagcctgaaccacaagctggacagccatgcggagcttctagatgccacccaacacacactgcagcagcagatccagaccctggtcaaggaaggtctgcggggtttccgagaggctcgccgggatttctggcggggggctgagagcctggaggctgccctgacccacaacgcagaggttcccaggcgccgggcccaggaggcagaagaggcaggagctgctttgaggacggctcgagctgggtaccggggacgggcactggattatgccctgcagatcaacgtgattgaggacaagaggaagtttgacatcatggagtttgtgctgcgtttggtggaggcccaggctacccatttccagcagggccatgaggagctgagccggctgtcccagtatcgaaaggagctgggcgcccagttgcaccagctggtcttgaattcagcacgagagaagagggacatggagcagagacacgtgctgctgaaacagaaggagctgggtggggaggagccagaaccaagcttaagagaggggcctggtggcctggtgatggaaggacatctcttcaaacgggccagcaacgcatttaagacctggagcagacgctggttcaccattcagagcaaccaactggtttaccagaagaagtacaaggaccctgtgactgtggtggtggatgaccttcgtctctgcacagtgaaactctgccctgactcagaaaggcggttctgctttgaggtggtgtccaccagcaagtcctgcctcctccaggctgactcagagcgcctcctgcagctgtgggtcagtgctgtgcagagcagcattgcttctgccttcaagtcaggctcgccttgatgacagcccccggggtccaggccagggctcaggacacctggccataggctctgctgccaccctgggctctggtggaatggccaggggaagggagcctgggggagtcgggcacgtggtggcccaggtccagagtgtggatggcaatgcccagtgctgcgactgccgggagccagccccggagtgggccagcatcaaccttggtgtcaccctctgcattcagtgttccggcatccacaggagccttggtgttcacttctccaaagtccggtctctgacccttgactcatgggagccagaactagtgaagctcatgtgtgagctgggaaatgtcatcatcaaccagatctatgaggcccgcgtggaggccatggcagtgaagaaaccagggcccagctgctcccggcaggagaaggaggcctggattcacgctaaatacgtggagaagaagttcctgaccaagctgcctgagattcgagggcgaagaggtggccgggggcgcccaagggggcagcctcctgtgcccccaaagccttccatcaggccccggccagggagcttgagatccaagccagagcccccctctgaggacctgggaagcctgcaccctggggccctactgtttcgagcgtctgggcatcctccatctcttcccaccatggctgatgcccttgcccatggagctgatgtcaactgggtcaatgggggccaagataatgccacaccgctgatccaggccacagctgctaattctcttctggcctgtgagtttctcctccagaacggggcgaacgtgaaccaagcggacagtgcgggccggggcccgctgcaccacgcaaccattcttggccacacggggctcgcctgcctgttcctgaaacggggagctgatctgggggctcgagactctgaaggcagggaccctctgaccatcgccatggaaacagccaacgctgacatcgtcaccctgctacgactggcaaagatgagggaggctgaagcggcccaggggcaggcaggagatgagacgtatcttgacatcttccgcgacttctccctcatggcgtcagacgacccggagaagctgagccgtcgcagtcatgacctccacacgctgtgacccgaggcccacggggcccgcgcctgcctcccttccccgccaccgggccctctgccattaaagcctccgtgcttcgctcttcaaaaaaaaaaaaaaagaaaaaacagagagcaagaagcaaagaagcgggaagaagaagagagggagcgggcgagcagcgcccagccacgaggagaagaccagaggagagaaaagaggaaggaggggcgagcagaaggcagaggggtgcaccgagtcaccgaacgaggg

SEQ ID NO: 69135 - DNA, 2731 bp, Homo sapiens
cccagcactgcctggaagtgtggggtgagagctcctcctaggacacccctttccccttggggaaagaattgtgcccccaggcccttccccgcggaggtccctctcctccttccccctcatctccccttcctgggacagaaagtgcctccacctgcatccccaggggcccggcctccagggcccgctggccccacagcaggcaagctgagatgacggtcaagctggatttcgaggagtgtctcaaggactcaccccgtttccgacagaccagatggacccaagctctcttcccatgaccccctctttcccagagcctctattgagctggtggaagccgaagtgtcagaattggagacccgtctggaaaagctcctgaaactgggcactggtctcctggaaagtgggcgccattaccttgctgccagccgcgccttcgttgtcggcatttgtgacctggcccgcctgggtccaccagagcccatgatggcggagtgtctggaaaaattcaccgtgagcctgaaccacaagctggacagccatgcggagcttctagatgccacccaacacacactgcagcagcagatccagaccctggtcaaggaaggtctgcggggtttccgagaggctcgccgggatttctggcggggggctgagagcctggaggctgccctgacccacaacgcagaggttcccaggcgccgggcccaggaggcagaagaggcaggagctgctttgaggacggctcgagctgggtaccggggacgggcactggattatgccctgcagatcaacgtgattgaggacaagaggaagtttgacatcatggagtttgtgctgcgtttggtggaggcccaggctacccatttccagcagggccatgaggagctgagccggctgtcccagtatcgaaaggagctgggcgcccagttgcaccagctggtcttgaattcagcacgagagaagagggacatggagcagagacacgtgctgctgaaacagaaggagctgggtggggaggagccagaaccaagcttaagagaggggcctggtggcctggtgatggaaggacatctcttcaaacgggccagcaacgcatttaagacctggagcagacgctggttcaccattcagagcaaccaactggtttaccagaagaagtacaaggaccctgtgactgtggtggtggatgaccttcgtctctgcacagtgaaactctgccctgactcagaaaggcggttctgctttgaggtggtgtccaccagcaagtcctgcctcctccaggctgactcagagcgcctcctgcagctgtgggtcagtgctgtgcagagcagcattgcttctgccttcaagtcaggctcgccttgatgacagcccccggggtccaggccagggctcaggacacctggccataggctctgctgccaccctgggctctggtggaatggccaggggaagggagcctgggggagtcgggcacgtggtggcccaggtccagagtgtggatggcaatgcccagtgctgcgactgccgggagccagccccggagtgggccagcatcaaccttggtgtcaccctctgcattcagtgttccggcatccacaggagccttggtgttcacttctccaaagtccggtctctgacccttgactcatgggagccagaactagtgaagctcatgtgtgagctgggaaatgtcatcatcaaccagatctatgaggcccgcgtggaggccatggcagtgaagaaaccagggcccagctgctcccggcaggagaaggaggcctggattcacgctaaatacgtggagaagaagttcctgaccaagctgcctgagattcgagggcgaagaggtggccgggggcgcccaagggggcagcctcctgtgcccccaaagccttccatcaggccccggccagggagcttgagatccaagccagagcccccctctgaggacctgggaagcctgcaccctggggccctactgtttcgagcgtctgggcatcctccatctcttcccaccatggctgatgcccttgcccatggagctgatgtcaactgggtcaatgggggccaagataatgccacaccgctgatccaggccacagctgctaattctcttctggcctgtgagtttctcctccagaacggggcgaacgtgaaccaagcggacagtgcgggccggggcccgctgcaccacgcaaccattcttggccacacggggctcgcctgcctgttcctgaaacggggagctgatctgggggctcgagactctgaaggcagggaccctctgaccatcgccatggaaacagccaacgctgacatcgtcaccctgctacgactggcaaagatgagggaggctgaagcggcccaggggcaggcaggagatgagacgtatcttgacatcttccgcgacttctccctcatggcgtcagacgacccggagaagctgagccgtcgcagtcatgacctccacacgctgtgacccgaggcccacggggcccgcgcctgcctcccttccccgccaccgggccctctgccattaaagcctccgtgcttcgctcttcaaaaaaaaaaaaaaagaaaaaacagagagcaagaagcaaagaagcgggaagaagaagagagggagcgggcgagcagcgcccagccacgaggagaagaccagaggagagaaaagaggaaggaggggcgagcagaaggcagaggggtgcaccgagtcaccgaacgaggg

SEQ ID NO: 69136 - DNA, 2191 bp, Homo sapiens
cccagcactgcctggaagtgtggggtgagagctcctcctaggacacccctttccccttggggaaagaattgtgcccccaggcccttccccgcggaggtccctctcctccttccccctcatctccccttcctgggacagaaagtgcctccacctgcatccccaggggcccggcctccagggcccgctggccccacagcaggcaagctgagatgacggtcaagctggatttcgaggagtgtctcaaggactcaccccgtttccgagcctctattgagctggtggaagccgaagtgtcagaattggagacccgtctggaaaagctcctgaaactgggcactggtctcctggaaagtgggcgccattaccttgctgccagccgcgccttcgttgtcggcatttgtgacctggcccgcctgggtccaccagagcccatgatggcggagtgtctggaaaaattcaccgtgagcctgaaccacaagctggacagccatgcggagcttctagatgccacccaacacacactgcagcagcagatccagaccctggtcaaggaaggtctgcggggtttccgagaggctcgccgggatttctggcggggggctgagagcctggaggctgccctgacccacaacgcagaggttcccaggcgccgggcccaggaggcagaagaggcaggagctgctttgaggacggctcgagctgggtaccggggacgggcactggattatgccctgcagatcaacgtgattgaggacaagaggaagtttgacatcatggagtttgtgctgcgtttggtggaggcccaggctacccatttccagcagggccatgaggagctgagccggctgtcccagtatcgaaaggagctgggcgcccagttgcaccagctggtcttgaattcagcacgagagaagagggacatggagcagagacacgtgctgctgaaacagaaggagctgggtggggaggagccagaaccaagcttaagagaggggcctggtggcctggtgatggaaggacatctcttcaaacgggccagcaacgcatttaagacctggagcagacgctggttcaccattcagagcaaccaactggtttaccagaagaagtacaaggaccctgtgactgtggtggtggatgaccttcgtctctgcacagtgaaactctgccctgactcagaaaggcggttctgctttgaggtggtgtccaccagcaagtcctgcctcctccaggctgactcagagcgcctcctgcagctgtgggtcagtgctgtgcagagcagcattgcttctgccttcaagtcaggctcgccttgatgacagcccccggggtccaggccagggctcaggacacctggccataggctctgctgccaccctgggctctggtggaatggccaggggaagggagcctgggggagtcgggcacgtggtggcccaggtccagagtgtggatggcaatgcccagtgctgcgactgccgggagccagccccggagtgggccagcatcaaccttggtgtcaccctctgcattcagtgttccggcatccacaggttactccacaaggcccatgcgggagccccactccttcgggccacagtgcggctccaatacagagcgcatcacaccggcccctcttccttccctgtcctggcttcctctcttagcttctggctttgtcactgggtaccaggcctgggcccaagcctctggggtgccagttggacccaggcgggcctagcccctctgtgtcctagtctggccagaattgggggatacccagaatttgttggcttggttggaagaagtgtggggtcaaggctgctgagggtgggggagccagtgaagactaggcagagaaacggtcatgaggccttagcaagtatctaaggccctcgccccccacctcagtgtggtggaagggaggtgacatgggagaggttgtccaggccaaagtgtcacaagtgtcactagagaagggaggtggctggagtgatgagggccttgaaatgaaacctaaggaagaaggaatggtgacgaggcagagtcctgccagggccaggtcaaggctacatggcggttacatggccgcagctgccctgcctcctgggccagcacctctgcacgggcccccatgccagccttgcctcccagtgtcttcaggagcagcagcagctccccaggccactgc

SEQ ID NO: 69137 - DNA, 1171 bp, Homo sapiens
tgagacagtctcgctctgtcccccaggctggagtgcaatggtgcgatctcggctcactgcaagctccgcctcccgggttcacaccattctcctgcctcagctgcctgagtagctgggactacaggcgccagccagcatgcccggctaattttttgtattgttagtagagatagggtttcaccgtgttagccaggatggtctggatctcctgaccttgtgatccacccgcctcggcctcccaaagtgctgggattactggcgtgagccactgtgcccggcctacaggagacttttaacaagttattaacctctcagcctcatctgtaaaatagtaacatacctcaaaagcttgtactatggatttatatatgaatacatgcaaagagctagagccaagcctagcttggttacagttagctgtaaccccttccacactcctgattaccacactccaccctcccattctctgaactggcgccaccctaagacatcttgaaatccaccactagggatgccaccctcaaccccccttctcgacttctccatgcagaattctcttctggcctgtgagtttctcctccagaacggggcgaacgtgaaccaagcggacagtgcgggccggggcccgctgcaccacgcaaccattcttggccacacggggctcgcctgcctgttcctgaaacggggagctgatctgggggctcgagactctgaaggcagggaccctctgaccatcgccatggaaacagccaacgctgacatcgtcaccctgctacgactggcaaagatgagggaggctgaagcggcccaggggcaggcaggagatgagacgtatcttgacatcttccgcgacttctccctcatggcgtcagacgacccggagaagctgagccgtcgcagtcatgacctccacacgctgtgacccgaggcccacggggcccgcgcctgcctcccttccccgccaccgggccctctgccattaaagcctccgtgcttcgctcttcaaaaaaaaaaaaaaagaaaaaacagagagcaagaagcaaagaagcgggaagaagaagagagggagcgggcgagcagcgcccagccacgaggagaagaccagaggagagaaaagaggaaggaggggcgagcagaaggcagaggggtgcaccgagtcaccgaacgaggg

SEQ ID NO: 69138 - DNA, 589 bp, Homo sapiens
tggagatggggcaccctttaccctaggccccttggccaccctttcttcccctctctcccccagggctcaggacacctggccataggctctgctgccaccctgggctctggtggaatggccaggggaagggagcctgggggagtcgggcacgtggtggcccaggtccagagtgtggatggcaatgcccagtgctgcgactgccgggagccagccccggagtgggccagcatcaaccttggtgtcaccctctgcattcagtgttccggcatccacaggttactccacaaggcccatgcgggagccccactccttcgggccacagtgcggctccaatacagagcgcatcacaccggcccctcttccttccctgtcctggcttcctctcttagcttctggctttgtcactgggtaccaggcctgggcccaagcctctggggtgccagttggacccaggcgggcctagcccctctgtgtcctagtctggccagaattgggggatacccagaatttgttggcttggttggaagaagtgtggggtcaaggctgctgagggtgggggagccagtgaagactaggcagagaaacggtc

SEQ ID NO: 69139 - DNA, 570 bp, Homo sapiens
gcaagagcaagggctgcagccatggaggacccttcagagtccctcaaggctgtgtttggcctgggacattccacaggcacgatgagcatgaagaagaggttctgagaggaccttgtgtgccaccctgacctcatgcacaccctgctggatgaccacaaaaaaggaacagatcccaccacctacacctggggaaccctgagaccagccctccctgcacacccagggacgctccagaccaggtcctgacccacgcacggggatatggggaccagaggcccacccacacactcagggacataggaaccagagccaactgtccttgtcctcttctaccatgtacctcaggagcttaaggcagtggcttatgtgcctggaaaagcagaagattgcagaaatcgtgttttggagggaaatgaacttgcaggggttttttggtgacaggaaatgctgttccctgcctggatcttaaatttgtttgcgaagcatctttctgaaggtggtctgtctttcaagggtcagagctttgttttccaaattcaaaattataattgattttcatgctatcacaca

SEQ ID NO: 69140 - DNA, 436 bp, Homo sapiens
taagaactgtttttctaacagtttcttatattaattatattgttgttttaaaaattggatttttaagacctcataataataagaggcagtttttatacttgcagattttaaaactaagaatgagaattccaaaactgtaaaattaatataaatgtttgcattactgtgaagataaagttacattcagtttatcaggacttttatggtattgcaattcatgatttctttaaataagtttgtctactttatgtacaaaatatatacttctctgaaactggttttagatgtgttatcctttatatttttataaatttcattgtataggtagattataagaattaaatgtgaagaaattgatttccacagaatgtactatgaaaatttgtaagaaagagtagttttaggtgtaattattaataaaaatctctgaaacact

SEQ ID NO: 69141 - DNA, 474 bp, Homo sapiens
gtgtgaagtaggcttttagttgcagttttggcaagaggctttaagacttaaggcacgtgggattttgacctaaaagtttaggatatctttgtccagagaaattggtaatttctatagagacaatgtgcaatactgggctttaagcacatatgcgcaggcctcaatgaagcagagtttgagtgagggtgatggagacatattggcttcagcaaagacagagaatctggaagtggggctcacccaaatgctggcctcatggatgtcctcaccagatgccagcccaaggtgaggcttagcaagctactgtagtggtgctggcatcaacaaaggcactggcatgtgcaagtggtctcatgcaggctactgcagcttgaccttggcctacattaaatatgcatgtgtgagcagcaaaggcctcactcatcagatgctgctaactcgacaccagaaaacaattttattcgtggcaaggat

SEQ ID NO: 69142 - DNA, 334 bp, Homo sapiens
taaaataactaactttttttggtataaagtacgagacacccacacccctatctacccctcctccctgtgggtccgaaccccggcccccccacccctccctcagcccaccagggtccagggagatgttcgttctcgctttaagtcaggagtcacaaatgactttttttttttcaattaaggaaaaagctccatctctacctttaacatcacccagacccccgcccctgcccgtgccccacgctgctgctaacgacagtatgatgcttactctgctactcggaaactatttttatgtaattaatgtatgctttcttgtttataaatgcctgattta

SEQ ID NO: 69143 - DNA, 348 bp, Homo sapiens
cccctagccacggggggctactagtccacggttggctatgtgtgaggcccttcatctaagtgattgtgtattcagtttaattctcattatatttctatactgaaagaagatttttaacgaagggaaaaacaacagcaataacattcatatctctggagcagctaactcatacacgtaatgtctgcttttcgtacagaactagccaatgtaaaaacagttcacctgtaaatactttttcctttttcaccgttgtattatacatgtatatgctgggtcctttttcagaaactcttttcttacctgagagttgtcttgttttctgggctgtttttaactgaggaaaaaaaa

SEQ ID NO: 69144 - DNA, 4360 bp, Homo sapiens
gggagagtgggtcttggtgctccatcccaaacctgctgcagccgtgggtgaggtcacccggaatggcaggacaaggtccactctgttctctcggagatgacttgtccctcagcacagcctccacgtgcctgttgcgcgtggcctaagggcctttatgcaaagtggacttggtctcctggggggtgccctggaatctgccttctgcgccactcagggtcgtttgtggccggagtgcatggggctctgactgccatgtgccagccacggggctggtggagggaccctgccctgggaaccacaggtgccaacaaaacctttcattgatcgcaggtctcctctgagcctccggcctccataagacccaaaacagatgacacctcttcccagtcccccgcgccttccgaaaaggacaagccgtccagctggctgcggaccttggccggctcttccaataagagcctgggctgtgttcaccctcgccagcgcctctctgctttccgaccctggtcccccgcagtgtcagcgagtgagaaagagctctccccacacctcccggccctcatccgagacagcttctactcctacaagagctttgagacagccgtggcgcccaacgtggccctcgcaccgccggcccagcagaaggttgtgagcagccctccgtgtgccgccgccgtctcccgggcccccgagcctctcgccacttgcacccagcctcggaagcggaagctgactgtggacaccccaggagccccagagacgctggcgcccgtggctgccccagaggaggacaaggactcggaggcggaggtggaagttgaaagcagggaggaattcacctcctccttgtcctcgctctcttccccgtcctttacctcatccagctccgccaaggacctgggctccccgggtgcgcgtgccctgccctcggccgtccctgatgctgcggcccctgccgacgcccccagtgggctggaggcggagctggagcacctgcggcaggcactggagggcggcctggacaccaaggaagccaaagagaagttcctgcatgaggtggtcaagatgcgcgtgaagcaggaggagaagctcagcgcagccctgcaggccaagcgcagcctccaccaggagctggagttcctacgcgtggccaagaaggagaagctgcgggaggccacggaggccaagcgtaacctgcggaaggagatcgagcgtctccgcgccgagaacgagaagaagatgaaagaggccaacgagtcacggctgcgcctgaagcgggagctggagcaggcgcggcaggcccgggtgtgcgacaagggctgcgaggcgggccgcctgcgcgccaagtactcggcccagatcgaagacctgcaggtgaagctgcagcacgcggaggcggaccgggagcagctgcgggccgacctgctgcgggagcgcgaggcccgggagcacctggagaaggtggtgaaggagctgcaggaacagctgtggccgcgggcccgccccgaggctgcgggcagcgagggcgctgcggagctggagccgtagattccgtgcctgccgccgcagcgccgccgacaacgcgggtgcaggggggcgcggctgggcggtgcagctccgcccggctccgcccctgcagcccacacagcacaacgtcttaccgtgcctattaccaagcgagtgtttgtaaccatgtagttttggaacccactgcaaaattttctactggccaagttcaagtgagtaagccgcgtcccccaactacagctggagacggggccagctcggcggcctgctggtcctctgcttgctggaacattctaacatttacacttttgttataagctatttaaaaccagtaaggagacttgaaattcagaaaatcaacacatttttaaatgactaacttctaaaagccccaacacatgacgccatctgaagacccgcaacggagtgggggtggcggccgccccaccctccccacccggggaagccatcacagctcatctgcccgcggctgcgtgaggacagcaggggtttttcttcagagtctattttttcagcgacaaggacccaggtcttcctgctgctgccagggagagcagggacagtgccgcgtgcgagatgagctcgaacactgcccgccttactgccgcctaccccgcccgccacgccgccgtcgatgccagcgctgtccccacgggtaccaggaagtgcagagccgcacaggagctgccccggagctgaggggacggtcttcggctcctctgcaccccgtgattctgcccacgctcctccaccacgaggcactgacctgcgtcgggtggtgaccgtggctggcggtcacgccctcagcccctccgggcacacgtgccgcctgaccgggcgacccttttcagttcggcaaacgtcgctcccttcattttgggactgaggctgcagcattggaacaaaagagcattatttcaatttttctttctttttttttgttcgttcatttaaacgtatatttagaactgcactttgtccacaaccttcccttctctttctattccccagtgaactgaggtttttaccgatttatagagcagtcaaatccgaagtgctcgagtgcttagaaaccccctctggtgcttggttgaacaagggaatcacaagaaaacgaaaatgcaaaaactgaacttcgggggtcgttctgtgccttccagcatcttgtacagcaaatcctgactcgtgtctttttacccccaagatatctgtcttcagtagcgactgaatctgccactctcagaataagttccttgcatttattccaaataatctcgtttactctcacctgtttatgcaaattgtataaggtttcttatgcccaagcttgaaaaatgatttcccagtagacaagaggcggctacctatcctacagttacggtatttatttacataagaagatcttacaggagttctttgcttgaatccgttctaacacccgcggcagctgcacgcgctcacagaaggtggaggttacttgcccaggtacagacgacctcggggcagtgacgagcaaagaccagagactgctgagccctcgcatctgggtggcggaattgcctgcggggttttgcccttggtttactgaggggggtcttggttgctgctgaagccccccaccccttctaaagtgcaatgcaaaagggacatcatgtatatgcagcgtttgtttggaattttctttgcttttgttttctttgcggttgttctgtgtgcatggattccacacctctgccgtaggtagatccgtcagcgggcattattaccgtgtcttgtaaaagggtcggttttgttatgcaacacgcagaatgctgtttttagccttgttttaccagagttgttttttttttcagttatttcttcaagggaaactaaatgatttagttggagcaaagctttaagtgtgttggcgtgcttctgtgtggctgtcctgtgtcgccaggtcgaagatcacagtgaggtagaggccctgccccatccccagggccgccaggcttgctccgtttgctttgagtttttagaccccagagggagatgagcttttccaagctgtgtctgggccagagcctctccttgcccttgctccatcccgacggtcaccgttgggtccacgcctccaccgccccatcttgccccaaacggaaagcgctgtatctgcagtggcagcccttccccacttcggctctgggagggtccagccagtgtcacctgggcccaccctttcctgcagctgccaggcccgtgcggtcagtgggacccggacgtgggcaggcgagctcgggaccctcccaggcagttcccacagctcttgcctcggctcaccagggtcacttccactgtcaggggcctgagggggcagctgtggctgcagggctgctctggactgaggggtcccaggccccgaggggtgcacgcctggctccccttggcacaggtgcgagtccgtttcttttcagcagaagggggaagaggtgtccgctgtgtgggctgctgactcctctgtgtgtgaggcccttcatctaagtgattgtgtattcagtttaattctcattatatttctatactgaaagaagatttttaacgaagggaaaaacaacagcaataacattcatatctctggagcagctaactcatacacgtaatgtctgcttttcgtacagaactagccaatgtaaaaacagttcacctgtaaatactttttcctttttcaccgttgtattatacatgtatatgctgggtcctttttcagaaactcttttcttacctgagagttgtcttgttttctgggctgtttttaactgaggaaaaaaaa

SEQ ID NO: 69145 - DNA, 4118 bp, Homo sapiens
  misc_feature (1)..(1): n is a, c, g, or t
  misc_feature (12)..(12): n is a, c, g, or t
  misc_feature (30)..(31): n is a, c, g, or t
nattcggcacgngggggggcgcggtggggnngggccttggtcgcgtcgtgtctgctcttgtgcaccagtgcctcacggagaggctgtggtctcctctgagcctccggcctccataagacccaaaacagatgacacctcttcccagtcccccgcgccttccgaaaaggacaagccgtccagctggctgcggaccttggccggctcttccaataagagcctgggctgtgttcaccctcgccagcgcctctctgctttccgaccctggtcccccgcagtgtcagcgagtgagaaagagctctccccacacctcccggccctcatccgagacagcttctactcctacaagagctttgagacagccgtggcgcccaacgtggccctcgcaccgccggcccagcagaaggttgtgagcagccctccgtgtgccgccgccgtctcccgggcccccgagcctctcgccacttgcacccagcctcggaagcggaagctgactgtggacaccccaggagccccagagacgctggcgcccgtggctgccccagaggaggacaaggactcggaggcggaggtggaagttgaaagcagggaggaattcacctcctccttgtcctcgctctcttccccgtcctttacctcatccagctccgccaaggacctgggctccccgggtgcgcgtgccctgccctcggccgtccctgatgctgcggcccctgccgacgcccccagtgggctggaggcggagctggagcacctgcggcaggcactggagggcggcctggacaccaaggaagccaaagagaagttcctgcatgaggtggtcaagatgcgcgtgaagcaggaggagaagctcagcgcagccctgcaggccaagcgcagcctccaccaggagctggagttcctacgcgtggccaagaaggagaagctgcgggaggccacggaggccaagcgtaacctgcggaaggagatcgagcgtctccgcgccgagaacgagaagaagatgaaagaggccaacgagtcacggctgcgcctgaagcgggagctggagcaggcgcggcaggcccgggtgtgcgacaagggctgcgaggcgggccgcctgcgcgccaagtactcggcccagatcgaagacctgcaggtgaagctgcagcacgcggaggcggaccgggagcagctgcgggccgacctgctgcgggagcgcgaggcccgggagcacctggagaaggtggtgaaggagctgcaggaacagctgtggccgcgggcccgccccgaggctgcgggcagcgagggcgctgcggagctggagccgtagattccgtgcctgccgccgcagcgccgccgacaacgcgggtgcaggggggcgcggctgggcggtgcagctccgcccggctccgcccctgcagcccacacagcacaacgtcttaccgtgcctattaccaagcgagtgtttgtaaccatgtagttttggaacccactgcaaaattttctactggccaagttcaagtgagtaagccgcgtcccccaactacagctggagacggggccagctcggcggcctgctggtcctctgcttgctggaacattctaacatttacacttttgttataagctatttaaaaccagtaaggagacttgaaattcagaaaatcaacacatttttaaatgactaacttctaaaagccccaacacatgacgccatctgaagacccgcaacggagtgggggtggcggccgccccaccctccccacccggggaagccatcacagctcatctgcccgcggctgcgtgaggacagcaggggtttttcttcagagtctattttttcagcgacaaggacccaggtcttcctgctgctgccagggagagcagggacagtgccgcgtgcgagatgagctcgaacactgcccgccttactgccgcctaccccgcccgccacgccgccgtcgatgccagcgctgtccccacgggtaccaggaagtgcagagccgcacaggagctgccccggagctgaggggacggtcttcggctcctctgcaccccgtgattctgcccacgctcctccaccacgaggcactgacctgcgtcgggtggtgaccgtggctggcggtcacgccctcagcccctccgggcacacgtgccgcctgaccgggcgacccttttcagttcggcaaacgtcgctcccttcattttgggactgaggctgcagcattggaacaaaagagcattatttcaatttttctttctttttttttgttcgttcatttaaacgtatatttagaactgcactttgtccacaaccttcccttctctttctattccccagtgaactgaggtttttaccgatttatagagcagtcaaatccgaagtgctcgagtgcttagaaaccccctctggtgcttggttgaacaagggaatcacaagaaaacgaaaatgcaaaaactgaacttcgggggtcgttctgtgccttccagcatcttgtacagcaaatcctgactcgtgtctttttacccccaagatatctgtcttcagtagcgactgaatctgccactctcagaataagttccttgcatttattccaaataatctcgtttactctcacctgtttatgcaaattgtataaggtttcttatgcccaagcttgaaaaatgatttcccagtagacaagaggcggctacctatcctacagttacggtatttatttacataagaagatcttacaggagttctttgcttgaatccgttctaacacccgcggcagctgcacgcgctcacagaaggtggaggttacttgcccaggtacagacgacctcggggcagtgacgagcaaagaccagagactgctgagccctcgcatctgggtggcggaattgcctgcggggttttgcccttggtttactgaggggggtcttggttgctgctgaagccccccaccccttctaaagtgcaatgcaaaagggacatcatgtatatgcagcgtttgtttggaattttctttgcttttgttttctttgcggttgttctgtgtgcatggattccacacctctgccgtaggtagatccgtcagcgggcattattaccgtgtcttgtaaaagggtcggttttgttatgcaacacgcagaatgctgtttttagccttgttttaccagagttgttttttttttcagttatttcttcaagggaaactaaatgatttagttggagcaaagctttaagtgtgttggcgtgcttctgtgtggctgtcctgtgtcgccaggtcgaagatcacagtgaggtagaggccctgccccatccccagggccgccaggcttgctccgtttgctttgagtttttagaccccagagggagatgagcttttccaagctgtgtctgggccagagcctctccttgcccttgctccatcccgacggtcaccgttgggtccacgcctccaccgccccatcttgccccaaacggaaagcgctgtatctgcagtggcagcccttccccacttcggctctgggagggtccagccagtgtcacctgggcccaccctttcctgcagctgccaggcccgtgcggtcagtgggacccggacgtgggcaggcgagctcgggaccctcccaggcagttcccacagctcttgcctcggctcaccagggtcacttccactgtcaggggcctgagggggcagctgtggctgcagggctgctctggactgaggggtcccaggccccgaggggtgcacgcctggctccccttggcacaggtgcgagtccgtttcttttcagcagaagggggaagaggtgtccgctgtgtgggctgctgactcctctgtgtgtgaggcccttcatctaagtgattgtgtattcagtttaattctcattatatttctatactgaaagaagatttttaacgaagggaaaaacaacagcaataacattcatatctctggagcagctaactcatacacgtaatgtctgcttttcgtacagaactagccaatgtaaaaacagttcacctgtaaatactttttcctttttcaccgttgtattatacatgtatatgctgggtcctttttcagaaactcttttcttacctgagagttgtcttgttttctgggctgtttttaactgaggaaaaaaaa

SEQ ID NO: 69146 - DNA, 5052 bp, Homo sapiens
cggggcggcggcgggggccgggggggcccgggcgcgcgggagcgggagcggccgggggagccggagcgcaccatggaggcggcggcaggcggccgcggctgtttccagccgcacccggggctgcagaagacgctggagcagttccacctgagctccatgagctcgctgggcggcccggccgctttctcggcgcgctgggcgcaggaggcctacaagaaggagagcgccaaggaggcgggcgcggccgcggtgccggcgccggtgcccgcagccaccgagccgccgcccgtgctgcacctgcccgccatccagccgccgccgcccgtgctgcccgggcccttcttcatgccgtccgaccgctccaccgagcgctgcgagaccgtactggaaggcgagaccatctcgtgcttcgtggtgggaggcgagaagcgcctgtgtctgccgcagattctcaactcggtgctgcgcgacttctcgctgcagcagatcaacgcggtgtgcgacgagctccacatctactgctcgcgctgcacggccgaccagctggagatcctcaaagtcatgggcatcctgcccttctcggcgccctcgtgcgggctcatcaccaagacggacgccgagcgcctgtgcaacgcgctgctctacggcggcgcctacccgccgccctgcaagaaggagctggccgccagcctggcgctgggcctggagctcagcgagcgcagcgtccgcgtgtaccacgagtgcttcggcaagtgtaaggggctgctggtgcccgagctctacagcagcccgagcgccgcctgcatccagtgcctggactgccgcctcatgtacccgccgcacaagttcgtggtgcactcgcacaaggccctggagaaccggacctgccactggggcttcgactcggccaactggcgggcctacatcctgctgagccaggattacacgggcaaggaggagcaggcgcgcctcggccgctgcctggacgacgtgaaggagaaattcgactatggcaacaagtacaagcggcgggtgccccgggtctcctctgagcctccggcctccataagacccaaaacagatgacacctcttcccagtcccccgcgccttccgaaaaggacaagccgtccagctggctgcggaccttggccggctcttccaataagagcctgggctgtgttcaccctcgccagcgcctctctgctttccgaccctggtcccccgcagtgtcagcgagtgagaaagagctctccccacacctcccggccctcatccgagacagcttctactcctacaagagctttgagacagccgtggcgcccaacgtggccctcgcaccgccggcccagcagaaggttgtgagcagccctccgtgtgccgccgccgtctcccgggcccccgagcctctcgccacttgcacccagcctcggaagcggaagctgactgtggacaccccaggagccccagagacgctggcgcccgtggctgccccagaggaggacaaggactcggaggcggaggtggaagttgaaagcagggaggaattcacctcctccttgtcctcgctctcttccccgtcctttacctcatccagctccgccaaggacctgggctccccgggtgcgcgtgccctgccctcggccgtccctgatgctgcggcccctgccgacgcccccagtgggctggaggcggagctggagcacctgcggcaggcactggagggcggcctggacaccaaggaagccaaagagaagttcctgcatgaggtggtcaagatgcgcgtgaagcaggaggagaagctcagcgcagccctgcaggccaagcgcagcctccaccaggagctggagttcctacgcgtggccaagaaggagaagctgcgggaggccacggaggccaagcgtaacctgcggaaggagatcgagcgtctccgcgccgagaacgagaagaagatgaaagaggccaacgagtcacggctgcgcctgaagcgggagctggagcaggcgcggcaggcccgggtgtgcgacaagggctgcgaggcgggccgcctgcgcgccaagtactcggcccagatcgaagacctgcaggtgaagctgcagcacgcggaggcggaccgggagcagctgcgggccgacctgctgcgggagcgcgaggcccgggagcacctggagaaggtggtgaaggagctgcaggaacagctgtggccgcgggcccgccccgaggctgcgggcagcgagggcgctgcggagctggagccgtagattccgtgcctgccgccgcagcgccgccgacaacgcgggtgcaggggggcgcggctgggcggtgcagctccgcccggctccgcccctgcagcccacacagcacaacgtcttaccgtgcctattaccaagcgagtgtttgtaaccatgtagttttggaacccactgcaaaattttctactggccaagttcaagtgagtaagccgcgtcccccaactacagctggagacggggccagctcggcggcctgctggtcctctgcttgctggaacattctaacatttacacttttgttataagctatttaaaaccagtaaggagacttgaaattcagaaaatcaacacatttttaaatgactaacttctaaaagccccaacacatgacgccatctgaagacccgcaacggagtgggggtggcggccgccccaccctccccacccggggaagccatcacagctcatctgcccgcggctgcgtgaggacagcaggggtttttagcgacaaggacccaggtcttcctgctgctgccagggagagcagggacagtgccgcgtgcgagatgagctcgaacactgcccgccttactgccgcctaccccgcccgccacgccgccgtcgatgccagcgctgtccccacgggtaccaggaagtgcagagccgcacaggagctgccccggagctgaggggacggtcttcggctcctctgcaccccgtgattctgcccacgctcctccaccacgaggcactgacctgcgtcgggtggtgaccgtggctggcggtcacgccctcagcccctccgggcacacgtgccgcctgaccgggcgacccttttcagttcggcaaacgtcgctcccttcattttgggactgaggctgcagcattggaacaaaagagcattatttcaatttttctttctttttttttgttcgttcatttaaacgtatatttagaactgcactttgtccacaaccttcccttctctttctattccccagtgaactgaggtttttaccgatttatagagcagtcaaatccgaagtgctcgagtgcttagaaaccccctctggtgcttggttgaacaagggaatcacaagaaaacgaaaatgcaaaaactgaacttcgggggtcgttctgtgccttccagcatcttgtacagcaaatcctgactcgtgtctttttacccccaagatatctgtcttcagtagcgactgaatctgccactctcagaataagttccttgcatttattccaaataatctcgtttactctcacctgtttatgcaaattgtataaggtttcttatgcccaagcttgaaaaatgatttcccagtagacaagaggcggctacctatcctacagttacggtatttatttacataagaagatcttacaggagttctttgcttgaatccgttctaacacccgcggcagctgcacgcgctcacagaaggtggaggttacttgcccaggtacagacgacctcggggcagtgacgagcaaagaccagagactgctgagccctcgcatctgggtggcggaattgcctgcggggttttgcccttggtttactgaggggggtcttggttgctgctgaagccccccaccccttctaaagtgcaatgcaaaagggacatcatgtatatgcagcgtttgtttggaattttctttgcttttgttttctttgcggttgttctgtgtgcatggattccacacctctgccgtaggtagatccgtcagcgggcattattaccgtgtcttgtaaaagggtcggttttgttatgcaacacgcagaatgctgtttttagccttgttttaccagagttgttttttttttcagttatttcttcaagggaaactaaatgatttagttggagcaaagctttaagtgtgttggcgtgcttctgtgtggctgtcctgtgtcgccaggtcgaagatcacagtgaggtagaggccctgccccatccccagggccgccaggcttgctccgtttgctttgagtttttagaccccagagggagatgagcttttccaagctgtgtctgggccagagcctctccttgcccttgctccatcccgacggtcaccgttgggtccacgcctccaccgccccatcttgccccaaacggaaagcgctgtatctgcagtggcagcccttccccacttcggctctgggagggtccagccagtgtcacctgggcccaccctttcctgcagctgccaggcccgtgcggtcagtgggacccggacgtgggcaggcgagctcgggaccctcccaggcagttcccacagctcttgcctcggctcaccagggtcacttccactgtcaggggcctgagggggcagctgtggctgcagggctgctctggactgaggggtcccaggccccgaggggtgcacgcctggctccccttggcacaggtgcgagtccgtttcttttcagcagaagggggaagaggtgtccgctgtgtgggctgctgactcctctgtgtgtgaggcccttcatctaagtgattgtgtattcagtttaattctcattatatttctatactgaaagaagatttttaacgaagggaaaaacaacagcaataacattcatatctctggagcagctaactcatacacgtaatgtctgcttttcgtacagaactagccaatgtaaaaacagttcacctgtaaatactttttcctttttcaccgttgtattatacatgtatatgctgggtcctttttcagaaactcttttcttacctgagagttgtcttgttttctgggctgtttttaactgaggaaaaaaaa

SEQ ID NO: 69147 - DNA, 1567 bp, Homo sapiens
acctatacggctaggtacgaggctgcgtgttagttactctcacctgtttatgcaaattgtataaggtttcttatgcccaagcttgaaaaatgatttcccagtagacaagaggcggctacctatcctacagttacggtatttatttacataagaagatcttacaggagttctttgcttgaatccgttctaacacccgcggcagctgcacgcgctcacagaaggtggaggttacttgcccaggtacagacgacctcggggcagtgacgagcaaagaccagagactgctgagccctcgcatctgggtggcggaattgcctgcggggttttgcccttggtttactgaggggggtcttggttgctgctgaagccccccaccccttctaaagtgcaatgcaaaagggacatcatgtatatgcagcgtttgtttggaattttctttgcttttgttttctttgcggttgttctgtgtgcatggattccacacctctgccgtaggtagatccgtcagcgggcattattaccgtgtcttgtaaaagggtcggttttgttatgcaacacgcagaatgctgtttttagccttgttttaccagagttgttttttttttcagttatttcttcaagggaaactaaatgatttagttggagcaaagctttaagtgtgttggcgtgcttctgtgtggctgtcctgtgtcgccaggtcgaagatcacagtgaggtagaggccctgccccatccccagggccgccaggcttgctccgtttgctttgagtttttagaccccagagggagatgagcttttccaagctgtgtctgggccagagcctctccttgcccttgctccatcccgacggtcaccgttgggtccacgcctccaccgccccatcttgccccaaacggaaagcgctgtatctgcagtggcagcccttccccacttcggctctgggagggtccagccagtgtcacctgggcccaccctttcctgcagctgccaggcccgtgcggtcagtgggacccggacgtgggcaggcgagctcgggaccctcccaggcagttcccacagctcttgcctcggctcaccagggtcacttccactgtcaggggcctgagggggcagctgtggctgcagggctgctctggactgaggggtcccaggccccgaggggtgcacgcctggctccccttggcacaggtgcgagtccgtttcttttcagcagaagggggaagaggtgtccgctgtgtgggctgctgactcctctgtgtgtgaggcccttcatctaagtgattgtgtattcagtttaattctcattatatttctatactgaaagaagatttttaacgaagggaaaaacaacagcaataacattcatatctctggagcagctaactcatacacgtaatgtctgcttttcgtacagaactagccaatgtaaaaacagttcacctgtaaatactttttcctttttcaccgttgtattatacatgtatatgctgggtcctttttcagaaactcttttcttacctgagagttgtcttgttttctgggctgtttttaactgaggaaaaaaaa

SEQ ID NO: 69148 - DNA, 3110 bp, Homo sapiens
cggggcggcggcgggggccgggggggcccgggcgcgcgggagcgggagcggccgggggagccggagcgcaccatggaggcggcggcaggcggccgcggctgtttccagccgcacccggggctgcagaagacgctggagcagttccacctgagctccatgagctcgctgggcggcccggccgctttctcggcgcgctgggcgcaggaggcctacaagaaggagagcgccaaggaggcgggcgcggccgcggtgccggcgccggtgcccgcagccaccgagccgccgcccgtgctgcacctgcccgccatccagccgccgccgcccgtgctgcccgggcccttcttcatgccgtccgaccgctccaccgagcgctgcgagaccgtactggaaggcgagaccatctcgtgcttcgtggtgggaggcgagaagcgcctgtgtctgccgcagattctcaactcggtgctgcgcgacttctcgctgcagcagatcaacgcggtgtgcgacgagctccacatctactgctcgcgctgcacggccgaccagctggagatcctcaaagtcatgggcatcctgcccttctcggcgccctcgtgcgggctcatcaccaagacggacgccgagcgcctgtgcaacgcgctgctctacggcggcgcctacccgccgccctgcaagaaggagctggccgccagcctggcgctgggcctggagctcagcgagcgcagcgtccgcgtgtaccacgagtgcttcggcaagtgtaaggggctgctggtgcccgagctctacagcagcccgagcgccgcctgcatccagtgcctggactgccgcctcatgtacccgccgcacaagttcgtggtgcactcgcacaaggccctggagaaccggacctgccactggggcttcgactcggccaactggcgggcctacatcctgctgagccaggattacacgggcaaggaggagcaggcgcgcctcggccgctgcctggacgacgtgaaggagaaattcgactatggcaacaagtacaagcggcgggtgccccgggtctcctctgagcctccggcctccataagacccaaaacagatgacacctcttcccagtcccccgcgccttccgaaaaggacaagccgtccagctggctgcggaccttggccggctcttccaataagagcctgggctgtgttcaccctcgccagcgcctctctgctttccgaccctggtcccccgcagtgtcagcgagtgagaaagagctctccccacacctcccggccctcatccgagacagcttctactcctacaagagctttgagacagccgtggcgcccaacgtggccctcgcaccgccggcccagcagaaggttgtgagcagccctccgtgtgccgccgccgtctcccgggcccccgagcctctcgccacttgcacccagcctcggaagcggaagctgactgtggacaccccaggagccccagagacgctggcgcccgtggctgccccagaggaggacaaggactcggaggcggaggtggaagttgaaagcagggaggaattcacctcctccttgtcctcgctctcttccccgtcctttacctcatccagctccgccaaggacctgggctccccgggtgcgcgtgccctgccctcggccgtccctgatgctgcggcccctgccgacgcccccagtgggctggaggcggagctggagcacctgcggcaggcactggagggcggcctggacaccaaggaagccaaagagaagttcctgcatgaggtggtcaagatgcgcgtgaagcaggaggagaagctcagcgcagccctgcaggccaagcgcagcctccaccaggagctggagttcctacgcgtggccaagaaggagaagctgcgggaggccacggaggccaagcgtaacctgcggaaggagatcgagcgtctccgcgccgagaacgagaagaagatgaaagaggccaacgagtcacggctgcgcctgaagcgggagctggagcaggcgcggcaggcccgggtgtgcgacaagggctgcgaggcgggccgcctgcgcgccaagtactcggcccagatcgaagacctgcaggtgaagctgcagcacgcggaggcggaccgggagcagctgcgggccgacctgctgcgggagcgcgaggcccgggagcacctggagaaggtggtgaaggagctgcaggaacagctgtggccgcgggcccgccccgaggctgcgggcagcgagggcgctgcggagctggagccgtagattccgtgcctgccgccgcagcgccgccgacaacgcgggtgcaggggggcgcggctgggcggtgcagctccgcccggctccgcccctgcagcccacacagcacaacgtcttaccgtgcctattaccaagcgagtgtttgtaaccatgtagttttggaacccactgcaaaattttctactggccaagttcaagtgagtaagccgcgtcccccaactacagctggagacggggccagctcggcggcctgctggtcctctgcttgctggaacattctaacatttacacttttgttataagctatttaaaaccagtaaggagacttgaaattcagaaaatcaacacatttttaaatgactaacttctaaaagccccaacacatgacgccatctgaagacccgcaacggagtgggggtggcggccgccccaccctccccacccggggaagccatcacagctcatctgcccgcggctgcgtgaggacagcaggggtttttcttcagagtctattttttccccaccagggtccagggagatgttcgttctcgctttaagtcaggagtcacaaatgactttttttttttcaattaaggaaaaagctccatctctacctttaacatcacccagacccccgcccctgcccgtgccccacgctgctgctaacgacagtatgatgcttactctgctactcggaaactatttttatgtaattaatgtatgctttcttgtttataaatgcctgatttaaaaagaaaagagcttggcatatttatctatttcgctgtgtacctgttagtccttccccgaccccgaaacagatgacattgtacaataaaggactttgagaggaaagc

SEQ ID NO: 69149 - DNA, 3240 bp, Homo sapiens
  misc_feature (3145)..(3145): n is a, c, g, or t
cggggcggcggcgggggccgggggggcccgggcgcgcgggagcgggagcggccgggggagccggagcgcaccatggaggcggcggcaggcggccgcggctgtttccagccgcacccggggctgcagaagacgctggagcagttccacctgagctccatgagctcgctgggcggcccggccgctttctcggcgcgctgggcgcaggaggcctacaagaaggagagcgccaaggaggcgggcgcggccgcggtgccggcgccggtgcccgcagccaccgagccgccgcccgtgctgcacctgcccgccatccagccgccgccgcccgtgctgcccgggcccttcttcatgccgtccgaccgctccaccgagcgctgcgagaccgtactggaaggcgagaccatctcgtgcttcgtggtgggaggcgagaagcgcctgtgtctgccgcagattctcaactcggtgctgcgcgacttctcgctgcagcagatcaacgcggtgtgcgacgagctccacatctactgctcgcgctgcacggccgaccagctggagatcctcaaagtcatgggcatcctgcccttctcggcgccctcgtgcgggctcatcaccaagacggacgccgagcgcctgtgcaacgcgctgctctacggcggcgcctacccgccgccctgcaagaaggagctggccgccagcctggcgctgggcctggagctcagcgagcgcagcgtccgcgtgtaccacgagtgcttcggcaagtgtaaggggctgctggtgcccgagctctacagcagcccgagcgccgcctgcatccagtgcctggactgccgcctcatgtacccgccgcacaagttcgtggtgcactcgcacaaggccctggagaaccggacctgccactggggcttcgactcggccaactggcgggcctacatcctgctgagccaggattacacgggcaaggaggagcaggcgcgcctcggccgctgcctggacgacgtgaaggagaaattcgactatggcaacaagtacaagcggcgggtgccccgggtctcctctgagcctccggcctccataagacccaaaacagatgacacctcttcccagtcccccgcgccttccgaaaaggacaagccgtccagctggctgcggaccttggccggctcttccaataagagcctgggctgtgttcaccctcgccagcgcctctctgctttccgaccctggtcccccgcagtgtcagcgagtgagaaagagctctccccacacctcccggccctcatccgagacagcttctactcctacaagagctttgagacagccgtggcgcccaacgtggccctcgcaccgccggcccagcagaaggttgtgagcagccctccgtgtgccgccgccgtctcccgggcccccgagcctctcgccacttgcacccagcctcggaagcggaagctgactgtggacaccccaggagccccagagacgctggcgcccgtggctgccccagaggaggacaaggactcggaggcggaggtggaagttgaaagcagggaggaattcacctcctccttgtcctcgctctcttccccgtcctttacctcatccagctccgccaaggacctgggctccccgggtgcgcgtgccctgccctcggccgtccctgatgctgcggcccctgccgacgcccccagtgggctggaggcggagctggagcacctgcggcaggcactggagggcggcctggacaccaaggaagccaaagagaagttcctgcatgaggtggtcaagatgcgcgtgaagcaggaggagaagctcagcgcagccctgcaggccaagcgcagcctccaccaggagctggagttcctacgcgtggccaagaaggagaagctgcgggaggccacggaggccaagcgtaacctgcggaaggagatcgagcgtctccgcgccgagaacgagaagaagatgaaagaggccaacgagtcacggctgcgcctgaagcgggagctggagcaggcgcggcaggcccgggtgtgcgacaagggctgcgaggcgggccgcctgcgcgccaagtactcggcccagatcgaagacctgcaggtgaagctgcagcacgcggaggcggaccgggagcagctgcgggccgacctgctgcgggagcgcgaggcccgggagcacctggagaaggtggtgaaggagctgcaggaacagctgtggccgcgggcccgccccgaggctgcgggcagcgagggcgctgcggagctggagccgtagattccgtgcctgccgccgcagcgccgccgacaacgcgggtgcaggggggcgcggctgggcggtgcagctccgcccggctccgcccctgcagcccacacagcacaacgtcttaccgtgcctattaccaagcgagtgtttgtaaccatgtagttttggaacccactgcaaaattttctactggccaagttcaagtgagtaagccgcgtcccccaactacagctggagacggggccagctcggcggcctgctggtcctctgcttgctggaacattctaacatttacacttttgttataagctatttaaaaccagtaaggagacttgaaattcagaaaatcaacacatttttaaatgactaacttctaaaagccccaacacatgacgccatctgaagacccgcaacggagtgggggtggcggccgccccaccctccccacccggggaagccatcacagctcatctgcccgcggctgcgtgaggacagcaggggtttttcttcagagtctattttttcagcgacaaggacccaggtcttcctgctgctgccagggagagcagggacagtgccgcgtgcgagatgagctcgaacactgcccgccttactgccgcctaccccgcccgccacgccgccgtcgatgccagcgctgtccccacgggtaccaggaagtgcagagccgcacaggagctgccccggagctgagggcagcgagggcgctgcggagctggagccgtagattccgtgcctgccgccgcagcgccgccgacaacgcgggtgcaggggggcgcggctgggcggtgcagctccgcccggctccgcccctgcagcccacacagcacaacgtcttaccgtgcctattaccaagcgagtgtttgtaaccatgtagttntggaacccactgcaaaattttctactggccaagttcaagtgagtaagccgcgtcccccaactacacctgagccgcaaaacgtcgggagctattcc

SEQ ID NO: 69150 - DNA, 3003 bp, Homo sapiens
cggggcggcggcgggggccgggggggcccgggcgcgcgggagcgggagcggccgggggagccggagcgcaccatggaggcggcggcaggcggccgcggctgtttccagccgcacccggggctgcagaagacgctggagcagttccacctgagctccatgagctcgctgggcggcccggccgctttctcggcgcgctgggcgcaggaggcctacaagaaggagagcgccaaggaggcgggcgcggccgcggtgccggcgccggtgcccgcagccaccgagccgccgcccgtgctgcacctgcccgccatccagccgccgccgcccgtgctgcccgggcccttcttcatgccgtccgaccgctccaccgagcgctgcgagaccgtactggaaggcgagaccatctcgtgcttcgtggtgggaggcgagaagcgcctgtgtctgccgcagattctcaactcggtgctgcgcgacttctcgctgcagcagatcaacgcggtgtgcgacgagctccacatctactgctcgcgctgcacggccgaccagctggagatcctcaaagtcatgggcatcctgcccttctcggcgccctcgtgcgggctcatcaccaagacggacgccgagcgcctgtgcaacgcgctgctctacggcggcgcctacccgccgccctgcaagaaggagctggccgccagcctggcgctgggcctggagctcagcgagcgcagcgtccgcgtgtaccacgagtgcttcggcaagtgtaaggggctgctggtgcccgagctctacagcagcccgagcgccgcctgcatccagtgcctggactgccgcctcatgtacccgccgcacaagttcgtggtgcactcgcacaaggccctggagaaccggacctgccactggggcttcgactcggccaactggcgggcctacatcctgctgagccaggattacacgggcaaggaggagcaggcgcgcctcggccgctgcctggacgacgtgaaggagaaattcgactatggcaacaagtacaagcggcgggtgccccgggtctcctctgagcctccggcctccataagacccaaaacagatgacacctcttcccagtcccccgcgccttccgaaaaggacaagccgtccagctggctgcggaccttggccggctcttccaataagagcctgggctgtgttcaccctcgccagcgcctctctgctttccgaccctggtcccccgcagtgtcagcgagtgagaaagagctctccccacacctcccggccctcatccgagacagcttctactcctacaagagctttgagacagccgtggcgcccaacgtggccctcgcaccgccggcccagcagaaggttgtgagcagccctccgtgtgccgccgccgtctcccgggcccccgagcctctcgccacttgcacccagcctcggaagcggaagctgactgtggacaccccaggagccccagagacgctggcgcccgtggctgccccagaggaggacaaggactcggaggcggaggtggaagttgaaagcagggaggaattcacctcctccttgtcctcgctctcttccccgtcctttacctcatccagctccgccaaggacctgggctccccgggtgcgcgtgccctgccctcggccgtccctgatgctgcggcccctgccgacgcccccagtgggctggaggcggagctggagcacctgcggcaggcactggagggcggcctggacaccaaggaagccaaagagaagttcctgcatgaggtggtcaagatgcgcgtgaagcaggaggagaagctcagcgcagccctgcaggccaagcgcagcctccaccaggagctggagttcctacgcgtggccaagaaggagaagctgcgggaggccacggaggccaagcgtaacctgcggaaggagatcgagcgtctccgcgccgagaacgagaagaagatgaaagaggccaacgagtcacggctgcgcctgaagcgggagctggagcaggcgcggcaggcccgggtgtgcgacaagggctgcgaggcgggccgcctgcgcgccaagtactcggcccagatcgaagacctgcaggtgaagctgcagcacgcggaggcggaccgggagcagctgcgggccgacctgctgcgggagcgcgaggcccgggagcacctggagaaggtggtgaaggagctgcaggaacagctgtggccgcgggcccgccccgaggctgcgggcagcgagggcgctgcggagctggagccgtagattccgtgcctgccgccgcagcgccgccgacaacgcgggtgcaggggggcgcggctgggcggtgcagctccgcccggctccgcccctgcagcccacacagcacaacgtcttaccgtgcctattaccaagcgagtgtttgtaaccatgtagttttggaacccactgcaaaattttctactggccaagttcaagtgagtaagccgcgtcccccaactacagctggagacggggccagctcggcggcctgctggtcctctgcttgctggaacattctaacatttacacttttgttataagctatttaaaaccagtaaggagacttgaaattcagaaaatcaacacatttttaaatgactaacttctaaaagccccaacacatgacgccatctgaagacccgcaacggagtgggggtggcggccgccccaccctccccacccggggaagccatcacagctcatctgcccgcggctgcgtgaggacagcaggggtttttcttcagagtctattttttccccaccagggtccagggagatgttcgttctcgctttaagtcaggagtcacaaatgactttttttttttcaattaaggaaaaagctccatctctacctttaacatcacccagacccccgcccctgcccgtgccccacgctgctgctaacgacagtatgatgcttactctgctactcggaaactatttttatgtaattaatgtatgctttcttgtttataaatgcctgattta

SEQ ID NO: 69151 - DNA, 633 bp, Homo sapiens
  misc_feature (26)..(26): n is a, c, g, or t
ttattgtgtaataagtttgttgcttncctagaaattagttgaagcctgcagctgccaggcccgtgcggtcagtgggacccggacgtgggcaggcgagctcgggaccctcccaggcagttcccacagctcttgcctcggctcaccagggtcacttccactgtcaggggcctgagggggcagctgtggctgcagggctgctctggactgaggggtcccaggccccgaggggtgcacgcctggctccccttggcacaggtgcgagtccgtttcttttcagcagaagggggaagaggtgtccgctgtgtgggctgctgactcctctgtgtgtgaggcccttcatctaagtgattgtgtattcagtttaattctcattatatttctatactgaaagaagatttttaacgaagggaaaaacaacagcaataacattcatatctctggagcagctaactcatacacgtaatgtctgcttttcgtacagaactagccaatgtaaaaacagttcacctgtaaatactttttcctttttcaccgttgtattatacatgtatatgctgggtcctttttcagaaactcttttcttacctgagagttgtcttgttttctgggctgtttttaactgaggaaaaaaaa

SEQ ID NO: 69152 - DNA, 530 bp, Homo sapiens
  misc_feature (22)..(22): n is a, c, g, or t
  misc_feature (61)..(61): n is a, c, g, or t
  misc_feature (101)..(101): n is a, c, g, or t
ttcctcggcctcccccttcccngcttcccaggcattgcccagctacccccactctttcccncccccaacaagcctctctgtctccaatcagccccccagtnaactcgccttctctcccatcccaggctgtgtggagccagggtcccctcctccctgtgggtccgaaccccggcccccccacccctccctcagcccaccagggtccagggagatgttcgttctcgctttaagtcaggagtcacaaatgactttttttttttcaattaaggaaaaagctccatctctacctttaacatcacccagacccccgcccctgcccgtgccccacgctgctgctaacgacagtatgatgcttactctgctactcggaaactatttttatgtaattaatgtatgctttcttgtttataaatgcctgatttaaaaagaaaagagcttggcatatttatctatttcgctgtgtacctgttagtccttccccgaccccgaaacagatgacattgtacaataaaggactttgagaggaaagc

SEQ ID NO: 69153 - DNA, 5071 bp, Homo sapiens
cggggcggcggcgggggccgggggggcccgggcgcgcgggagcgggagcggccgggggagccggagcgcaccatggaggcggcggcaggcggccgcggctgtttccagccgcacccggggctgcagaagacgctggagcagttccacctgagctccatgagctcgctgggcggcccggccgctttctcggcgcgctgggcgcaggaggcctacaagaaggagagcgccaaggaggcgggcgcggccgcggtgccggcgccggtgcccgcagccaccgagccgccgcccgtgctgcacctgcccgccatccagccgccgccgcccgtgctgcccgggcccttcttcatgccgtccgaccgctccaccgagcgctgcgagaccgtactggaaggcgagaccatctcgtgcttcgtggtgggaggcgagaagcgcctgtgtctgccgcagattctcaactcggtgctgcgcgacttctcgctgcagcagatcaacgcggtgtgcgacgagctccacatctactgctcgcgctgcacggccgaccagctggagatcctcaaagtcatgggcatcctgcccttctcggcgccctcgtgcgggctcatcaccaagacggacgccgagcgcctgtgcaacgcgctgctctacggcggcgcctacccgccgccctgcaagaaggagctggccgccagcctggcgctgggcctggagctcagcgagcgcagcgtccgcgtgtaccacgagtgcttcggcaagtgtaaggggctgctggtgcccgagctctacagcagcccgagcgccgcctgcatccagtgcctggactgccgcctcatgtacccgccgcacaagttcgtggtgcactcgcacaaggccctggagaaccggacctgccactggggcttcgactcggccaactggcgggcctacatcctgctgagccaggattacacgggcaaggaggagcaggcgcgcctcggccgctgcctggacgacgtgaaggagaaattcgactatggcaacaagtacaagcggcgggtgccccgggtctcctctgagcctccggcctccataagacccaaaacagatgacacctcttcccagtcccccgcgccttccgaaaaggacaagccgtccagctggctgcggaccttggccggctcttccaataagagcctgggctgtgttcaccctcgccagcgcctctctgctttccgaccctggtcccccgcagtgtcagcgagtgagaaagagctctccccacacctcccggccctcatccgagacagcttctactcctacaagagctttgagacagccgtggcgcccaacgtggccctcgcaccgccggcccagcagaaggttgtgagcagccctccgtgtgccgccgccgtctcccgggcccccgagcctctcgccacttgcacccagcctcggaagcggaagctgactgtggacaccccaggagccccagagacgctggcgcccgtggctgccccagaggaggacaaggactcggaggcggaggtggaagttgaaagcagggaggaattcacctcctccttgtcctcgctctcttccccgtcctttacctcatccagctccgccaaggacctgggctccccgggtgcgcgtgccctgccctcggccgtccctgatgctgcggcccctgccgacgcccccagtgggctggaggcggagctggagcacctgcggcaggcactggagggcggcctggacaccaaggaagccaaagagaagttcctgcatgaggtggtcaagatgcgcgtgaagcaggaggagaagctcagcgcagccctgcaggccaagcgcagcctccaccaggagctggagttcctacgcgtggccaagaaggagaagctgcgggaggccacggaggccaagcgtaacctgcggaaggagatcgagcgtctccgcgccgagaacgagaagaagatgaaagaggccaacgagtcacggctgcgcctgaagcgggagctggagcaggcgcggcaggcccgggtgtgcgacaagggctgcgaggcgggccgcctgcgcgccaagtactcggcccagatcgaagacctgcaggtgaagctgcagcacgcggaggcggaccgggagcagctgcgggccgacctgctgcgggagcgcgaggcccgggagcacctggagaaggtggtgaaggagctgcaggaacagctgtggccgcgggcccgccccgaggctgcgggcagcgagggcgctgcggagctggagccgtagattccgtgcctgccgccgcagcgccgccgacaacgcgggtgcaggggggcgcggctgggcggtgcagctccgcccggctccgcccctgcagcccacacagcacaacgtcttaccgtgcctattaccaagcgagtgtttgtaaccatgtagttttggaacccactgcaaaattttctactggccaagttcaagtgagtaagccgcgtcccccaactacagctggagacggggccagctcggcggcctgctggtcctctgcttgctggaacattctaacatttacacttttgttataagctatttaaaaccagtaaggagacttgaaattcagaaaatcaacacatttttaaatgactaacttctaaaagccccaacacatgacgccatctgaagacccgcaacggagtgggggtggcggccgccccaccctccccacccggggaagccatcacagctcatctgcccgcggctgcgtgaggacagcaggggtttttcttcagagtctattttttcagcgacaaggacccaggtcttcctgctgctgccagggagagcagggacagtgccgcgtgcgagatgagctcgaacactgcccgccttactgccgcctaccccgcccgccacgccgccgtcgatgccagcgctgtccccacgggtaccaggaagtgcagagccgcacaggagctgccccggagctgaggggacggtcttcggctcctctgcaccccgtgattctgcccacgctcctccaccacgaggcactgacctgcgtcgggtggtgaccgtggctggcggtcacgccctcagcccctccgggcacacgtgccgcctgaccgggcgacccttttcagttcggcaaacgtcgctcccttcattttgggactgaggctgcagcattggaacaaaagagcattatttcaatttttctttctttttttttgttcgttcatttaaacgtatatttagaactgcactttgtccacaaccttcccttctctttctattccccagtgaactgaggtttttaccgatttatagagcagtcaaatccgaagtgctcgagtgcttagaaaccccctctggtgcttggttgaacaagggaatcacaagaaaacgaaaatgcaaaaactgaacttcgggggtcgttctgtgccttccagcatcttgtacagcaaatcctgactcgtgtctttttacccccaagatatctgtcttcagtagcgactgaatctgccactctcagaataagttccttgcatttattccaaataatctcgtttactctcacctgtttatgcaaattgtataaggtttcttatgcccaagcttgaaaaatgatttcccagtagacaagaggcggctacctatcctacagttacggtatttatttacataagaagatcttacaggagttctttgcttgaatccgttctaacacccgcggcagctgcacgcgctcacagaaggtggaggttacttgcccaggtacagacgacctcggggcagtgacgagcaaagaccagagactgctgagccctcgcatctgggtggcggaattgcctgcggggttttgcccttggtttactgaggggggtcttggttgctgctgaagccccccaccccttctaaagtgcaatgcaaaagggacatcatgtatatgcagcgtttgtttggaattttctttgcttttgttttctttgcggttgttctgtgtgcatggattccacacctctgccgtaggtagatccgtcagcgggcattattaccgtgtcttgtaaaagggtcggttttgttatgcaacacgcagaatgctgtttttagccttgttttaccagagttgttttttttttcagttatttcttcaagggaaactaaatgatttagttggagcaaagctttaagtgtgttggcgtgcttctgtgtggctgtcctgtgtcgccaggtcgaagatcacagtgaggtagaggccctgccccatccccagggccgccaggcttgctccgtttgctttgagtttttagaccccagagggagatgagcttttccaagctgtgtctgggccagagcctctccttgcccttgctccatcccgacggtcaccgttgggtccacgcctccaccgccccatcttgccccaaacggaaagcgctgtatctgcagtggcagcccttccccacttcggctctgggagggtccagccagtgtcacctgggcccaccctttcctgcagctgccaggcccgtgcggtcagtgggacccggacgtgggcaggcgagctcgggaccctcccaggcagttcccacagctcttgcctcggctcaccagggtcacttccactgtcaggggcctgagggggcagctgtggctgcagggctgctctggactgaggggtcccaggccccgaggggtgcacgcctggctccccttggcacaggtgcgagtccgtttcttttcagcagaagggggaagaggtgtccgctgtgtgggctgctgactcctctgtgtgtgaggcccttcatctaagtgattgtgtattcagtttaattctcattatatttctatactgaaagaagatttttaacgaagggaaaaacaacagcaataacattcatatctctggagcagctaactcatacacgtaatgtctgcttttcgtacagaactagccaatgtaaaaacagttcacctgtaaatactttttcctttttcaccgttgtattatacatgtatatgctgggtcctttttcagaaactcttttcttacctgagagttgtcttgttttctgggctgtttttaactgaggaaaaaaaa

SEQ ID NO: 69154 - DNA, 5216 bp, Homo sapiens
  misc_feature (1)..(1): n is a, c, g, or t
  misc_feature (4)..(5): n is a, c, g, or t
  misc_feature (10)..(12): n is a, c, g, or t
  misc_feature (16)..(17): n is a, c, g, or t
  misc_feature (22)..(22): n is a, c, g, or t
  misc_feature (25)..(26): n is a, c, g, or t
  misc_feature (31)..(31): n is a, c, g, or t
  misc_feature (34)..(34): n is a, c, g, or t
  misc_feature (37)..(37): n is a, c, g, or t
  misc_feature (40)..(41): n is a, c, g, or t
  misc_feature (44)..(44): n is a, c, g, or t
  misc_feature (51)..(51): n is a, c, g, or t
  misc_feature (69)..(70): n is a, c, g, or t
  misc_feature (76)..(76): n is a, c, g, or t
  misc_feature (78)..(78): n is a, c, g, or t
  misc_feature (82)..(82): n is a, c, g, or t
  misc_feature (88)..(88): n is a, c, g, or t
ngannctgannnatgnnaaganctnnaacancangangcnnagntgcaggnccgcccgaggcgttggannagactngngagngccgcngggcgcggaggaggaggatctgggggaagaggaggaggagggccgatcgtcctgggcccgaggaaaagagagaagaaggggacacggagcctctcctgaaacaagaggggccggtggaagccgcgcagcctccggtggagaggaaagaagccgccgcccttgaacaaggccgcaaggtggaggagctgcggtggcaggaggtggacgagagacagaccatgccccggccctacacgttccaggtgtcctccggagggaagcagattctctttcccaaagtcaacctgagccccgtgacgcccgcaaaggacacggggctcaccgctgctccccaggaaccaaaggcccccaaagccagcccagtccagcacgccctaccgtcgtccctgagcgttccccacaccgccattctggtcacgggcgcgcagctctgtggcccggcagtcaacctgagccagatcaaggacaccgcgtgcaagtccctcctgggcttggaggagaagaagcacgcggaagccccagctggggagaaccctccccgaggccccggcgacgcgagggcgggcagcgggaaggctaagcccccccaggagtctcccagcagcgcgtccgcactcgcagaatgggcttccattcggtccagaatcctgaagaacgcagagagtgacccgcgcagcagcgagagggaccagttgaggcccggtgatgagtccactcccaggggccggtgtgattcccgcgggaaccaacggaagactccgccagtcaatgcaaagttctctattatgcctgcctggcagaaattttccgatggtggcacggagacctccaaacagagcacggaagctgaaagcatacgaaaaagacccatgctgggacccagcgaagagacagccccccagcctcctcctgctggtgttcgcgagctcgggaagggtccggagaagtcggagatgcaccgggagcccgcagacaccaccgagggatgcaaatttgccaaagacctcccgtctttccttgtcccaagccttccttaccctccgcagaaagtggtggcccacacagagttcacgacctcgtcggacagcgagactgcaaacgggatagcaaagccagaccctgtgatgccaggtggagaggaaaaagcctcaccgtttggaataaaattgagaaggaccaactattccttgcgcttcaactgcgaccaacaggcagaacagaagaagaagaagaggcacagcagcaccggagacagcgcggatgcagggccgcctgcagcggggagcgctcgtggagagaaagagatggagggtgtggccctcaagcatggtccatccctcccccaagagcggaagcaagccccttccacccggagggactccgctgaaccttccagcagccgctctgttcctgtggcccaccctgggcctccaccggccagcagccagaccccggctccggagcacgacaaggcagcaaacaaaatgccactggcacaaaagccagcactggctcccaagcccaccagtcagaccccaccagcatccccactttccaaactgagcaggccctacttggtagagctgctgtctcgccgagcggggaggccggacccagagccaagtgagccgtccaaggaggaccaggagagcagtgaccgccggccaccctcgcccccaggccccgaggaaaggaagggacagaagagggacgaggaggaagaggcgacagagaggaaacctgcttccccacctctgcctgccactcagcaagagaaaccttctcaaacacccgaggccgggaggaaagagaagccgatgcttcagagcagacactccttagatggctccaaacttacagagaaagtggaaactgctcagccgctgtggataacgttagcactgcaaaagcaaaaggggtttcgggagcagcaggcgacgcgggaggagagaaagcaagccagagaggccaaacaggcagaaaagctctccaaagaaaatgtcagtgtcagcgtgcagcctggaagcagcagtgtcagcagagcaggttccctgcacaagtccactgctctgccagaagagaagagacccgagactgcagtgtccaggcttgagcgcagagaacagctgaaaaaggccaatactcttcctacgtctgtgacagtggagatctccgactcggctcccccagcgccgctggtaaaagaagtcaccaagaggttttccaccccggatgctgcccccgtgtcaacagaaccagcctggctggctttggccaaaaggaaagcaaaggcttggagcgactgtccacagattattaagtaaagagtgactctcacccatccctactgccagttattggctcctctcttgccctttttatttatttattttttatatggggtaaagaaatcaagctagggaaaagaagcatgttttataggctccaaaataatgtttagaaactgaactggtggtgttcattgtaaagagtggatttgcacaaccctaggtcctggtgcctcgagctcctcctagttctcaagagaaaattccgtccacaggaccacatgaagcaaaatctctaagctaagaactcgtgagagcctgccatgcccatttcatggccttgcacacacacccacccacacaccattcagaacatgtacttttgccaacctttggtaatggttttttgattctatgcactaattttctttgtccaaaacatttactctaccatatgtctgggaatgtttatcctttctacagtaatggtgaaaggatcatatctagctaaaagcaagaacacccattctcctgaatgcagtgagtaattgggaatcacaaggaacattctggcacccaactgtgcccatcttagttttcatgagttttccccactctgaagctgtaacccagaaggcacatccattcacatttttaccgcactgtggattcatagtgtggggccctgttattccaataccctccttaaggacatgtgaagcatttggcccagttggctcccagggaacattttaatttaatgtagtgaagaaagaccattctagatcagagctacaagttcactttctgtctctgagaatctccatctagggcagtagttcttatgatgtgtaggctccctcctagggcctactcaatcagagcctgtggggactgggccaggaatatgtattctggcaaaaactcttcaggtcagttctgatagatcccaaaggttaagaactgtgagaaacactgatcctaatgcaatctagtttttcagacttcgaaggggaggctcattcactcaaaaagcaacagtgagacaggaaaaataataaaacaaccccccaagccagccatttattacaagaagcaacaggttattgacattacatgtttgaaaattccctttggtctttagggaaaataaacaggaagccaagatttggagcctttgtaataaggacttcctgcagaaagtcttttctttactataattgagtaattcatatttagagtcacatgtccagtagcatttctaattttgagcattcaccttgctacctttaaaaaacatctgagttttaagtggcctttttatcatcatacacatgtgcatacaaagaagggacttggcagtttaaaagccacatatattcacttttattgccctaaatttacatgaaacagacatactggcaaactcacatattgctggtgctaaccttatatttcatagtgttggcatattccccttttcttagattcttactccgaaatataggtacacatcctttgctctgtgcagagggaattacatcctttttcctctcctacaaaaacatgctttattaagtatccatcattactttcctttatgctcgctcaatatgcaatgtgctgttattctaccatgtaccttaaataaaggatgatggcaaagttatttaccatgtagaaaccattttctttctagaaacaatagctcagcctcactgtagcagctggcatgtgtggtcaagtggatagttgtactcttgcaagttggatttaatatcatatatactggaccttcagactgttaaaaatcaatgtaacctttttttattgctatggcaagcaattagtatttcactgcacgtcttccatactaatgttcatttctaaatcttatatgtaggcatttgttagttccaatgatttcctcactaatataacactttttaatgggaatctttccacctacagccctggaatgataatgctacagtaattcttctgaattgactttttctttcatcctgtcagctttggacaatatcccaattatggcagggaacaggtggggaactaagatcagttacaaaaagttgtagatgtgtcaactttgtattggctgggatatcactgtgcccaaacaaaacaggcgaaatacctcagttaaaatttttccatcaaagtctttaaaagaagagtatactgaagaaagggcagtcacaatacttacttctaacagcttctaaagggtacatgtttaacatttcatttcaaaatcaccccaaatttgcactaaataccaatgaagtgttattttgctttagtagtcttctgagcaacaaactatggggaattctgtaaaaacatataaaaagttcaagactttttttttaaatgaatgattactatgttaaatgcaaactttttttttttttatttaaacaaacatacacttctcctggcaaggttatagatgattaacctctgttcatagacttatatataaaactagagggttttttgtttacttttttaatttttcaagtgcaattgtttcttacacagacattattactattaaattatcatttagccagttatctgcaaatatatagtatgtattgtctcttcttgtgacgtttagtttaattgcttattttaaagcagaaacattagttacaagtgtcttacaatatttttaccaacagtaaagtagagacttaatgaaaataccttagtgtgattttaatataatttgcatattttagttgtataaagttttaatgtaaaatgtccattattgaagggaaaagatctttcaataaaaaatacccacgaga

SEQ ID NO: 69155 - DNA, 4242 bp, Homo sapiens
  misc_feature (1)..(1): n is a, c, g, or t
  misc_feature (4)..(5): n is a, c, g, or t
  misc_feature (10)..(12): n is a, c, g, or t
  misc_feature (16)..(17): n is a, c, g, or t
  misc_feature (22)..(22): n is a, c, g, or t
  misc_feature (25)..(26): n is a, c, g, or t
  misc_feature (31)..(31): n is a, c, g, or t
  misc_feature (34)..(34): n is a, c, g, or t
  misc_feature (37)..(37): n is a, c, g, or t
  misc_feature (40)..(41): n is a, c, g, or t
  misc_feature (44)..(44): n is a, c, g, or t
  misc_feature (51)..(51): n is a, c, g, or t
  misc_feature (69)..(70): n is a, c, g, or t
  misc_feature (76)..(76): n is a, c, g, or t
  misc_feature (78)..(78): n is a, c, g, or t
  misc_feature (82)..(82): n is a, c, g, or t
  misc_feature (88)..(88): n is a, c, g, or t
  misc_feature (279)..(280): n is a, c, g, or t
ngannctgannnatgnnaaganctnnaacancangangcnnagntgcaggnccgcccgaggcgttggannagactngngagngccgcngggcgcggaggaggaggatctgggggaagaggaggaggagggccaggcgcacctggaggactggagggggcagctcagtgagcttctgaacgactttgaggagaggctcgaagaccaggaacgcctgaaacccgaaggacaaagagaacactccgaggagccaggtatttgcgaggagcagaacccagagnncgagcggcgaagagagcagcagggaaggagcggggatttccagggggccgatcgtcctgggcccgaggaaaagagagaagaaggggacacggagcctctcctgaaacaagaggggccggtggaagccgcgcagcctccggtggagaggaaagaagccgccgcccttgaacaaggccgcaaggtggaggagctgcggtggcaggaggtggacgagagacagaccatgccccggccctacacgttccaggtgtcctccggagggaagcagattctctttcccaaagtcaacctgagccccgtgacgcccgcaaaggacacggggctcaccgctgctccccaggaaccaaaggcccccaaagccagcccagtccagcacgccctaccgtcgtccctgagcgttccccacaccgccattctggtcacgggcgcgcagctctgtggcccggcagtcaacctgagccagatcaaggacaccgcgtgcaagtccctcctgggcttggaggagaagaagcacgcggaagccccagctggggagaaccctccccgaggccccggcgacgcgagggcgggcagcgggaaggctaagcccccccaggagtctcccagcagcgcgtccgcactcgcagaatgggcttccattcggtccagaatcctgaagaacgcagagagtgacccgcgcagcagcgagagggaccagttgaggcccggtgatgagtccactcccaggggccggtgtgattcccgcgggaaccaacggaagactccgccagtcaatgcaaagttctctattatgcctgcctggcagaaattttccgatggtggcacggagacctccaaacagagcacggaagctgaaagcatacgaaaaagacccatgctgggacccagcgaagagacagccccccagcctcctcctgctggtgttcgcgagctcgggaagggtccggagaagtcggagatgcaccgggagcccgcagacaccaccgagggatgcaaatttgccaaagacctcccgtctttccttgtcccaagccttccttaccctccgcagaaagtggtggcccacacagagttcacgacctcgtcggacagcgagactgcaaacgggatagcaaagccagaccctgtgatgccaggtggagaggaaaaagcctcaccgtttggaataaaattgagaaggaccaactattccttgcgcttcaactgcgaccaacaggcagaacagaagaagaagaagaggcacagcagcaccggagacagcgcggatgcagggccgcctgcagcggggagcgctcgtggagagaaagagatggagggtgtggccctcaagcatggtccatccctcccccaagagcggaagcaagccccttccacccggagggactccgctgaaccttccagcagccgctctgttcctgtggcccaccctgggcctccaccggccagcagccagaccccggctccggagcacgacaaggcagcaaacaaaatgccactggcacaaaagccagcactggctcccaagcccaccagtcagaccccaccagcatccccactttccaaactgagcaggccctacttggtagagctgctgtctcgccgagcggggaggccggacccagagccaagtgagccgtccaaggaggaccaggagagcagtgaccgccggccaccctcgcccccaggccccgaggaaaggaagggacagaagagggacgaggaggaagaggcgacagagaggaaacctgcttccccacctctgcctgccactcagcaagagaaaccttctcaaacacccgaggccgggaggaaagagaagccgatgcttcagagcagacactccttagatggctccaaacttacagagaaagtggaaactgctcagccgctgtggataacgttagcactgcaaaagcaaaaggggtttcgggagcagcaggcgacgcgggaggagagaaagcaagccagagaggccaaacaggcagaaaagctctccaaagaaaatgtcagtgtcagcgtgcagcctggaagcagcagtgtcagcagagcaggttccctgcacaagtccactgctctgccagaagagaagagacccgagactgcagtgtccaggcttgagcgcagagaacagctgaaaaaggccaatactcttcctacgtctgtgacagtggagatctccgactcggctcccccagcgccgctggtaaaagaagtcaccaagaggttttccaccccggatgctgcccccgtgtcaacagaaccagcctggctggctttggccaaaaggaaagcaaaggcttggagcgactgtccacagattattaagtaaagagtgactctcacccatccctactgccagttattggctcctctcttgccctttttatttatttattttttatatggggtaaagaaatcaagctagggaaaagaagcatgttttataggctccaaaataatgtttagaaactgaactggtggtgttcattgtaaagagtggatttgcacaaccctaggtcctggtgcctcgagctcctcctagttctcaagagaaaattccgtccacaggaccacatgaagcaaaatctctaagctaagaactcgtgagagcctgccatgcccatttcatggccttgcacacacacccacccacacaccattcagaacatgtacttttgccaacctttggtaatggttttttgattctatgcactaattttctttgtccaaaacatttactctaccatatgtctgggaatgtttatcctttctacagtaatggtgaaaggatcatatctagctaaaagcaagaacacccattctcctgaatgcagtgagtaattgggaatcacaaggaacattctggcacccaactgtgcccatcttagttttcatgagttttccccactctgaagctgtaacccagaaggcacatccattcacatttttaccgcactgtggattcatagtgtggggccctgttattccaataccctccttaaggacatgtgaagcatttggcccagttggctcccagggaacattttaatttaatgtagtgaagaaagaccattctagatcagagctacaagttcactttctgtctctgagaatctccatctagggcagtagttcttatgatgtgtaggctccctcctagggcctactcaatcagagcctgtggggactgggccaggaatatgtattctggcaaaaactcttcaggtcagttctgatagatcccaaaggttaagaactgtgagaaacactgatcctaatgcaatctagtttttcagacttcgaaggggaggctcattcactcaaaaagcaacagtgagacaggaaaaataataaaacaaccccccaagccagccatttattacaagaagcaacaggttattgacattacatgtttgaaaattccctttggtctttagggaaaataaacaggaagccaagatttggagcctttgtaataaggacttcctgcagaaagtcttttctttactataattgagtaattcatatttagagtcacatgtccagtagcatttctaattttgagcattcaccttgctacctttaaaaaacatctgagttttaagtggcctttttatcatcatacacatgtgcatacaaagaagggacttggcagtttaaaagccacatatattcacttttattgccctaaatttacatgaaacagacatactggcaaactcacatattgctggtgctaaccttatatttcatagtgttggcatattccccttttcttagattcttactccgaaatataggtacacatcctttgctctgtgcagagggaattacatcctttttcctctcctacaaaaacatgctttattaagtatccatcattactttcctttatgctcgctcaatatgcaatgtgctgttattctaccatgtaccttaaataaaggatgatggcaaagtta

SEQ ID NO: 69156 - DNA, 4758 bp, Homo sapiens
acttaggctaggtacgaggctgggtgttcacaccgccattctggtcacgggcgcgcagctctgtggcccggcagtcaacctgagccagatcaaggacaccgcgtgcaagtccctcctgggcttggaggagaagaagcacgcggaagccccagctggggagaaccctccccgaggccccggcgacgcgagggcgggcagcgggaaggctaagcccccccaggagtctcccagcagcgcgtccgcactcgcagaatgggcttccattcggtccagaatcctgaagaacgcagagagtgacccgcgcagcagcgagagggaccagttgaggcccggtgatgagtccactcccaggggccggtgtgattcccgcgggaaccaacggaagactccgccagtcaatgcaaagttctctattatgcctgcctggcagaaattttccgatggtggcacggagacctccaaacagagcacggaagctgaaagcatacgaaaaagacccatgctgggacccagcgaagagacagccccccagcctcctcctgctggtgttcgcgagctcgggaagggtccggagaagtcggagatgcaccgggagcccgcagacaccaccgagggatgcaaatttgccaaagacctcccgtctttccttgtcccaagccttccttaccctccgcagaaagtggtggcccacacagagttcacgacctcgtcggacagcgagactgcaaacgggatagcaaagccagaccctgtgatgccaggtggagaggaaaaagcctcaccgtttggaataaaattgagaaggaccaactattccttgcgcttcaactgcgaccaacaggcagaacagaagaagaagaagaggcacagcagcaccggagacagcgcggatgcagggccgcctgcagcggggagcgctcgtggagagaaagagatggagggtgtggccctcaagcatggtccatccctcccccaagagcggaagcaagccccttccacccggagggactccgctgaaccttccagcagccgctctgttcctgtggcccaccctgggcctccaccggccagcagccagaccccggctccggagcacgacaaggcagcaaacaaaatgccactggcacaaaagccagcactggctcccaagcccaccagtcagaccccaccagcatccccactttccaaactgagcaggccctacttggtagagctgctgtctcgccgagcggggaggccggacccagagccaagtgagccgtccaaggaggaccaggagagcagtgaccgccggccaccctcgcccccaggccccgaggaaaggaagggacagaagagggacgaggaggaagaggcgacagagaggaaacctgcttccccacctctgcctgccactcagcaagagaaaccttctcaaacacccgaggccgggaggaaagagaagccgatgcttcagagcagacactccttagatggctccaaacttacagagaaagtggaaactgctcagccgctgtggataacgttagcactgcaaaagcaaaaggggtttcgggagcagcaggcgacgcgggaggagagaaagcaagccagagaggccaaacaggcagaaaagctctccaaagaaaatgtcagtgtcagcgtgcagcctggaagcagcagtgtcagcagagcaggttccctgcacaagtccactgctctgccagaagagaagagacccgagactgcagtgtccaggcttgagcgcagagaacagctgaaaaaggccaatactcttcctacgtctgtgacagtggagatctccgactcggctcccccagcgccgctggtaaaagaagtcaccaagaggttttccaccccggatgctgcccccgtgtcaacagaaccagcctggctggctttggccaaaaggaaagcaaaggcttggagcgactgtccacagattattaagtaaagagtgactctcacccatccctactgccagttattggctcctctcttgccctttttatttatttattttttatatggggtaaagaaatcaagctagggaaaagaagcatgttttataggctccaaaataatgtttagaaactgaactggtggtgttcattgtaaagagtggatttgcacaaccctaggtcctggtgcctcgagctcctcctagttctcaagagaaaattccgtccacaggaccacatgaagcaaaatctctaagctaagaactcgtgagagcctgccatgcccatttcatggccttgcacacacacccacccacacaccattcagaacatgtacttttgccaacctttggtaatggttttttgattctatgcactaattttctttgtccaaaacatttactctaccatatgtctgggaatgtttatcctttctacagtaatggtgaaaggatcatatctagctaaaagcaagaacacccattctcctgaatgcagtgagtaattgggaatcacaaggaacattctggcacccaactgtgcccatcttagttttcatgagttttccccactctgaagctgtaacccagaaggcacatccattcacatttttaccgcactgtggattcatagtgtggggccctgttattccaataccctccttaaggacatgtgaagcatttggcccagttggctcccagggaacattttaatttaatgtagtgaagaaagaccattctagatcagagctacaagttcactttctgtctctgagaatctccatctagggcagtagttcttatgatgtgtaggctccctcctagggcctactcaatcagagcctgtggggactgggccaggaatatgtattctggcaaaaactcttcaggtcagttctgatagatcccaaaggttaagaactgtgagaaacactgatcctaatgcaatctagtttttcagacttcgaaggggaggctcattcactcaaaaagcaacagtgagacaggaaaaataataaaacaaccccccaagccagccatttattacaagaagcaacaggttattgacattacatgtttgaaaattccctttggtctttagggaaaataaacaggaagccaagatttggagcctttgtaataaggacttcctgcagaaagtcttttctttactataattgagtaattcatatttagagtcacatgtccagtagcatttctaattttgagcattcaccttgctacctttaaaaaacatctgagttttaagtggcctttttatcatcatacacatgtgcatacaaagaagggacttggcagtttaaaagccacatatattcacttttattgccctaaatttacatgaaacagacatactggcaaactcacatattgctggtgctaaccttatatttcatagtgttggcatattccccttttcttagattcttactccgaaatataggtacacatcctttgctctgtgcagagggaattacatcctttttcctctcctacaaaaacatgctttattaagtatccatcattactttcctttatgctcgctcaatatgcaatgtgctgttattctaccatgtaccttaaataaaggatgatggcaaagttatttaccatgtagaaaccattttctttctagaaacaatagctcagcctcactgtagcagctggcatgtgtggtcaagtggatagttgtactcttgcaagttggatttaatatcatatatactggaccttcagactgttaaaaatcaatgtaacctttttttattgctatggcaagcaattagtatttcactgcacgtcttccatactaatgttcatttctaaatcttatatgtaggcatttgttagttccaatgatttcctcactaatataacactttttaatgggaatctttccacctacagccctggaatgataatgctacagtaattcttctgaattgactttttctttcatcctgtcagctttggacaatatcccaattatggcagggaacaggtggggaactaagatcagttacaaaaagttgtagatgtgtcaactttgtattggctgggatatcactgtgcccaaacaaaacaggcgaaatacctcagttaaaatttttccatcaaagtctttaaaagaagagtatactgaagaaagggcagtcacaatacttacttctaacagcttctaaagggtacatgtttaacatttcatttcaaaatcaccccaaatttgcactaaataccaatgaagtgttattttgctttagtagtcttctgagcaacaaactatggggaattctgtaaaaacatataaaaagttcaagactttttttttaaatgaatgattactatgttaaatgcaaactttttttttttttatttaaacaaacatacacttctcctggcaaggttatagatgattaacctctgttcatagacttatatataaaactagagggttttttgtttacttttttaatttttcaagtgcaattgtttcttacacagacattattactattaaattatcatttagccagttatctgcaaatatatagtatgtattgtctcttcttgtgacgtttagtttaattgcttattttaaagcagaaacattagttacaagtgtcttacaatatttttaccaacagtaaagtagagacttaatgaaaataccttagtgtgattttaatataatttgcatattttagttgtataaagttttaatgtaaaatgtccattattgaagggaaaagatctttcaataaaaaatacccacgaga

SEQ ID NO: 69157 - DNA, 4901 bp, Homo sapiens
acttaggctaggtacgaggctgggtgttcacaccgccattctggtcacgggcgcgcagctctgtggcccggcagtcaacctgagccagatcaaggacaccgcgtgcaagtccctcctgggcttggaggagaagaagcacgcggaagccccagctggggagaaccctccccgaggccccggcgacgcgagggcgggcagcgggaaggctaagcccccccaggagtctcccagcagcgcgtccgcactcgcagaatgggcttccattcggtccagaatcctgaagaacgcagagagtgacccgcgcagcagcgagagggaccagttgaggcccggtgatgagtccactcccaggggccggtgtgattcccgcgggaaccaacggaagactccgccagtcaatgcaaagttctctattatgcctgcctggcagaaattttccgatggtggcacggagacctccaaacagagcacggaagctgaaagcatacgaaaaagacccatgctgggacccagcgaagagacagccccccagcctcctcctgctggtgttcgcgagctcgggaagggtccggagaagtcggagatgcaccgggagcccgcagacaccaccgagggatgcaaatttgccaaagacctcccgtctttccttgtcccaagccttccttaccctccgcagaaagtggtggcccacacagagttcacgacctcgtcggacagcgagactgcaaacgggatagcaaagccagaccctgtgatgccaggtggagaggaaaaagcctcaccgtttggaataaaattgagaaggaccaactattccttgcgcttcaactgcgaccaacaggcagaacagaagaagaagaagaggcacagcagcaccggagacagcgcggatgcagggccgcctgcagcggggagcgctcgtggagagaaagagatggagggtgtggccctcaagcatggtccatccctcccccaagagcggaagcaagccccttccacccggagggactccgctgaaccttccagcagccgctctgttcctgtggcccaccctgggcctccaccggccagcagccagaccccggctccggagcacgacaaggcagcaaacaaaatgccactggcacaaaagccagcactggctcccaagcccaccagtcagaccccaccagcatccccactttccaaactgagcaggccctacttggtagagctgctgtctcgccgagcggggaggccggacccagagccaagtgagccgtccaaggaggaccaggagagcagtgaccgccggccaccctcgcccccaggccccgaggaaaggaagggacagaagagggacgaggaggaagaggcgacagagaggaaacctgcttccccacctctgcctgccactcagcaagagaaaccttctcaaacacccgaggccgggaggaaagagaagccgatgcttcagagcagacactccttagatggctccaaacttacagagaaagtggaaactgctcagccgctgtggataacgttagcactgcaaaagcaaaaggggtttcgggagcagcaggcgacgcgggaggagagaaagcaagccagagaggccaaacaggcagaaaagctctccaaagaaaatgtcagtgtcagcgtgcagcctggaagcagcagtgtcagcagagcaggttccctgcacaagtccactgctctgccagaagagaagagacccgagactgcagtgtccaggcttgagcgcagagaacagctgaaaaaggccaatactcttcctacgtctgtgacagtggagatctccgactcggctcccccagcgccgctggtaaaagaagtcaccaagaggttttccaccccggatgctgcccccgtgtcaacagaaccagcctggctggctttggccaaaaggaaagcaaaggcttggagcgactgtccacagattattaagtaaagagtgactctcacccatccctactgccagttattggctcctctcttgccctttttatttatttattttttatatggggtaaagaaatcaagctagggaaaagaagcatgttttataggctccaaaataatgtttagaaactgaactggtggtgttcattgtaaagagtggatttgcacaaccctaggtcctggtgcctcgagctcctcctagttctcaagagaaaattccgtccacaggaccacatgaagcaaaatctctaagctaagaactcgtgagagcctgccatgcccatttcatggccttgcacacacacccacccacacaccattcagaacatgtacttttgccaacctttggtaatggttttttgattctatgcactaattttctttgtccaaaacatttactctaccatatgtctgggaatgtttatcctttctacagtaatggtgaaaggatcatatctagctaaaagcaagaacacccattctcctgaatgcagtgagtaattgggaatcacaaggaacattctggcacccaactgtgcccatcttagttttcatgagttttccccactctgaagctgtaacccagaaggcacatccattcacatttttaccgcactgtggattcatagtgtggggccctgttattccaataccctccttaaggacatgtgaagcatttggcccagttggctcccagggaacattttaatttaatgtagtgaagaaagaccattctagatcagagctacaagttcactttctgtctctgagaatctccatctagggcagtagttcttatgatgtgtaggctccctcctagggcctactcaatcagagcctgtggggactgggccaggaatatgtattctggcaaaaactcttcaggtcagttctgatagatcccaaaggttaagaactgtgagaaacactgatcctaatgcaatctagtttttcagacttcgaaggggaggctcattcactcaaaaagcaacagtgagacaggaaaaataataaaacaaccccccaagccagccatttattacaagaagcaacaggttattgacattacatgtttgaaaattccctttggtctttagggaaaataaacaggaagccaagatttggagcctttgtaataaggacttcctgcagaaagtcttttctttactataattgagtaattcatatttagagtcacatgtccagtagcatttctaattttgagcattcaccttgctacctttaaaaaacatctgagttttaagtggcctttttatcatcatacacatgtgcatacaaagaagggacttggcagtttaaaagccacatatattcacttttattgccctaaatttacatgaaacagacatactggcaaactcacatattgctggtgctaaccttatatttcatagtgttggcatattccccttttcttagattcttactccgaaatataggtacacatcctttgctctgtgcagagggaattacatcctttttcctctcctacaaaaacatgctttattaagtatccatcattactttcctttatgctcgctcaatatgcaatgtgctgttattctaccatgtaccttaaataaaggatgatggcaaagttatttaccatgtagaaaccattttctttctagaaacaatagctcagcctcactgtagcagctggcatgtgtggtcaagtggatagttgtactcttgcaagttggatttaatatcatatatactggaccttcagactgttaaaaatcaatgtaacctttttttattgctatggcaagcaattagtatttcactgcacgtcttccatactaatgttcatttctaaatcttatatgtaggcatttgttagttccaatgatttcctcactaatataacactttttaatgggaatctttccacctacagccctggaatgataatgctacagtaattcttctgaattgactttttctttcatcctgtcagctttggacaatatcccaattatggcagggaacaggtggggaactaagatcagttacaaaaagttgtagatgtgtcaactttgtattggctgggatatcactgtgcccaaacaaaacaggcgaaatacctcagttaaaatttttccatcaaagtctttaaaagaagagtatactgaagaaagggcagtcacaatacttacttctaacagcttctaaagggtacatgtttaacatttcatttcaaaatcaccccaaatttgcactaaataccaatgaagtgttattttgctttagtagtcttctgagcaacaaactatggggaattctgtaaaaacatataaaaagttcaagactttttttttaaatgaatgattactatgttaaatgcaaactttttttttttttatttaaacaaacatacacttctcctggcaaggttatagatgattaacctctgttcatagacttatatataaaactagagggttttttgtttacttttttaatttttcaagtgcaattgtttcttacacagacattattactattaaattatcatttagccagttatctgcaaatatatagtatgtattgtctcttcttgtgacgtttagtttaattgcttattttaaagcagaaacattagttacaagtgtcttacaatatttttaccaacagtaaagtagagacttaatgaaaataccttagtgtgattttaatataatttgcatattttagttgtataaagttttaatgtaaaatgtccattattgaagggaaaagatctttcaataaaaaatacccacgagatcttcggcactgatggaatttgatttcgatgaccaactgcaaaacaatctcattatatttacataacttttgttgaacaagaacaactttaaactgttttattacatttttttcctaggtatttttagagaaaaataatgaac

SEQ ID NO: 69158 - DNA, 4595 bp, Homo sapiens
acttaggctaggtacgaggctgggtgttcacaccgccattctggtcacgggcgcgcagctctgtggcccggcagtcaacctgagccagatcaaggacaccgcgtgcaagtccctcctgggcttggaggagaagaagcacgcggaagccccagctggggagaaccctccccgaggccccggcgacgcgagggcgggcagcgggaaggctaagcccccccaggagtctcccagcagcgcgtccgcactcgcagaatgggcttccattcggtccagaatcctgaagaacgcagagagtgacccgcgcagcagcgagagggaccagttgaggcccggtgatgagtccactcccaggggccggtgtgattcccgcgggaaccaacggaagactccgccagtcaatgcaaagttctctattatgcctgcctggcagaaattttccgatggtggcacggagacctccaaacagagcacggaagctgaaagcatacgaaaaagacccatgctgggacccagcgaagagacagccccccagcctcctcctgctggtgttcgcgagctcgggaagggtccggagaagtcggagatgcaccgggagcccgcagacaccaccgagggatgcaaatttgccaaagacctcccgtctttccttgtcccaagccttccttaccctccgcagaaagtggtggcccacacagagttcacgacctcgtcggacagcgagactgcaaacgggatagcaaagccagaccctgtgatgccaggtggagaggaaaaagcctcaccgtttggaataaaattgagaaggaccaactattccttgcgcttcaactgcgaccaacaggcagaacagaagaagaagaagaggcacagcagcaccggagacagcgcggatgcagggccgcctgcagcggggagcgctcgtggagagaaagagatggagggtgtggccctcaagcatggtccatccctcccccaagagcggaagcaagccccttccacccggagggactccgctgaaccttccagcagccgctctgttcctgtggcccaccctgggcctccaccggccagcagccagaccccggctccggagcacgacaaggcagcaaacaaaatgccactggcacaaaagccagcactggctcccaagcccaccagtcagaccccaccagcatccccactttccaaactgagcaggccctacttggtagagctgctgtctcgccgagcggggaggccggacccagagccaagtgagccgtccaaggaggaccaggagagcagtgaccgccggccaccctcgcccccaggccccgaggaaaggaagggacagaagagggacgaggaggaagaggcgacagagaggaaacctgcttccccacctctgcctgccactcagcaagagaaaccttctcaaacacccgaggccgggaggaaagagaagccgatgcttcagagcagacactccttagatggctccaaacttacagagaaagtggaaactgctcagccgctgtggataacgttagcactgcaaaagcaaaaggggtttcgggagcagcaggcgacgcgggaggagagaaagcaagccagagaggccaaacaggcagaaaagctctccaaagaaaattggagatctccgactcggctcccccagcgccgctggtaaaagaagtcaccaagaggttttccaccccggatgctgcccccgtgtcaacagaaccagcctggctggctttggccaaaaggaaagcaaaggcttggagcgactgtccacagattattaagtaaagagtgactctcacccatccctactgccagttattggctcctctcttgccctttttatttatttattttttatatggggtaaagaaatcaagctagggaaaagaagcatgttttataggctccaaaataatgtttagaaactgaactggtggtgttcattgtaaagagtggatttgcacaaccctaggtcctggtgcctcgagctcctcctagttctcaagagaaaattccgtccacaggaccacatgaagcaaaatctctaagctaagaactcgtgagagcctgccatgcccatttcatggccttgcacacacacccacccacacaccattcagaacatgtacttttgccaacctttggtaatggttttttgattctatgcactaattttctttgtccaaaacatttactctaccatatgtctgggaatgtttatcctttctacagtaatggtgaaaggatcatatctagctaaaagcaagaacacccattctcctgaatgcagtgagtaattgggaatcacaaggaacattctggcacccaactgtgcccatcttagttttcatgagttttccccactctgaagctgtaacccagaaggcacatccattcacatttttaccgcactgtggattcatagtgtggggccctgttattccaataccctccttaaggacatgtgaagcatttggcccagttggctcccagggaacattttaatttaatgtagtgaagaaagaccattctagatcagagctacaagttcactttctgtctctgagaatctccatctagggcagtagttcttatgatgtgtaggctccctcctagggcctactcaatcagagcctgtggggactgggccaggaatatgtattctggcaaaaactcttcaggtcagttctgatagatcccaaaggttaagaactgtgagaaacactgatcctaatgcaatctagtttttcagacttcgaaggggaggctcattcactcaaaaagcaacagtgagacaggaaaaataataaaacaaccccccaagccagccatttattacaagaagcaacaggttattgacattacatgtttgaaaattccctttggtctttagggaaaataaacaggaagccaagatttggagcctttgtaataaggacttcctgcagaaagtcttttctttactataattgagtaattcatatttagagtcacatgtccagtagcatttctaattttgagcattcaccttgctacctttaaaaaacatctgagttttaagtggcctttttatcatcatacacatgtgcatacaaagaagggacttggcagtttaaaagccacatatattcacttttattgccctaaatttacatgaaacagacatactggcaaactcacatattgctggtgctaaccttatatttcatagtgttggcatattccccttttcttagattcttactccgaaatataggtacacatcctttgctctgtgcagagggaattacatcctttttcctctcctacaaaaacatgctttattaagtatccatcattactttcctttatgctcgctcaatatgcaatgtgctgttattctaccatgtaccttaaataaaggatgatggcaaagttatttaccatgtagaaaccattttctttctagaaacaatagctcagcctcactgtagcagctggcatgtgtggtcaagtggatagttgtactcttgcaagttggatttaatatcatatatactggaccttcagactgttaaaaatcaatgtaacctttttttattgctatggcaagcaattagtatttcactgcacgtcttccatactaatgttcatttctaaatcttatatgtaggcatttgttagttccaatgatttcctcactaatataacactttttaatgggaatctttccacctacagccctggaatgataatgctacagtaattcttctgaattgactttttctttcatcctgtcagctttggacaatatcccaattatggcagggaacaggtggggaactaagatcagttacaaaaagttgtagatgtgtcaactttgtattggctgggatatcactgtgcccaaacaaaacaggcgaaatacctcagttaaaatttttccatcaaagtctttaaaagaagagtatactgaagaaagggcagtcacaatacttacttctaacagcttctaaagggtacatgtttaacatttcatttcaaaatcaccccaaatttgcactaaataccaatgaagtgttattttgctttagtagtcttctgagcaacaaactatggggaattctgtaaaaacatataaaaagttcaagactttttttttaaatgaatgattactatgttaaatgcaaactttttttttttttatttaaacaaacatacacttctcctggcaaggttatagatgattaacctctgttcatagacttatatataaaactagagggttttttgtttacttttttaatttttcaagtgcaattgtttcttacacagacattattactattaaattatcatttagccagttatctgcaaatatatagtatgtattgtctcttcttgtgacgtttagtttaattgcttattttaaagcagaaacattagttacaagtgtcttacaatatttttaccaacagtaaagtagagacttaatgaaaataccttagtgtgattttaatataatttgcatattttagttgtataaagttttaatgtaaaatgtccattattgaagggaaaagatctttcaataaaaaatacccacgaga

SEQ ID NO: 69159 - DNA, 2975 bp, Homo sapiens
acatccggggtggaaaacctcttggtgacttcttttaccagcggcgctgggggagccgagtcggagttttccaccccggatgctgcccccgtgtcaacagaaccagcctggctggctttggccaaaaggaaagcaaaggcttggagcgactgtccacagattattaagtaaagagtgactctcacccatccctactgccagttattggctcctctcttgccctttttatttatttattttttatatggggtaaagaaatcaagctagggaaaagaagcatgttttataggctccaaaataatgtttagaaactgaactggtggtgttcattgtaaagagtggatttgcacaaccctaggtcctggtgcctcgagctcctcctagttctcaagagaaaattccgtccacaggaccacatgaagcaaaatctctaagctaagaactcgtgagagcctgccatgcccatttcatggccttgcacacacacccacccacacaccattcagaacatgtacttttgccaacctttggtaatggttttttgattctatgcactaattttctttgtccaaaacatttactctaccatatgtctgggaatgtttatcctttctacagtaatggtgaaaggatcatatctagctaaaagcaagaacacccattctcctgaatgcagtgagtaattgggaatcacaaggaacattctggcacccaactgtgcccatcttagttttcatgagttttccccactctgaagctgtaacccagaaggcacatccattcacatttttaccgcactgtggattcatagtgtggggccctgttattccaataccctccttaaggacatgtgaagcatttggcccagttggctcccagggaacattttaatttaatgtagtgaagaaagaccattctagatcagagctacaagttcactttctgtctctgagaatctccatctagggcagtagttcttatgatgtgtaggctccctcctagggcctactcaatcagagcctgtggggactgggccaggaatatgtattctggcaaaaactcttcaggtcagttctgatagatcccaaaggttaagaactgtgagaaacactgatcctaatgcaatctagtttttcagacttcgaaggggaggctcattcactcaaaaagcaacagtgagacaggaaaaataataaaacaaccccccaagccagccatttattacaagaagcaacaggttattgacattacatgtttgaaaattccctttggtctttagggaaaataaacaggaagccaagatttggagcctttgtaataaggacttcctgcagaaagtcttttctttactataattgagtaattcatatttagagtcacatgtccagtagcatttctaattttgagcattcaccttgctacctttaaaaaacatctgagttttaagtggcctttttatcatcatacacatgtgcatacaaagaagggacttggcagtttaaaagccacatatattcacttttattgccctaaatttacatgaaacagacatactggcaaactcacatattgctggtgctaaccttatatttcatagtgttggcatattccccttttcttagattcttactccgaaatataggtacacatcctttgctctgtgcagagggaattacatcctttttcctctcctacaaaaacatgctttattaagtatccatcattactttcctttatgctcgctcaatatgcaatgtgctgttattctaccatgtaccttaaataaaggatgatggcaaagttatttaccatgtagaaaccattttctttctagaaacaatagctcagcctcactgtagcagctggcatgtgtggtcaagtggatagttgtactcttgcaagttggatttaatatcatatatactggaccttcagactgttaaaaatcaatgtaacctttttttattgctatggcaagcaattagtatttcactgcacgtcttccatactaatgttcatttctaaatcttatatgtaggcatttgttagttccaatgatttcctcactaatataacactttttaatgggaatctttccacctacagccctggaatgataatgctacagtaattcttctgaattgactttttctttcatcctgtcagctttggacaatatcccaattatggcagggaacaggtggggaactaagatcagttacaaaaagttgtagatgtgtcaactttgtattggctgggatatcactgtgcccaaacaaaacaggcgaaatacctcagttaaaatttttccatcaaagtctttaaaagaagagtatactgaagaaagggcagtcacaatacttacttctaacagcttctaaagggtacatgtttaacatttcatttcaaaatcaccccaaatttgcactaaataccaatgaagtgttattttgctttagtagtcttctgagcaacaaactatggggaattctgtaaaaacatataaaaagttcaagactttttttttaaatgaatgattactatgttaaatgcaaactttttttttttttatttaaacaaacatacacttctcctggcaaggttatagatgattaacctctgttcatagacttatatataaaactagagggttttttgtttacttttttaatttttcaagtgcaattgtttcttacacagacattattactattaaattatcatttagccagttatctgcaaatatatagtatgtattgtctcttcttgtgacgtttagtttaattgcttattttaaagcagaaacattagttacaagtgtcttacaatatttttaccaacagtaaagtagagacttaatgaaaataccttagtgtgattttaatataatttgcatattttagttgtataaagttttaatgtaaaatgtccattattgaagggaaaagatctttcaataaaaaatacccacgaga

SEQ ID NO: 69160 - DNA, 2926 bp, Homo sapiens
ggtgacaacgtttggaagggccagggcgaccggcagtgtgcacagggactgtgtcgggcttggacctcacctgatcctctctcttagcgcgacccttcctctgctccctgtctcctctttctgccacttgtgcgctgcttccgcgcactcccggctccctagcggcaggaggaggaaggcgcacagcgggtggagagggtgcgccaaggagaggtaaccccttcgggagcccggggaatcccggccgccaccaggggccgtgccaccgccctcgcgggaccaaagcttccggcgtgtccccaactttgtggcgccctcaggccgcggcgactgggttagagatgccttccagcggcagagcgctgctggactcgccgctggacagcggctccctgacctccctggactctagtgtcttctgcagcgagggtgaaggggagcccttggcgctcggggactgcttcacggtcaacgtgggcggcagccgcttcgtgctctcgcagcaggcgctgtcctgcttcccgcacacgcgccttggcaagctggccgtggtggtggcttcctaccgccgccccggggccctggccgccgtgcccagccctctggagctttgcgacgatgccaaccccgtggacaacgagtacttcttcgaccgcagctcgcaggcgttccgatatgtcctgcactactaccgcaccggccgcctgcatgtcatggagcagctgtgcgcgctctccttcctgcaggagatccagtactggggcatcgatgagctcagcatcgattcctgctgcagggacagatacttcagaaggaaagagctgagtgaaactttagacttcaagaaggacacagaagaccaggaaagtcaacatgagagtgaacaggacttctcccaaggaccttgtcccactgttcgccagaagctctggaatatcctggagaaacctggatcttccacagctgcccgtatctttggcgtcatctccattatcttcgtggtggtgtccatcattaacatggccctgatgtcagctgagttaagctggctggacctgcagctgctggaaatcctggagtatgtgtgcattagctggttcaccggggagtttgtcctccgcttcctgtgtgtgcgggacaggtgtcgcttcctaagaaaggtgccaaacatcatagacctccttgccatcttgcccttctacatcactcttctggtagagagcctaagtgggagccagaccacgcaggagctggagaacgtggggcgcattgtccaggtgttgaggctgctcagggctctgcgcatgctaaagctgggcagacattccacaggattacgctcccttgggatgacaatcacccagtgttacgaagaagtcggcctactgctcctatttctatccgtgggaatctctatattttcaactgtagaatactttgctgagcaaagcattcctgacacaaccttcacaagtgtcccttgtgcatggtggtgggccaccacctctatgactactgtgggatatggggacattagaccagacaccaccacaggcaaaatcgtggccttcatgtgtatattatcgggaattcttgtcttggccttgcctattgctattattaacgatcgcttctctgcttgctacttcaccttgaaactcaaggaagcagctgttagacagcgtgaagccctaaagaagcttaccaagaatatagccactgactcatatatcagtgttaacttgagagatgtctatgcccggagtatcatggagatgctgcgactgaaaggcagagaaagagcaagtactaggagcagcgggggagatgatttctggttttgaattaattttcaatttatttacaaaagctatgtacaattaactaaaatgataaagcagtgatgtggatttctgtattctgatgatgagtctcttcagagtactgctcatcttaattaatttttgctgatatattgcttcatctactagaatatttcacatcacctataacaactgcacagtgttctgacacatttgagtgtccaaaatagccaattaacacaaccaaatacaactgggccaatataaacatgtttgaattgtcaaatataaaataatgttattgcaatacatacaaaaaagttaaagattttatgtatcactaacattagaagttttttgcaccactaattttttaaaaatggaaggtaaactgcatagcccagagaaagataagtaaatatttaagaacatattgaacaactttgctatttaaagatattatccaagtacataaattactccgttctctatcagttaaagctattgaatataatacttagctttacaagagaaaacccatatttgatgggcagagattatatccctatcttctttttcatgtaaaccactggtcacaaatgaactgatctctgtatcccattattactataagaggtgggaatcccaaaactgcttagattgcagtacatgagtctacacaaagacttcaacaattgcacatcttcattctcccaactgagtgtagtatgtggagcataaaacagcatatttcttagtatttcatgaatatcagatggtctttaaatgtctctttatggatgtattgttcacattatggctttaaaataatgaatatgtaaaagtgaggtagtgaacatcctaaatttctacactggaattactaaataatcttatttcataaaatgggaaatatatgttaaatgacatcactggatgaacttgaagatcttttacttgttaacaaaaaaatactatggacagctttctgattgttggggtaaatagcaaatgttcaaactttgcaggcattttgacattcatcataacaacacaattcctagacattgtattatataattaaagccaaaacctctaaagct

SEQ ID NO: 69161 - DNA, 3202 bp, Homo sapiens
ggtgacaacgtttggaagggccagggcgaccggcagtgtgcacagggactgtgtcgggcttggacctcacctgatcctctctcttagcgcgacccttcctctgctccctgtctcctctttctgccacttgtgcgctgcttccgcgcactcccggctccctagcggcaggaggaggaaggcgcacagcgggtggagagggtgcgccaaggagaggtaaccccttcgggagcccggggaatcccggccgccaccaggggccgtgccaccgccctcgcgggaccaaagcttccggcgtgtccccaactttgtggcgccctcaggccgcggcgactgggttagagatgccttccagcggcagagcgctgctggactcgccgctggacagcggctccctgacctccctggactctagtgtcttctgcagcgagggtgaaggggagcccttggcgctcggggactgcttcacggtcaacgtgggcggcagccgcttcgtgctctcgcagcaggcgctgtcctgcttcccgcacacgcgccttggcaagctggccgtggtggtggcttcctaccgccgccccggggccctggccgccgtgcccagccctctggagctttgcgacgatgccaaccccgtggacaacgagtacttcttcgaccgcagctcgcaggcgttccgatatgtcctgcactactaccgcaccggccgcctgcatgtcatggagcagctgtgcgcgctctccttcctgcaggagatccagtactggggcatcgatgagctcagcatcgattcctgctgcagggacagatacttcagaaggaaagagctgagtgaaactttagacttcaagaaggacacagaagaccaggaaagtcaacatgagagtgaacaggacttctcccaaggaccttgtcccactgttcgccagaagctctggaatatcctggagaaacctggatcttccacagctgcccgtatctttggcgtcatctccattatcttcgtggtggtgtccatcattaacatggccctgatgtcagctgagttaagctggctggacctgcagctgctggaaatcctggagtatgtgtgcattagctggttcaccggggagtttgtcctccgcttcctgtgtgtgcgggacaggtgtcgcttcctaagaaaggtgccaaacatcatagacctccttgccatcttgcccttctacatcactcttctggtagagagcctaagtgggagccagaccacgcaggagctggagaacgtggggcgcattgtccaggtgttgaggctgctcagggctctgcgcatgctaaagctgggcagacattccacaggattacgctcccttgggatgacaatcacccagtgttacgaagaagtcggcctactgctcctatttctatccgtgggaatctctatattttcaactgtagaatactttgctgagcaaagcattcctgacacaaccttcacaagtgtcccttgtgcatggtggtgggccaccacctctatgactactgtgggatatggggacattagaccagacaccaccacaggcaaaatcgtggccttcatgtgtatattatcgggaattcttgtcttggccttgcctattgctattattaacgatcgcttctctgcttgctacttcaccttgaaactcaaggaagcagctgttagacagcgtgaagccctaaagaagcttaccaagaatatagccactgactcatatatcagtgttaacttgagagatgtctatgcccggagtatcatggagatgctgcgactgaaaggcagagaaagagcaagtactaggagcagcgggggagatgatttctggttttgaattaattttcaatttatttacaaaagctatgtacaattaactaaaatgataaagcagtgatgtggatttctgtattctgatgatgagtctcttcagagtactgctcatcttaattaatttttgctgatatattgcttcatctactagaatatttcacatcacctataacaactgcacagtgttctgacacatttgagtgtccaaaatagccaattaacacaaccaaatacaactgggccaatataaacatgtttgaattgtcaaatataaaataatgttattgcaatacatacaaaaaagttaaagattttatgtatcactaacattagaagttttttgcaccactaattttttaaaaatggaaggtaaactgcatagcccagagaaagataagtaaatatttaagaacatattgaacaactttgctatttaaagatattatccaagtacataaattactccgttctctatcagttaaagctattgaatataatacttagctttacaagagaaaacccatatttgatgggcagagattatatccctatcttctttttcatgtaaaccactggtcacaaatgaactgatctctgtatcccattattactataagaggtgggaatcccaaaactgcttagattgcagtacatgagtctacacaaagacttcaacaattgcacatcttcattctcccaactgagtgtagtatgtggagcataaaacagcatatttcttagtatttcatgaatatcagatggtctttaaatgtctctttatggatgtattgttcacattatggctttaaaataatgaatatgtaaaagtgaggtagtgaacatcctaaatttctacactggaattactaaataatcttatttcataaaatgggaaatatatgttaaatgacatcactggatgaacttgaagatcttttacttgttaacaaaaaaatactatggacagctttctgattgttggggtaaatagcaaatgttcaaactttgcaggcattttgacattcatcataacaacacaattcctagacattgtattatataattaaagccaaaacctctaaagctaagaactagctcatgattcccattattttagtaaatgagattctacaacctaagaataacaaggaatgcatcactttaatacctacatttccaatataatagagcccccaaggggaagaaaattggttcttgaggaaaaaaaaatcttatcacttcatttacaaaacacagataagcatattgagtatatctgtggtattaacatttcatgggggtgagatgttagggaaaaaagcctagaaggctctttgccaggggtgaatggtgataagaaat

SEQ ID NO: 69162 - DNA, 2754 bp, Homo sapiens
ggtgacaacgtttggaagggccagggcgaccggcagtgtgcacagggactgtgtcgggcttggacctcacctgatcctctctcttagcgcgacccttcctctgctccctgtctcctctttctgccacttgtgcgctgcttccgcgcactcccggctccctagcggcaggaggaggaaggcgcacagcgggtggagagggtgcgccaaggagaggtaaccccttcgggagcccggggaatcccggccgccaccaggggccgtgccaccgccctcgcgggaccaaagcttccggcgtgtccccaactttgtggcgccctcaggccgcggcgactgggttagagatgccttccagcggcagagcgctgctggactcgccgctggacagcggctccctgacctccctggactctagtgtcttctgcagcgagggtgaaggggagcccttggcgctcggggactgcttcacggtcaacgtgggcggcagccgcttcgtgctctcgcagcaggcgctgtcctgcttcccgcacacgcgccttggcaagctggccgtggtggtggcttcctaccgccgccccggggccctggccgccgtgcccagccctctggagctttgcgacgatgccaaccccgtggacaacgagtacttcttcgaccgcagctcgcaggcgttccgatatgtcctgcactactaccgcaccggccgcctgcatgtcatggagcagctgtgcgcgctctccttcctgcaggagatccagtactggggcatcgatgagctcagcatcgattcctgctgcagggacagatacttcagaaggaaagagctgagtgaaactttagacttcaagaaggacacagaagaccaggaaagtcaacatgagagtgaacaggacttctcccaaggaccttgtcccactgttcgccagaagctctggaatatcctggagaaacctggatcttccacagctgcccgtatctttggcgtcatctccattatcttcgtggtggtgtccatcattaacatggccctgatgtcagctgagttaagctggctggacctgcagctgctggaaatcctggagtatgtgtgcattagctggttcaccggggagtttgtcctccgcttcctgtgtgtgcgggacaggtgtcgcttcctaagaaaggattacgctcccttgggatgacaatcacccagtgttacgaagaagtcggcctactgctcctatttctatccgtgggaatctctatattttcaactgtagaatactttgctgagcaaagcattcctgacacaaccttcacaagtgtcccttgtgcatggtggtgggccaccacctctatgactactgtgggatatggggacattagaccagacaccaccacaggcaaaatcgtggccttcatgtgtatattatcgggaattcttgtcttggccttgcctattgctattattaacgatcgcttctctgcttgctacttcaccttgaaactcaaggaagcagctgttagacagcgtgaagccctaaagaagcttaccaagaatatagccactgactcatatatcagtgttaacttgagagatgtctatgcccggagtatcatggagatgctgcgactgaaaggcagagaaagagcaagtactaggagcagcgggggagatgatttctggttttgaattaattttcaatttatttacaaaagctatgtacaattaactaaaatgataaagcagtgatgtggatttctgtattctgatgatgagtctcttcagagtactgctcatcttaattaatttttgctgatatattgcttcatctactagaatatttcacatcacctataacaactgcacagtgttctgacacatttgagtgtccaaaatagccaattaacacaaccaaatacaactgggccaatataaacatgtttgaattgtcaaatataaaataatgttattgcaatacatacaaaaaagttaaagattttatgtatcactaacattagaagttttttgcaccactaattttttaaaaatggaaggtaaactgcatagcccagagaaagataagtaaatatttaagaacatattgaacaactttgctatttaaagatattatccaagtacataaattactccgttctctatcagttaaagctattgaatataatacttagctttacaagagaaaacccatatttgatgggcagagattatatccctatcttctttttcatgtaaaccactggtcacaaatgaactgatctctgtatcccattattactataagaggtgggaatcccaaaactgcttagattgcagtacatgagtctacacaaagacttcaacaattgcacatcttcattctcccaactgagtgtagtatgtggagcataaaacagcatatttcttagtatttcatgaatatcagatggtctttaaatgtctctttatggatgtattgttcacattatggctttaaaataatgaatatgtaaaagtgaggtagtgaacatcctaaatttctacactggaattactaaataatcttatttcataaaatgggaaatatatgttaaatgacatcactggatgaacttgaagatcttttacttgttaacaaaaaaatactatggacagctttctgattgttggggtaaatagcaaatgttcaaactttgcaggcattttgacattcatcataacaacacaattcctagacattgtattatataattaaagccaaaacctctaaagct

SEQ ID NO: 69163 - DNA, 1478 bp, Homo sapiens
  misc_feature (1053)..(1053): n is a, c, g, or t
ggaaggcttcaacatacagattttcagaggggggacacaattcagtccttagcacaactactggatatttaattatttattttaaaatcaagggaaagactgccaggagaggtggccaccagtcaaggctctgtgacataaaaagtggattattttctaactcgaaaatgaagaagatactgtccactgtcaccatggagatgatctatgcattagtcccttcccccacaaaaagcgctatttctgaattggggaatggagaggtatggaatgaacagaaggctgagacctgcctactggagccacaccatgaccatccagtgtctgggaagccctgggtggagctggaagctgctgatgaattggcagcactgataaaccaagacgaagagaaaacatccccagcagtgaggggtggagcatatggtggataaggagtctgtggagccaggcatctgtcagaaatgagaagtcaaagccagcagacaaagtcaagagagcagaggaagtattattataccagtggcattagagcaggagacagacaagtaaaaaggaatgatgagtgctggcagaaacaacagagtgctggactgccctaggcaggcaaggatagcaagggaggtgacagaagaatggagcctccacatatggaggagtctgcatggggaactgtagggtgaggaggattcccaattcaggtcttggaaacacacagatgtatgtgtagaaaacacggagagggtcaagagcaagatagaagcagccatgtgctttatgacccagtcatagaaatcacctatcagtcctttcgacatatttgttagaagcatgtccctaaatccagcccacatttaagggaaggaaaatcagcctccttcttttgaaagaaggagtgtcaaagaatgtatggacatttttactaccacattaatttttctttaaaactcctctttatctcacttttctactcagaaatctattatattacattacataaaatccacactctcttatttattccgggctctaaggatctatgcaattgggctncttccggttgtattttccagtgttttccagtgtgctccactttggttgactccttactggcctctgaatgcctcgtgaccatctcagcatttctgggctttggttcccactttaagagagttctctgattgtgtctttattaagcttgtgattgaaacacaattgagctgttgcagttaagaccatgggcgttggcttagacaagagtgggtaccagtctctacctatcttactcccttgggcaagttctccgacctacctaaactttagtttccttatttgtaaaacagggacaataatagattgcgtgaacactgccacagagtttatactccagttgtgggagggatgagaggaaaaaagagaaaaacaaatgaagtaaactagataaacatagagtacagcaggtgtgagaagtcctgaag

SEQ ID NO: 69164 - DNA, 404 bp, Homo sapiens
gtgcattgtctcccaggtatctctgagtaagtgaaaaagtaaaatttcctcctctcagtactcttatctgatactttcaagcagcccaacacccagtaaaagtgacatgtctaatccagaagtactggttttggagtaggcaacatatacaaagaggcaaatatccatgtgaggtgccatcccaggctatcacaatctttggatttaccctatctttaatagtgcctgaaggggttcttttaacttcaacctttgtaataaaatacaatgatgtaattgggaatgagtgaactccatagtaaactctatgattaaaaaaatagttaatatgtgtatatataaatatgcaaagtacaaataatacagagtgtggttttcatgttaatctcaattacttctcactg

SEQ ID NO: 69165 - DNA, 285 bp, Homo sapiens
gtactatgagaaactgctttacaaatgattttctgtggaaccctgtcaccagcatttagtgaaacatgctttccatttgaatatgcatttagatgaggccaactggctgctagatcatcgtctaatgggcctgtgatcccacatgaagattattttccctttggtcctagaaccactctccatcctgctcacccttatagactatatgagagggtccctaggtctcactttcaggtgggctcagccagtggaaatcagagaggtgtgagttcgtggtatgtattt

SEQ ID NO: 69166 - DNA, 5008 bp, Homo sapiens
  misc_feature (674)..(674): n is a, c, g, or t
  misc_feature (743)..(743): n is a, c, g, or t
  misc_feature (1105)..(1105): n is a, c, g, or t
  misc_feature (1507)..(1507): n is a, c, g, or t
  misc_feature (2814)..(2814): n is a, c, g, or t
  misc_feature (3699)..(3699): n is a, c, g, or t
aaaagagaaaactaatttgtggtattagaagcctggatagtggttatttttgagaagttagacatgctgatcaggtgaggcttcaagaggcacttaggaagtgctcataatgttctatttcttgattatgagtgctggttacgtgagttgatggactttgtggaaatttaatgagctatgattatgatttatttacttttctctatgactgttacactctagtaaaaagtttgcctaaaataagaaagtagcaaagaaagaaataatgagaagggttagacgaaataaaatttgctgattattggtaattattgaagctgggtgataagcgagggatctttatgtgttctctacttttgtgtatgtttgaaaagatccataatgataattaagataaactataggaatagaaagcagacaatttgttcctggatggggatgacagagaggagcaggagaaaggaaatatagagaataaaaggaaattttgtggtttaagataaatatattgtcttgattgtgatgatgctttcagaactaaccaaatagtcaaataatgcaaaaaacaaaaacaaacaaaaaaccccagaaaacttaggttcaacttattccaactgctgtcatctacctggaagaagaccagacactagtaacaacttaatacttgctaaatnaattaatgactggggtgccatttggcatattattggtctacattttttttaactatagaaaatattgancatgagtttcttacaggtaagttacagattatttgaaagaagtatgtacatgtaatcagaggtccacactcagggatgctctgagataagctatgtcagatgaataaggcactgaagcagcttttctggagatgaaaggcagccagccagcgttgattcccaggcttggtttattagcatcatgacctgggcaaaactttcatcacctggtgaggataatttattcctctccctagcctcatcaaggtataattgacaaatggaaattgtatatatttaaggtatacaacatgatatatgtatacattgtgaagtgattgccacagtcaaactaatgaacataaccatcacttcacataacnatcttttgtgtgtgtggtgagaacgcttaagatttactctcaacaattccatgtttacaaattattaactataggtcccatgctatatatctccagaactaactcatcttacaactgaaagtttgtaacctttgaccaaaatcctcccattcccccttaccatagctcctggtgactattattctactctgtttttttaattctgcctctttagattccacctataaatgagatcatgcatgtttgtctctctgtgtctggcttatttcaactaatataatgtcctccagattcatccacattgtcacaaatgacaggctttccttttttaagctgaataatatttcattatgtacacacacaccccccacattttctttatccattcatccattgacagangcttgggttgtttctatatcttggctattgtgaataatgctacagtgaatgttcagatatctctttaagataatgatttcagttcctttggatatatagccagaaatgaaattactggatcatatggtagttctatttttagtttttttttgtttttttaggaacctccatactgttttccataatggctctgtcagtttacaatctcggcagcagtgtgcagtggtttcttttcttcacagcttcaccaacacttgttatcatttgactttttgataatagccatcctaacaggtttgagatgacatctcatgcttttgacttgcatttccctgatgatttgtgatgttgagtacatttttatatgcctgttggaaaaatgtgtggtcttctttggaaaaatgtatattcaggtcctttgcccattttaaaagtaggctatttgtaggtttttgctattgagttgtatgagttccttttgcattttggatattagcttttcttgatgaatatatggcttgcaaatgttttttcccattccataggttatcttttcattttgttgagcatgttgaaacttttcagtttgacgtcctactcatttatttttgctttatttgcttatggttttgttgtcatatctacaaaatcattaccaagacccatgtcaaggagctttctcccatgctttcttcaaggatttttatggtttcaggtcttatgtttaagtctttaatcctttttgagttgttttttcgtgtatggtgtacaagaatagagatttaagctttaaagagagaaataagacaggtattctagattgaaatgcaaattacacctgcatttttaagatgacactttaagaaatagacctcttgcagcagaacacttcgtgttcctggaacctgtagtgcttgtttattctttttagatatttaattgacagccaaatccagaagagatagctgctgaatttgtcactaattctgagtctgattctctcgtttctttgcataaaagtagtgttaatgctctgtgctcaaattagagcacctaaaccatgtttctgaaatacagtgtatatgaaattaaagtgtaagttgcagctagtataaaaaaagcaaatcattttattgtggcagaataatagtgacatcgtatgggtgggcaaaaagccacaggaccctgattaggaaaatgattttagtcatgaaaaaagtatgctttctgagagaatggtccttcatcttttataccctagttaatttttttaaagggaagaaagccgatgtgcatttttacagttntatatgaagagtaagctgatgatgggtttcttttaaggggactcaacatagagttatcagatttggtaagtccattatgggcttaatgtagccttcactgctgagctcttattatagggcacttgttttcaggaggtagctggaaattggggggcttatatcaagttcagaaatagacatgactaatttaaaatgttagaagtcaggatactttttagtaaacattgtttttaaaaatctgttgtacgttttgggattctaactcatttgtgtttggtaagaattcactggtgcctacatatccagccattttactaattttacatacgtcatatttagatggtgtttacagtaactgctgttgctttaatttaggtcttgtactgcataggtgccatcattggaacatcaattatttagtgttaatatgcttagatgctagtaccagttgtgtaccgagtgtataactggctgatagaaaagtgagatgtggaagtgtcataaatatatggtgttcagcttattttggaattaggacaatggtttttttgttttgttttgtatttttcatgtatacttcctagatcaactctcagatctttaatttgtgcatagggcttcctgaggatgttgctcttactagaggtaattgatcagttttcattgatggctccctcataaagtggaagtttaaaacctaatctgtggaagccacgaaacagtttccctcagccagtcatggtggctcacacatgtaatcccagcactttgggagggcgagacaggcagatcacctgaggtcaggagtttgagaccagctgggcaacatggtgaaaccctgtctctactaaaaatacaaaaattagcctggcctggtggtacgtncctgtaatcccagctactcaggaggctgaggcatgagaatcgcttgaacctcaggaggcagaggttgtggtgagctgaggttgcgccactgcactctagcctggttgacagagtgagactctgtctcaaaaaaaaaagttttcctgctctcatttgctgtttcatcctaagaaacttgagaaatagactactttaaatattacagtgtatataaatgtgtaatttcataactctgcaaaagaaaacccagaaaaaataattttttaaactttctttttggggagggaggagttagtgaccccaatctgttattttacaaaatgggcaaacattgccaatctttctgaagtttgaaatgcagaatttgaagtttctcactgccctgcgttctagggaaagaaaaccattctatactagaaaggtgttatttaaaaagtttgatacccagaaaaattaattatttcattagttaccataatgcctgtgagttttttgccactttgatttaactgacattgacatgtctttgtgttagtgttgcagcttctcagtttttatattctacttcattggttgtaatttagtctcagatgatttcctataggatgtaatttcctgcatagtatatgggttctacttagcctgataaatgatctttccaacctcctggaagcactatatgccaaagatattctgatattttctaaagttttaaggaaaattattgggtatgtagttattagtccatggatttattttagtaattgtcattgtttcaccttttctcaagtttattgttcagcttaaggatattttcatttaggatatatagcccagacactgggttataattataatcaatatgtaagtatggttataattataatcagtatgtacgtataatcaatatgtaagtaatcatttgttatcaacctcctcattcctgttcttaatagctaacattttttgagctgttatactactgtgctaggcttctttcttaaattcctacttcacattaattatctcatttaacatttggctctgaggtatattctattaatatttccattttgcagatgagaatataaagtcgtagaagtttaaatacatgcttatttctcacagtaagaaatgctgagaccagcattaaaactcagctcatctggctgtagaacctgtactcttaagtactattttatgttgcatcacataatggtacatgatctttttttggttagtgtaatagttatgatgcttgaaaattttattgtctaccctttgtaatttattaaatatggatgtttcc

SEQ ID NO: 69167 - DNA, 689 bp, Homo sapiens
aaaagagaaaactaatttgtggtattagaagcctggatagtggttatttttgagaagttagacatgctgatcaggtgaggcttcaagaggcacttaggaagtgctcataatgttctatttcttgattatgagtgctggttacgtgagttgatggactttgtggaaatttaatgagctatgattatgatttatttacttttctctatgactgttacactctagtaaaaagtttgcctaaaataagaaagtagcaaagaaagaaataatgagaagggttagacgaaataaaatttgctgattattggtaattattgaagctgggtgataagcgagggatctttatgtgttctctacttttgtgtatgtttgaaaagatccataatgataattaagataaactataggaatagaaagcagacaatttgttcctggatggggatgacagagaggagcaggagaaaggaaatatagagaataaaaggaaattttgtggtttaagataaatatattgtcttgattgtgatgatgctttcagaactaaccaaatagtcaaataatgcaaaaaacaaaaacaaacaaaaaaccaggcccttaaacttcagctagacaaccatatgctgtgcttgaaaatcagaaaagcagccactcacatacattaagatgggctttgctacccttctgagttccgc

SEQ ID NO: 69168 - DNA, 5160 bp, Homo sapiens
  misc_feature (674)..(674): n is a, c, g, or t
  misc_feature (743)..(743): n is a, c, g, or t
  misc_feature (1105)..(1105): n is a, c, g, or t
  misc_feature (1507)..(1507): n is a, c, g, or t
  misc_feature (2814)..(2814): n is a, c, g, or t
  misc_feature (3699)..(3699): n is a, c, g, or t
aaaagagaaaactaatttgtggtattagaagcctggatagtggttatttttgagaagttagacatgctgatcaggtgaggcttcaagaggcacttaggaagtgctcataatgttctatttcttgattatgagtgctggttacgtgagttgatggactttgtggaaatttaatgagctatgattatgatttatttacttttctctatgactgttacactctagtaaaaagtttgcctaaaataagaaagtagcaaagaaagaaataatgagaagggttagacgaaataaaatttgctgattattggtaattattgaagctgggtgataagcgagggatctttatgtgttctctacttttgtgtatgtttgaaaagatccataatgataattaagataaactataggaatagaaagcagacaatttgttcctggatggggatgacagagaggagcaggagaaaggaaatatagagaataaaaggaaattttgtggtttaagataaatatattgtcttgattgtgatgatgctttcagaactaaccaaatagtcaaataatgcaaaaaacaaaaacaaacaaaaaaccccagaaaacttaggttcaacttattccaactgctgtcatctacctggaagaagaccagacactagtaacaacttaatacttgctaaatnaattaatgactggggtgccatttggcatattattggtctacattttttttaactatagaaaatattgancatgagtttcttacaggtaagttacagattatttgaaagaagtatgtacatgtaatcagaggtccacactcagggatgctctgagataagctatgtcagatgaataaggcactgaagcagcttttctggagatgaaaggcagccagccagcgttgattcccaggcttggtttattagcatcatgacctgggcaaaactttcatcacctggtgaggataatttattcctctccctagcctcatcaaggtataattgacaaatggaaattgtatatatttaaggtatacaacatgatatatgtatacattgtgaagtgattgccacagtcaaactaatgaacataaccatcacttcacataacnatcttttgtgtgtgtggtgagaacgcttaagatttactctcaacaattccatgtttacaaattattaactataggtcccatgctatatatctccagaactaactcatcttacaactgaaagtttgtaacctttgaccaaaatcctcccattcccccttaccatagctcctggtgactattattctactctgtttttttaattctgcctctttagattccacctataaatgagatcatgcatgtttgtctctctgtgtctggcttatttcaactaatataatgtcctccagattcatccacattgtcacaaatgacaggctttccttttttaagctgaataatatttcattatgtacacacacaccccccacattttctttatccattcatccattgacagangcttgggttgtttctatatcttggctattgtgaataatgctacagtgaatgttcagatatctctttaagataatgatttcagttcctttggatatatagccagaaatgaaattactggatcatatggtagttctatttttagtttttttttgtttttttaggaacctccatactgttttccataatggctctgtcagtttacaatctcggcagcagtgtgcagtggtttcttttcttcacagcttcaccaacacttgttatcatttgactttttgataatagccatcctaacaggtttgagatgacatctcatgcttttgacttgcatttccctgatgatttgtgatgttgagtacatttttatatgcctgttggaaaaatgtgtggtcttctttggaaaaatgtatattcaggtcctttgcccattttaaaagtaggctatttgtaggtttttgctattgagttgtatgagttccttttgcattttggatattagcttttcttgatgaatatatggcttgcaaatgttttttcccattccataggttatcttttcattttgttgagcatgttgaaacttttcagtttgacgtcctactcatttatttttgctttatttgcttatggttttgttgtcatatctacaaaatcattaccaagacccatgtcaaggagctttctcccatgctttcttcaaggatttttatggtttcaggtcttatgtttaagtctttaatcctttttgagttgttttttcgtgtatggtgtacaagaatagagatttaagctttaaagagagaaataagacaggtattctagattgaaatgcaaattacacctgcatttttaagatgacactttaagaaatagacctcttgcagcagaacacttcgtgttcctggaacctgtagtgcttgtttattctttttagatatttaattgacagccaaatccagaagagatagctgctgaatttgtcactaattctgagtctgattctctcgtttctttgcataaaagtagtgttaatgctctgtgctcaaattagagcacctaaaccatgtttctgaaatacagtgtatatgaaattaaagtgtaagttgcagctagtataaaaaaagcaaatcattttattgtggcagaataatagtgacatcgtatgggtgggcaaaaagccacaggaccctgattaggaaaatgattttagtcatgaaaaaagtatgctttctgagagaatggtccttcatcttttataccctagttaatttttttaaagggaagaaagccgatgtgcatttttacagttntatatgaagagtaagctgatgatgggtttcttttaaggggactcaacatagagttatcagatttggtaagtccattatgggcttaatgtagccttcactgctgagctcttattatagggcacttgttttcaggaggtagctggaaattggggggcttatatcaagttcagaaatagacatgactaatttaaaatgttagaagtcaggatactttttagtaaacattgtttttaaaaatctgttgtacgttttgggattctaactcatttgtgtttggtaagaattcactggtgcctacatatccagccattttactaattttacatacgtcatatttagatggtgtttacagtaactgctgttgctttaatttaggtcttgtactgcataggtgccatcattggaacatcaattatttagtgttaatatgcttagatgctagtaccagttgtgtaccgagtgtataactggctgatagaaaagtgagatgtggaagtgtcataaatatatggtgttcagcttattttggaattaggacaatggtttttttgttttgttttgtatttttcatgtatacttcctagatcaactctcagatctttaatttgtgcatagggcttcctgaggatgttgctcttactagaggtaattgatcagttttcattgatggctccctcataaagtggaagtttaaaacctaatctgtggaagccacgaaacagtttccctcagccagtcatggtggctcacacatgtaatcccagcactttgggagggcgagacaggcagatcacctgaggtcaggagtttgagaccagctgggcaacatggtgaaaccctgtctctactaaaaatacaaaaattagcctggcctggtggtacgtncctgtaatcccagctactcaggaggctgaggcatgagaatcgcttgaacctcaggaggcagaggttgtggtgagctgaggttgcgccactgcactctagcctggttgacagagtgagactctgtctcaaaaaaaaaagttttcctgctctcatttgctgtttcatcctaagaaacttgagaaatagactactttaaatattacagtgtatataaatgtgtaatttcataactctgcaaaagaaaacccagaaaaaataattttttaaactttctttttggggagggaggagttagtgaccccaatctgttattttacaaaatgggcaaacattgccaatctttctgaagtttgaaatgcagaatttgaagtttctcactgccctgcgttctagggaaagaaaaccattctatactagaaaggtgttatttaaaaagtttgatacccagaaaaattaattatttcattagttaccataatgcctgtgagttttttgccactttgatttaactgacattgacatgtctttgtgttagtgttgcagcttctcagtttttatattctacttcattggttgtaatttagtctcagatgatttcctataggatgtaatttcctgcatagtatatgggttctacttagcctgataaatgatctttccaacctcctggaagcactatatgccaaagatattctgatattttctaaagttttaaggaaaattattgggtatgtagttattagtccatggatttattttagtaattgtcattgtttcaccttttctcaagtttattgttcagcttaaggatattttcatttaggatatatagcccagacactgggttataattataatcaatatgtaagtatggttataattataatcagtatgtacgtataatcaatatgtaagtaatcatttgttatcaacctcctcattcctgttcttaatagctaacattttttgagctgttatactactgtgctaggcttctttcttaaattcctacttcacattaattatctcatttaacatttggctctgaggtatattctattaatatttccattttgcagatgagaatataaagtcgtagaagtttaaatacatgcttatttctcacagtaagaaatgctgagaccagcattaaaactcagctcatctggctgtagaacctgtactcttaagtactattttatgttgcatcacataatggtacatgatctttttttggttagtgtaatagttatgatgcttgaaaattttattgtctaccctttgtaatttattaaatatggatgtttccttgtgttgtcaagtgtgtttattatgccatgttaactttgtcatagtctcatcattatttttcacccagattttatgaagaccctttattattaaaataattttcacatatattctgattaatacaacagtggataccattttttgagtatt

SEQ ID NO: 69169 - DNA, 168 bp, Homo sapiens
ccagcttcaagtatagagggcattactaaaggaggccttctctgcctgcagcctccctctaagttgattgagggttgctacttctataccccacagcaaagcagtttaatgactgtgaagtaaaaatctacgcttaaccaagaaaggttgtgagcctgctggcgcaaa

SEQ ID NO: 69170 - DNA, 566 bp, Homo sapiens
cgctggaggactcatcgatgctagtggggacggggtcgatggaggctttcacatcaatcaccgtgatcccttcccggaagactctggctttgcctccgatgctctgaatacagcccatggcatacaggagcgctctgatctccagggaaggccagcagtcacagaaaaaaccaggcattgaaaggacagaggctgcaggacccagtacagacggcgctgctctccaatctcaactctcaagaccgatatccataggatagaaaactcactgagtagactggggttgcatatatcactaccgcggcctgtttataaataaggattctgctgcatttcatgagccctgggctctctcttcttctcctcgcagtggacaaaaatcaccgatattctttgggttaaaaaaagtttgtagtttaatgaataattatgcggttctgacatccagcccttctgtgcctcacacgcggggacggcagctcgcagactctccctgaagtcttcggaggaagcaggcgagcgccggcagactcataaataaggaaggctctgtccccgcgcggccg

SEQ ID NO: 69171 - DNA, 316 bp, Homo sapiens
cagagtataagtgccctttgtatcttgcactgtgagttttctacaaacataaacccttgtttaggccaaggcgtgaatacaacttgtcggtcccaaaccaacatcaatatcacgtgggaacttctgagaaatgcaagttgacacgagacctcaaaagtcagaaattctggggttgggacacagcactctgtgttttaccggtgattctaatgcatggtcaactttgagaaaccctaaagtgtatgtttctaaaaacaaccgtggttctaaatgtaacaaagatgtgtcctgggtaatgtctaaagcaccaaatcct

SEQ ID NO: 69172 - DNA, 349 bp, Homo sapiens
tggaggactctcctattatagccatcaaactcctgagtctgctacacaaggcccccccaacataagccctagatgaagatctgctaccattacagccagtattacctggcccttgcctacctctcaggtcttggcaatgtccaccttgctttttttactttaaatagcatcatttcgtgctcccccaggacactgtgcagcttcgcacctccaagcctttgcttctgcatcgcctgacacttggagcacccttctccactttcagattgagacttcggaacactttatcatcagcctatctgtaaagacttccttgctggtccctcccatcgcagaataaacagcctgc

SEQ ID NO: 69173 - DNA, 287 bp, Homo sapiens
tgaatattgttaataatggtggatccatgagttaaagtttacaagtttttaacataaatgacagcaaattcaacgccttccatcctgaaattagaaactgaccatgtacaattcctggttggttcatttatagcatttatatttgattttttaatattttattttcataaagaaatactgagccaggcatggtggctcacgcctgtaatcccagcgctttgggagtccacgcaggtggattacttgaggtcaggagttccagagcagcctgaccaacatggtgaaac

SEQ ID NO: 69174 - DNA, 338 bp, Homo sapiens
caccgggcctggccaaacacttttttataaaaacaattttccttgttttttcagtttttaattactctcctcctccaaatctggaattgagtcatagtttgcgcatagagctgaatatagacctggtgacttccaactgtaatactatcacttataggtaatagtaataataataataataataataacatagcagtagtagcagcagtgacagtagtggttacatcttttgggtatatactgtgtctgcacggagctaaattctcattctatgttcactttccttgtttcttcctttttaaattgcccttcacccaaaacaaaatctggaattgaga

SEQ ID NO: 69175 - DNA, 320 bp, Homo sapiens
gtttagtgaactagaatagttttccagagaactgagtgtcaattttaatgtttttttcctgatactttatgaaacaccagaggcatctagctgtgaatcccaaggacataagggtaacaccattcagggacatgcctgtattctggatgccttgttttcccttttcataccccgaacagactttgtgttatttatccgaatgccagcttccaggaggctgaggcaggggaattggttgaacccaggaggcagggcttgcagtgagctgagatcgagccactgcactatggcctgggcgacagaacaagactccatctcaa

SEQ ID NO: 69176 - DNA, 313 bp, Homo sapiens
gttgatttgattggcttttactttcaatttgcatgggcttaaaatggcaagaaaatcaacactggttaagtgaagagaacaagagacaaaacagtatttaaaatacccaactagggagggaaaaaatgaatatgtaaacatatacacacaaacgaacacgttcttgcacatacatttgcatatacttgaaacttttctcgaaaaacacccaagaaactatcatcaacaaccatcatcaataacggctacttctgggaacaaagggcagggtgggaacatactaaaacttttatttttccctttatattcttct

SEQ ID NO: 69177 - DNA, 392 bp, Homo sapiens
gatgcttaataccatatatcttgtaggagttggaaccaagtcctgtgcctcccagataaagatattgggaggaggaaatgtgggcagagaatctgcgagaagtaatggggatggagaccagaagagatgagctgtttttgtcacatgggtggtgtattagggttctccagagggagagaactaataggatagatgaatgtatgaaggggaatttattaaggaggactgactcacatgatcattaggtgaagtttcacaataggccgtctgcaagctgaggggcaaggaagccagtccgagtcccagaacctcaaaagtagggaagtcaacagtgcagtcttcagtctatagctgaaggcccatgagcccctggcaaactactggtctaagtc

SEQ ID NO: 69178 - DNA, 574 bp, Homo sapiens
gcccagttaattgttgtacttttagtagagatggggtttcgccatgttggccaggctggtctcgaactcctgacctcaggtgatccacctgccttagcctcccagactgctgggattaaggcgtgagcccccgcacccggccccaaaccctttctgaaagatgattctcccactggcccgaataactgaatatggacaaatgtcagctcagcctgcagcactgtaggggcagaccaccacggtggaacagagtcccgagctggcagcgtctgggaactgcaagtgtccctagccaacactggccagaacggggaccctggccctgcaaaggtaaggcactgagctctgtcaataaccagtgggctcagaagaagaccccaagatgatggaccccaaaaaacaaccctcagttacaacctcctgagagcccttgaggctgtggtaccctggctcctgactcacagatcctgtgagataataaaatggtgctgtttcagctgctaaatgggtgatttgctatgaagggcagaaaacaaagggaagcagtgtgaccagcaagagcggccgctcactc

SEQ ID NO: 69179 - DNA, 513 bp, Homo sapiens
ccctatattttttttctaaagaataaacactctggagtttcccacccagttaggtgtagcggattttaaaataaaccggccccaaaccctttctgaaagatgattctcccactggcccgaataactgaatatggacaaatgtcagctcagcctgcagcactgtaggggcagaccaccacggtggaacagagtcccgagctggcagcgtctgggaactgcaagtgtccctagccaacactggccagaacggggaccctggccctgcaaaggtaaggcactgagctctgtcaataaccagtgggctcagaagaagaccccaagatgatggaccccaaaaaacaaccctcagttacaacctcctgagagcccttgaggctgtggtaccctggctcctgactcacagatcctgtgagataataaaatggtgctgtttcagctgctaaatgggtgatttgctatgaagggcagaaaacaaagggaagcagtgtgaccagcaagagcggccgctcactc

SEQ ID NO: 69180 - DNA, 275 bp, Homo sapiens
tggccatttatatgtttcaacatgagtctcctcggctagaccgtgagcttgttgggggagggaagaggtctgtcctgtccatggctgatttccagctgggtgctcagcgcgcagttcctgtttgctgagtgcaggaaggacctcagccctttccccagggacccgggaacccatgagctgaggtcctggtttggggccattgccacttgtcccctttccatcccgtccattctggggaggggctgcctgtgccatcaggggattttgcatctttt

SEQ ID NO: 69181 - DNA, 763 bp, Homo sapiens
gacatcttttaacttactctgaaatgtttttggggggagtaaggtactttttacagtctactctaccagctgagctgtcaaagtttgcatataagttacttttttaaaagtgcatagctccatgacattttacatataaatacactgcggtgaccactatcaagagcaagaacatatccataacccccaaaagttactcatgtacctttctagtcataaatacccttactacacccctgagtaatcattattctggcttttctctccttaggttagttttgattgttcttgaattttttctgttttggagatggagtcttgccctgtcaccgaggctggagtgcagtggcatgatctcagctcactgcaacctctgcctcctggattaaagcgattctcctgcatcagcctcccaagtagctgggattacaggcacacgccaccaagcctgcctaatttttgtatttttagtagagacggggtatccccatgttggctaggctcgtctcgaactcctgacctcaggtgatccctcccctccctggcctcccaaagtgctaggattacagacgtgagccaccacacccatccttgaatttaatttaaatgcatttatacagtcacacagcacgtgctcatttgtatctcacttctttcgttcatctattttgagagtgtatcagtagcttgttttttgttgtctttttaaaaaaattgtttagagtattccattatatgaataaattacactttaaaaatatat

SEQ ID NO: 69182 - DNA, 444 bp, Homo sapiens
caaaaccctgtctgtacaaaaaatagaaaaaattagccgggtatggtggcatgcacctgtggccccagctactcaggaggctaaggtgggaggactgcttgagcccaggaaggggaggttgcagtgagccaagatcgtgccaccacactccaacctgggtgacagacagagaccctgtctcaaagaaaaaaaaaaggcaaaagatctgaacagacatttcaacaaagtagatatacagaggacaaataagcacatgagaagatgctcaacagcattagttattagggaaataataagtagcttctcaaaaagttcaacctgtgcctattgtatgacccagccatttcattactaggtatttacccaagtgaaaaaagcccaatcaaagacttgtacacaaatgttcataggagctttatttacaatagtccacaactgaaaaaa

SEQ ID NO: 69183 - DNA, 4117 bp, Homo sapiens
aggggcggaagtcggggtctgacccgctccaggtccgggactgcggatagaagaggaccgccgccttgagggaggggtggaaactgggtgccggctccgcgcgcgacctccggccctgcgcgtgcgccgtggcgcggcccggctgacaggttctttaatggaggagccaatctctctgcacacctggtttcatctaataatatacagacaccagctctgaggccagttaatcatccccagtgtccaggcacagagtagtcggtccgcctcacaatgttggactttctagccgagaacaacctctgtggccaagcaatcctaaggattgtttcctgtggtaatgccatcattgctgaacttttgagactctctgagtttattcctgctgtgttcaggttaaaagacagagctgatcaacagaaatatggagatatcatatttgatttcagctattttaagggtccagaattatgggaaagcaaactggatgctaagccagagctacaggatttagatgaagaatttcgtgaaaacaacatagaaattgtgaccagattttatttagcatttcaaagtgtacataaatatattgtagacttaaacagatatctagatgatctcaatgaaggggtttatattcagcaaaccttagaaactgtgcttctcaatgaagatggaaaacaacttctatgtgaagcactgtacttatatggagttatgctactggtcattgaccaaaagattgaaggagaagtcagagagaggatgctggtttcttactaccgatacagtgctgctcgatcttctgctgattcaaatatggacgatatttgtaagctgcttcgaagtacaggttattctagccaaccaggtgccaaaagaccatccaactatcccgagagctatttccagagagtgcctatcaacgaatccttcatcagtatggtcattggtcgactgagatctgatgatatttacaaccaggtctcagcgtatcctttgccggagcatcgcagcacagccctggcaaaccaagctgccatgctgtacgtgattctctactttgagccttccatccttcacacccatcaagcaaaaatgagagagatagtggataaatactttccagataattgggtaattagtatttacatggggatcacagttaatctagtagatgcttgggaaccttacaaagctgcaaaaactgctttaaataataccctggacctttcaaatgtcagagaacaggcaagcagatatgctactgtcagtgaaagagtgcatgctcaagtgcagcaatttctaaaagaaggttatttaagggaggagatggttctggacaatatcccaaagcttctgaactgcctgagagactgcaatgttgccatccgatggctgatgcttcatacagcagactcagcctgtgacccaaacaacaaacgccttcgtcaaatcaaggaccagattctaacagactctcggtacaatcccaggatcctcttccagctgctgttggatactgcacaatttgagtttatactcaaagagatgttcaagcaaatgctttcagaaaagcaaaccaaatgggagcattacaagaaagagggttcggagcggatgactgagcttgctgatgtcttttcaggagtgaaacccctaaccagagtggagaaaaatgaaaaccttcaagcttggttcagagagatctcaaaacaaatattgtctttaaattatgatgattctactgctgcgggcagaaaaactgtacaactgatacaagctttggaagaggttcaagaattccaccagttggaatccaatctgcaagtatgtcagtttcttgccgatactcgaaagtttcttcatcaaatgatcagaaccattaacattaaagaggaggttctgatcacaatgcagatcgttggggacctttctttcgcttggcagttgattgacagtttcacatccatcatgcaagaaagcataagggtaaatccatccatggttactaaactcagagctaccttcctaaagcttgcctctgccctcgatctgccccttcttcgtattaatcaggcaaatagccccgacctgctcagcgtgtcacagtactattctggagagttggtatcctatgtgagaaaagttttgcagatcatcccagaaagcatgtttacatctcttctaaagatcataaagcttcagacccacgacattattgaagtgcctacccgcctggacaaagacaagctgagggactatgctcagctaggcccacgatacgaggttgccaagcttactcatgctatttccatttttactgaaggcatcttaatgatgaaaacgactttggttggcatcatcaaggtggatccaaagcagttgctggaagatggaataaggaaagagcttgtgaagcgcgttgcctttgccctgcataggggactgatattcaaccctcgagccaagccaagtgaattgatgcccaagctgaaagagttgggagcgaccatggatggattccatcgttcttttgaatacatacaggactatgtcaacatttatggtctgaagatttggcaggaagaagtatctcgtatcataaattacaacgtggagcaagagtgtaataactttctaagaacgaagattcaagattggcaaagcatgtaccagtccactcatattccaatacccaagtttacccctgtggatgagtctgtaacgtttattggtcgactctgcagagaaatcctgcggatcacagacccaaaaatgacatgtcacatagaccagctgaacacttggtatgatatgaaaactcatcaggaagtgaccagcagccgcctcttctcagaaatccagaccaccttgggaacctttggtctaaatggcttagacaggcttctgtgctttatgattgtaaaagagttacagaatttcctcagtatgtttcagaaaattatcctgagagacagaactgttcaggacactttaaaaaccctcatgaatgctgtcagtcccctaaaaagtattgtcgcaaattcaaataaaatttatttttccgccattgccaaaacacagaagatttggactgcgtatctcgaggctataatgaaggttgggcagatgcagattctgagacaacagattgccaatgaattaaattattcttgtcggtttgattctaaacatctggcagctgctctggagaatctcaataaggctctcctagcagacattgaagcccactatcaggacccttcacttccttaccccaaagaagataacacacttttatatgaaatcacagcctatctggaggcagctggcattcacaacccactgaataagatatacataacaacaaagcgcttaccctattttccaattgtaaactttctatttttgatcgctcagttgccaaaacttcaatacaacaaaaatctgggaatggtctgccgaaaaccgaccgacccggttgattggccaccacttgtcctgggactgctcactctgctgaagcagttccattcccggtacaccgagcagttcctggcgctgattggccagtttatctgctccacggtggagcagtgtacaagccagaagatacctgaaattcctgcagatgttgtgggtgcccttctgttcctggaggattatgttcggtacacaaagctacccaggagggttgctgaagcacatgtgcctaatttcatttttgatgagttcagaacagtgctgtaactgtttttcctacttcttcaatggaaggattgtccttagatcttcccaccatcacaaatgaatttgaagatgaaaagaaactcagttgctcatacaactgcattttttctgtctattatgggaaacatcagacgttctgagtaagatatatctcatggcattagttaatataactgatattgtttaaatcatggtattacatgcaatttatatcagataaaagcagaacacatttttgtactgcctctcttaaatgctgaatgtaactgttatgtataaatccatttagttttatgttctaaagaactatttgtgcaactccagattttcagtaaaatagtattactagtacccaaaaaaaaat

SEQ ID NO: 69184 - DNA, 928 bp, Homo sapiens
aatttagtcttctcagggctttgcccaagaacagttcaggaatgcatgcctctgaaggccttcctgctcttccccttctggccttggtatctcattctcattcctgccctcccctacctctccaaccccatcacttgccagccatcctgttcttccttgttggtcatcagttaatgaagtgtattaggtgacctgagtacttgtcagtacttcccagaggcaagaacattcctcgcagatcaaggtacctttaagagccaagaagctcagatttggaggcgggagagctgtactgcatcccctcaaatgttagcagtgccaagaaatgagacgctagtctagggggcaccacaagcagaaaggggctgtttcaaggagtcgtccgcccatgggagtctcctcttctattattcaccttgctccaaggatatcttttcttttacgtatgaaaattttgtaattgttcaactataacaccatgaataatttaattctttaatttttcaggttgctgaagcacatgtgcctaatttcatttttgatgagttcagaacagtgctgtaactgtttttcctacttcttcaatggaaggattgtccttagatcttcccaccatcacaaatgaatttgaagatgaaaagaaactcagttgctcatacaactgcattttttctgtctattatgggaaacatcagacgttctgagtaagatatatctcatggcattagttaatataactgatattgtttaaatcatggtattacatgcaatttatatcagataaaagcagaacacatttttgtactgcctctcttaaatgctgaatgtaactgttatgtataaatccatttagttttatgttctaaagaactatttgtgcaactccagattttcagtaaaatagtattactagtacccaaaaaaaaat

SEQ ID NO: 69185 - DNA, 1883 bp, Homo sapiens
tcgttaccggagtggagatgtctgagggactatgctcagtaggccacgatacgaggttgccaagcttactcatgctatttccatttttactgaaggcatcttaatgatgaaaacgactttggttggcatcatcaaggtggatccaaagcagttgctggaagatggaataaggaaagagcttgtgaagcgcgttgcctttgccctgcataggggactgatattcaaccctcgagccaagccaagtgaattgatgcccaagctgaaagagttgggagcgaccatggatggattccatcgttcttttgaatacatacaggactatgtcaacatttatggtctgaagatttggcaggaagaagtatctcgtatcataaattacaacgtggagcaagagtgtaataactttctaagaacgaagattcaagattggcaaagcatgtaccagtccactcatattccaatacccaagtttacccctgtggatgagtctgtaacgtttattggtcgactctgcagagaaatcctgcggatcacagacccaaaaatgacatgtcacatagaccagctgaacacttggtatgatatgaaaactcatcaggaagtgaccagcagccgcctcttctcagaaatccagaccaccttgggaacctttggtctaaatggcttagacaggcttctgtgctttatgattgtaaaagagttacagaatttcctcagtatgtttcagaaaattatcctgagagacagaactgttcaggacactttaaaaaccctcatgaatgctgtcagtcccctaaaaagtattgtcgcaaattcaaataaaatttatttttccgccattgccaaaacacagaagatttggactgcgtatctcgaggctataatgaaggttgggcagatgcagattctgagacaacagattgccaatgaattaaattattcttgtcggtttgattctaaacatctggcagctgctctggagaatctcaataaggctctcctagcagacattgaagcccactatcaggacccttcacttccttaccccaaagaagataacacacttttatatgaaatcacagcctatctggaggcagctggcattcacaacccactgaataagatatacataacaacaaagcgcttaccctattttccaattgtaaactttctatttttgatcgctcagttgccaaaacttcaatacaacaaaaatctgggaatggtctgccgaaaaccgaccgacccggttgattggccaccacttgtcctgggactgctcactctgctgaagcagttccattcccggtacaccgagcagttcctggcgctgattggccagtttatctgctccacggtggagcagtgtacaagccagaagatacctgaaattcctgcagatgttgtgggtgcccttctgttcctggaggattatgttcggtacacaaagctacccaggagggttgctgaagcacatgtgcctaatttcatttttgatgagttcagaacagtgctgtaactgtttttcctacttcttcaatggaaggattgtccttagatcttcccaccatcacaaatgaatttgaagatgaaaagaaactcagttgctcatacaactgcattttttctgtctattatgggaaacatcagacgttctgagtaagatatatctcatggcattagttaatataactgatattgtttaaatcatggtattacatgcaatttatatcagataaaagcagaacacatttttgtactgcctctcttaaatgctgaatgtaactgttatgtataaatccatttagttttatgttctaaagaactatttgtgcaactccagattttcagtaaaatagtattactagtacccaaaaaaaaat

SEQ ID NO: 69186 - DNA, 4072 bp, Homo sapiens
aggggcggaagtcggggtctgacccgctccaggtccgggactgcggatagaagaggaccgccgccttgagggaggggtggaaactgggtgccggctccgcgcgcgacctccggccctgcgcgtgcgccgtggcgcggcccggctgacaggttctttaatggaggagccaatctctctgcacacctggtttcatctaataatatacagacaccagctctgaggccagttaatcatccccagtgtccaggcacagagtagtcggtccgcctcacaatgttggactttctagccgagaacaacctctgtggccaagcaatcctaaggattgtttcctgtggtaatgccatcattgctgaacttttgagactctctgagtttattcctgctgtgttcaggttaaaagacagagctgatcaacagaaatatggagatatcatatttgatttcagctattttaagggtccagaattatgggaaagcaaactggatgctaagccagagctacaggatttagatgaagaatttcgtgaaaacaacatagaaattgtgaccagattttatttagcatttcaaagtgtacataaatatattgtagacttaaacagatatctagatgatctcaatgaaggggtttatattcagcaaaccttagaaactgtgcttctcaatgaagatggaaaacaacttctatgtgaagcactgtacttatatggagttatgctactggtcattgaccaaaagattgaaggagaagtcagagagaggatgctggtttcttactaccgatacagtgctgctcgatcttctgctgattcaaatatggacgatatttgtaagctgcttcgaagtacaggttattctagccaaccaggtgccaaaagaccatccaactatcccgagagctatttccagagagtgcctatcaacgaatccttcatcagtatggtcattggtcgactgagatctgatgatatttacaaccaggtctcagcgtatcctttgccggagcatcgcagcacagccctggcaaaccaagctgccatgctgtacgtgattctctactttgagccttccatccttcacacccatcaagcaaaaatgagagagatagtggataaatactttccagataattgggtaattagtatttacatggggatcacagttaatctagtagatgcttgggaaccttacaaagctgcaaaaactgctttaaataataccctggacctttcaaatgtcagagaacaggcaagcagatatgctactgtcagtgaaagagtgcatgctcaagtgcagcaatttctaaaagaaggttatttaagggaggagatggttctggacaatatcccaaagcttctgaactgcctgagagactgcaatgttgccatccgatggctgatgcttcatacagcagactcagcctgtgacccaaacaacaaacgccttcgtcaaatcaaggaccagattctaacagactctcggtacaatcccaggatcctcttccagctgctgttggatactgcacaatttgagtttatactcaaagagatgttcaagcaaatgctttcagaaaagcaaaccaaatgggagcattacaagaaagagggttcggagcggatgactgagcttgctgatgtcttttcaggagtgaaacccctaaccagagtggagaaaaatgaaaaccttcaagcttggttcagagagatctcaaaacaaatattgtctttaaattatgatgattctactgctgcgggcagaaaaactgtacaactgatacaagctttggaagaggttcaagaattccaccagttggaatccaatctgcaagtatgtcagtttcttgccgatactcgaaagtttcttcatcaaatgatcagaaccattaacattaaagaggaggttctgatcacaatgcagatcgttggggacctttctttcgcttggcagttgattgacagtttcacatccatcatgcaagaaagcataagggtaaatccatccatggttactaaactcagagctaccttcctaaagcttgcctctgccctcgatctgccccttcttcgtattaatcaggcaaatagccccgacctgctcagcgtgtcacagtactattctggagagttggtatcctatgtgagaaaagttttgcagatcatcccagaaagcatgtttacatctcttctaaagatcataaagcttcagacccacgacattattgaagtgcctacccgcctggacaaagacaagctgagggactatgctcagctaggcccacgatacgaggttgccaagcttactcatgctatttccatttttactgaaggcatcttaatgatgaaaacgactttggttggcatcatcaaggtggatccaaagcagttgctggaagatggaataaggaaagagcttgtgaagcgcgttgcctttgccctgcataggggactgatattcaaccctcgagccaagccaagtgaattgatgcccaagctgaaagagttgggagcgaccatggatggattccatcgttcttttgaatacatacaggactatgtcaacatttatggtctgaagatttggcaggaagaagtatctcgtatcataaattacaacgtggagcaagagtgtaataactttctaagaacgaagattcaagattggcaaagcatgtaccagtccactcatattccaatacccaagtttacccctgtggatgagtctgtaacgtttattggtcgactctgcagagaaatcctgcggatcacagacccaaaaatgacatgtcacatagaccagctgaacacttggtatgatatgaaaactcatcaggaagtgaccagcagccgcctcttctcagaaatccagaccaccttgggaacctttggtctaaatggcttagacaggcttctgtgctttatgattgtaaaagagttacagaatttcctcagtatgtttcagaaaattatcctgagagacagaactgttcaggacactttaaaaaccctcatgaatgctgtcagtcccctaaaaagtattgtcgcaaattcaaataaaatttatttttccgccattgccgttgggcagatgcagattctgagacaacagattgccaatgaattaaattattcttgtcggtttgattctaaacatctggcagctgctctggagaatctcaataaggctctcctagcagacattgaagcccactatcaggacccttcacttccttaccccaaagaagataacacacttttatatgaaatcacagcctatctggaggcagctggcattcacaacccactgaataagatatacataacaacaaagcgcttaccctattttccaattgtaaactttctatttttgatcgctcagttgccaaaacttcaatacaacaaaaatctgggaatggtctgccgaaaaccgaccgacccggttgattggccaccacttgtcctgggactgctcactctgctgaagcagttccattcccggtacaccgagcagttcctggcgctgattggccagtttatctgctccacggtggagcagtgtacaagccagaagatacctgaaattcctgcagatgttgtgggtgcccttctgttcctggaggattatgttcggtacacaaagctacccaggagggttgctgaagcacatgtgcctaatttcatttttgatgagttcagaacagtgctgtaactgtttttcctacttcttcaatggaaggattgtccttagatcttcccaccatcacaaatgaatttgaagatgaaaagaaactcagttgctcatacaactgcattttttctgtctattatgggaaacatcagacgttctgagtaagatatatctcatggcattagttaatataactgatattgtttaaatcatggtattacatgcaatttatatcagataaaagcagaacacatttttgtactgcctctcttaaatgctgaatgtaactgttatgtataaatccatttagttttatgttctaaagaactatttgtgcaactccagattttcagtaaaatagtattactagtacccaaaaaaaaat

SEQ ID NO: 69187 - DNA, 970 bp, Homo sapiens
tacatttatctgtatctttaaaaattgctacaataatatatgttaattgagtaattcaaaagaaccagtaatgataattacaaaatttagtaaccgttttattggttttgaatccttcagacccctggaatgccctaccaatcctgtggctaattcaaaatatggcccagaattgtcattccctccaaaatatcatctgccagcgagaatatgggccccaaacattttgaccttcacagcgttggtatttaatgaatgttgctgaaggcaagtacttcatatggtgttgcaacttgttcccttgcaggaatggtctgccgaaaaccgaccgacccggttgattggccaccacttgtcctgggactgctcactctgctgaagcagttccattcccggtacaccgagcagttcctggcgctgattggccagtttatctgctccacggtggagcagtgtacaagccagaagatacctgaaattcctgcagatgttgtgggtgcccttctgttcctggaggattatgttcggtacacaaagctacccaggagggttgctgaagcacatgtgcctaatttcatttttgatgagttcagaacagtgctgtaactgtttttcctacttcttcaatggaaggattgtccttagatcttcccaccatcacaaatgaatttgaagatgaaaagaaactcagttgctcatacaactgcattttttctgtctattatgggaaacatcagacgttctgagtaagatatatctcatggcattagttaatataactgatattgtttaaatcatggtattacatgcaatttatatcagataaaagcagaacacatttttgtactgcctctcttaaatgctgaatgtaactgttatgtataaatccatttagttttatgttctaaagaactatttgtgcaactccagattttcagtaaaatagtattactagtacccaaaaaaaaat

SEQ ID NO: 69188 - DNA, 4117 bp, Homo sapiens
aggggcggaagtcggggtctgacccgctccaggtccgggactgcggatagaagaggaccgccgccttgagggaggggtggaaactgggtgccggctccgcgcgcgacctccggccctgcgcgtgcgccgtggcgcggcccggctgacaggttctttaatggaggagccaatctctctgcacacctggtttcatctaataatatacagacaccagctctgaggccagttaatcatccccagtgtccaggcacagagtagtcggtccgcctcacaatgttggactttctagccgagaacaacctctgtggccaagcaatcctaaggattgtttcctgtggtaatgccatcattgctgaacttttgagactctctgagtttattcctgctgtgttcaggttaaaagacagagctgatcaacagaaatatggagatatcatatttgatttcagctattttaagggtccagaattatgggaaagcaaactggatgctaagccagagctacaggatttagatgaagaatttcgtgaaaacaacatagaaattgtgaccagattttatttagcatttcaaagtgtacataaatatattgtagacttaaacagatatctagatgatctcaatgaaggggtttatattcagcaaaccttagaaactgtgcttctcaatgaagatggaaaacaacttctatgtgaagcactgtacttatatggagttatgctactggtcattgaccaaaagattgaaggagaagtcagagagaggatgctggtttcttactaccgatacagtgctgctcgatcttctgctgattcaaatatggacgatatttgtaagctgcttcgaagtacaggttattctagccaaccaggtgccaaaagaccatccaactatcccgagagctatttccagagagtgcctatcaacgaatccttcatcagtatggtcattggtcgactgagatctgatgatatttacaaccaggtctcagcgtatcctttgccggagcatcgcagcacagccctggcaaaccaagctgccatgctgtacgtgattctctactttgagccttccatccttcacacccatcaagcaaaaatgagagagatagtggataaatactttccagataattgggtaattagtatttacatggggatcacagttaatctagtagatgcttgggaaccttacaaagctgcaaaaactgctttaaataataccctggacctttcaaatgtcagagaacaggcaagcagatatgctactgtcagtgaaagagtgcatgctcaagtgcagcaatttctaaaagaaggttatttaagggaggagatggttctggacaatatcccaaagcttctgaactgcctgagagactgcaatgttgccatccgatggctgatgcttcatacagcagactcagcctgtgacccaaacaacaaacgccttcgtcaaatcaaggaccagattctaacagactctcggtacaatcccaggatcctcttccagctgctgttggatactgcacaatttgagtttatactcaaagagatgttcaagcaaatgctttcagaaaagcaaaccaaatgggagcattacaagaaagagggttcggagcggatgactgagcttgctgatgtcttttcaggagtgaaacccctaaccagagtggagaaaaatgaaaaccttcaagcttggttcagagagatctcaaaacaaatattgtctttaaattatgatgattctactgctgcgggcagaaaaactgtacaactgatacaagctttggaagaggttcaagaattccaccagttggaatccaatctgcaagtatgtcagtttcttgccgatactcgaaagtttcttcatcaaatgatcagaaccattaacattaaagaggaggttctgatcacaatgcagatcgttggggacctttctttcgcttggcagttgattgacagtttcacatccatcatgcaagaaagcataagggtaaatccatccatggttactaaactcagagctaccttcctaaagcttgcctctgccctcgatctgccccttcttcgtattaatcaggcaaatagccccgacctgctcagcgtgtcacagtactattctggagagttggtatcctatgtgagaaaagttttgcagatcatcccagaaagcatgtttacatctcttctaaagatcataaagcttcagacccacgacattattgaagtgcctacccgcctggacaaagacaagctgagggactatgctcagctaggcccacgatacgaggttgccaagcttactcatgctatttccatttttactgaaggcatcttaatgatgaaaacgactttggttggcatcatcaaggtggatccaaagcagttgctggaagatggaataaggaaagagcttgtgaagcgcgttgcctttgccctgcataggggactgatattcaaccctcgagccaagccaagtgaattgatgcccaagctgaaagagttgggagcgaccatggatggattccatcgttcttttgaatacatacaggactatgtcaacatttatggtctgaagatttggcaggaagaagtatctcgtatcataaattacaacgtggagcaagagtgtaataactttctaagaacgaagattcaagattggcaaagcatgtaccagtccactcatattccaatacccaagtttacccctgtggatgagtctgtaacgtttattggtcgactctgcagagaaatcctgcggatcacagacccaaaaatgacatgtcacatagaccagctgaacacttggtatgatatgaaaactcatcaggaagtgaccagcagccgcctcttctcagaaatccagaccaccttgggaacctttggtctaaatggcttagacaggcttctgtgctttatgattgtaaaagagttacagaatttcctcagtatgtttcagaaaattatcctgagagacagaactgttcaggacactttaaaaaccctcatgaatgctgtcagtcccctaaaaagtattgtcgcaaattcaaataaaatttatttttccgccattgccaaaacacagaagatttggactgcgtatctcgaggctataatgaaggttgggcagatgcagattctgagacaacagattgccaatgaattaaattattcttgtcggtttgattctaaacatctggcagctgctctggagaatctcaataaggctctcctagcagacattgaagcccactatcaggacccttcacttccttaccccaaagaagataacacacttttatatgaaatcacagcctatctggaggcagctggcattcacaacccactgaataagatatacataacaacaaagcgcttaccctattttccaattgtaaactttctatttttgatcgctcagttgccaaaacttcaatacaacaaaaatctgggaatggtctgccgaaaaccgaccgacccggttgattggccaccacttgtcctgggactgctcactctgctgaagcagttccattcccggtacaccgagcagttcctggcgctgattggccagtttatctgctccacggtggagcagtgtacaagccagaagatacctgaaattcctgcagatgttgtgggtgcccttctgttcctggaggattatgttcggtacacaaagctacccaggagggttgctgaagcacatgtgcctaatttcatttttgatgagttcagaacagtgctgtaactgtttttcctacttcttcaatggaaggattgtccttagatcttcccaccatcacaaatgaatttgaagatgaaaagaaactcagttgctcatacaactgcattttttctgtctattatgggaaacatcagacgttctgagtaagatatatctcatggcattagttaatataactgatattgtttaaatcatggtattacatgcaatttatatcagataaaagcagaacacatttttgtactgcctctccccctcctgaatcgtactgcctgtgtctctacccctttcgttcttggctatccagcgccatttgaaaaaatacaaattatcagtaaaataattaacccgctagttctagtcgcga

SEQ ID NO: 69189 - DNA, 3666 bp, Homo sapiens
aggggcggaagtcggggtctgacccgctccaggtccgggactgcggatagaagaggaccgccgccttgagggaggggtggaaactgggtgccggctccgcgcgcgacctccggccctgcgcgtgcgccgtggcgcggcccggctgacaggttctttaatggaggagccaatctctctgcacacctggtttcatctaataatatacagacaccagctctgaggccagttaatcatccccagtgtccaggcacagagtagtcggtccgcctcacaatgttggactttctagccgagaacaacctctgtggccaagcaatcctaaggattgtttcctgtggtaatgccatcattgctgaacttttgagactctctgagtttattcctgctgtgttcaggttaaaagacagagctgatcaacagaaatatggagatatcatatttgatttcagctattttaagggtccagaattatgggaaagcaaactggatgctaagccagagctacaggatttagatgaagaatttcgtgaaaacaacatagaaattgtgaccagattttatttagcatttcaaagtgtacataaatatattgtagacttaaacagatatctagatgatctcaatgaaggggtttatattcagcaaaccttagaaactgtgcttctcaatgaagatggaaaacaacttctatgtgaagcactgtacttatatggagttatgctactggtcattgaccaaaagattgaaggagaagtcagagagaggatgctggtttcttactaccgatacagtgctgctcgatcttctgctgattcaaatatggacgatatttgtaagctgcttcgaagtacaggttattctagccaaccaggtgccaaaagaccatccaactatcccgagagctatttccagagagtgcctatcaacgaatccttcatcagtatggtcattggtcgactgagatctgatgatatttacaaccaggtctcagcgtatcctttgccggagcatcgcagcacagccctggcaaaccaagctgccatgctgtacgtgattctctactttgagccttccatccttcacacccatcaagcaaaaatgagagagatagtggataaatactttccagataattgggtaattagtatttacatggggatcacagttaatctagtagatgcttgggaaccttacaaagctgcaaaaactgctttaaataataccctggacctttcaaatgtcagagaacaggcaagcagatatgctactgtcagtgaaagagtgcatgctcaagtgcagcaatttctaaaagaaggttatttaagggaggagatggttctggacaatatcccaaagcttctgaactgcctgagagactgcaatgttgccatccgatggctgatgcttcatacagcagactcagcctgtgacccaaacaacaaacgccttcgtcaaatcaaggaccagattctaacagactctcggtacaatcccaggatcctcttccagctgctgttggatactgcacaatttgagtttatactcaaagagatgttcaagcaaatgctttcagaaaagcaaaccaaatgggagcattacaagaaagagggttcggagcggatgactgagcttgctgatgtcttttcaggagtgaaacccctaaccagagtggagaaaaatgaaaaccttcaagcttggttcagagagatctcaaaacaaatattgtctttaaattatgatgattctactgctgcgggcagaaaaactgtacaactgatacaagctttggaagaggttcaagaattccaccagttggaatccaatctgcaagtatgtcagtttcttgccgatactcgaaagtttcttcatcaaatgatcagaaccattaacattaaagaggaggttctgatcacaatgcagatcgttggggacctttctttcgcttggcagttgattgacagtttcacatccatcatgcaagaaagcataagggtaaatccatccatggttactaaactcagagctaccttcctaaagcttgcctctgccctcgatctgccccttcttcgtattaatcaggcaaatagccccgacctgctcagcgtgtcacagtactattctggagagttggtatcctatgtgagaaaagttttgcagatcatcccagaaagcatgtttacatctcttctaaagatcataaagcttcagacccacgacattattgaagtgcctacccgcctggacaaagacaagctgagggactatgctcagctaggcccacgatacgaggttgccaagcttactcatgctatttccatttttactgaaggcatcttaatgatgaaaacgactttggttggcatcatcaaggtggatccaaagcagttgctggaagatggaataaggaaagagcttgtgaagcgcgttgcctttgccctgcataggggactgatattcaaccctcgagccaagccaagtgaattgatgcccaagctgaaagagttgggagcgaccatggatggattccatcgttcttttgaatacatacaggactatgtcaacatttatggtctgaagatttggcaggaagaagtatctcgtatcataaattacaacgtggagcaagagtgtaataactttctaagaacgaagattcaagattggcaaagcatgtaccagtccactcatattccaatacccaagtttacccctgtggatgagtctgtaacgtttattggtcgactctgcagagaaatcctgcggatcacagacccaaaaatgacatgtcacatagaccagctgaacacttggtatgatatgaaaactcatcaggaagtgaccagcagccgcctcttctcagaaatccagaccaccttgggaacctttggtctaaatggcttagacaggcttctgtgctttatgattgtaaaagagttacagaatttcctcagtatgtttcagaaaattatcctgagagacagaactgttcaggacactttaaaaaccctcatgaatgctgtcagtcccctaaaaagtattgtcgcaaattcaaataaaatttatttttccgccattgccaaaacacagaagatttggactgcgtatctcgaggctataatgaaggttgggcagatgcagattctgagacaacagattgccaatgaattaaattattcttgtcggtttgattctaaacatctggcagctgctctggagaatctcaataaggctctcctagcagacattgaagcccactatcaggacccttcacttccttaccccaaagaagataacacacttttatatgaaatcacagcctatctggaggcagctggcattcacaacccactgaataagatatacataacaacaaagcgcttaccctattttccaattgtaaactttctatttttgatcgctcagttgccaaaacttcaatacaacaaaaatctgggaatggtctgccgaaaaccgaccgacccggttgattggccaccacttgtcctgggactgctcactctgctgaagcagttccattcccggtacaccgagcagttcctggcgctgattggccagtttatctgctccacggtggagcagtgtacaagccagaagataattttgctgagttttcagggtttcttctgtaaataaaacataatattt

SEQ ID NO: 69190 - DNA, 3699 bp, Homo sapiens
aggggcggaagtcggggtctgacccgctccaggtccgggactgcggatagaagaggaccgccgccttgagggaggggtggaaactgggtgccggctccgcgcgcgacctccggccctgcgcgtgcgccgtggcgcggcccggctgacaggttctttaatggaggagccaatctctctgcacacctggtttcatctaataatatacagacaccagctctgaggccagttaatcatccccagtgtccaggcacagagtagtcggtccgcctcacaatgttggactttctagccgagaacaacctctgtggccaagcaatcctaaggattgtttcctgtggtaatgccatcattgctgaacttttgagactctctgagtttattcctgctgtgttcaggttaaaagacagagctgatcaacagaaatatggagatatcatatttgatttcagctattttaagggtccagaattatgggaaagcaaactggatgctaagccagagctacaggatttagatgaagaatttcgtgaaaacaacatagaaattgtgaccagattttatttagcatttcaaagtgtacataaatatattgtagacttaaacagatatctagatgatctcaatgaaggggtttatattcagcaaaccttagaaactgtgcttctcaatgaagatggaaaacaacttctatgtgaagcactgtacttatatggagttatgctactggtcattgaccaaaagattgaaggagaagtcagagagaggatgctggtttcttactaccgatacagtgctgctcgatcttctgctgattcaaatatggacgatatttgtaagctgcttcgaagtacaggttattctagccaaccaggtgccaaaagaccatccaactatcccgagagctatttccagagagtgcctatcaacgaatccttcatcagtatggtcattggtcgactgagatctgatgatatttacaaccaggtctcagcgtatcctttgccggagcatcgcagcacagccctggcaaaccaagctgccatgctgtacgtgattctctactttgagccttccatccttcacacccatcaagcaaaaatgagagagatagtggataaatactttccagataattgggtaattagtatttacatggggatcacagttaatctagtagatgcttgggaaccttacaaagctgcaaaaactgctttaaataataccctggacctttcaaatgtcagagaacaggcaagcagatatgctactgtcagtgaaagagtgcatgctcaagtgcagcaatttctaaaagaaggttatttaagggaggagatggttctggacaatatcccaaagcttctgaactgcctgagagactgcaatgttgccatccgatggctgatgcttcatacagcagactcagcctgtgacccaaacaacaaacgccttcgtcaaatcaaggaccagattctaacagactctcggtacaatcccaggatcctcttccagctgctgttggatactgcacaatttgagtttatactcaaagagatgttcaagcaaatgctttcagaaaagcaaaccaaatgggagcattacaagaaagagggttcggagcggatgactgagcttgctgatgtcttttcaggagtgaaacccctaaccagagtggagaaaaatgaaaaccttcaagcttggttcagagagatctcaaaacaaatattgtctttaaattatgatgattctactgctgcgggcagaaaaactgtacaactgatacaagctttggaagaggttcaagaattccaccagttggaatccaatctgcaagtatgtcagtttcttgccgatactcgaaagtttcttcatcaaatgatcagaaccattaacattaaagaggaggttctgatcacaatgcagatcgttggggacctttctttcgcttggcagttgattgacagtttcacatccatcatgcaagaaagcataagggtaaatccatccatggttactaaactcagagctaccttcctaaagcttgcctctgccctcgatctgccccttcttcgtattaatcaggcaaatagccccgacctgctcagcgtgtcacagtactattctggagagttggtatcctatgtgagaaaagttttgcagatcatcccagaaagcatgtttacatctcttctaaagatcataaagcttcagacccacgacattattgaagtgcctacccgcctggacaaagacaagctgagggactatgctcagctaggcccacgatacgaggttgccaagcttactcatgctatttccatttttactgaaggcatcttaatgatgaaaacgactttggttggcatcatcaaggtggatccaaagcagttgctggaagatggaataaggaaagagcttgtgaagcgcgttgcctttgccctgcataggggactgatattcaaccctcgagccaagccaagtgaattgatgcccaagctgaaagagttgggagcgaccatggatggattccatcgttcttttgaatacatacaggactatgtcaacatttatggtctgaagatttggcaggaagaagtatctcgtatcataaattacaacgtggagcaagagtgtaataactttctaagaacgaagattcaagattggcaaagcatgtaccagtccactcatattccaatacccaagtttacccctgtggatgagtctgtaacgtttattggtcgactctgcagagaaatcctgcggatcacagacccaaaaatgacatgtcacatagaccagctgaacacttggtatgatatgaaaactcatcaggaagtgaccagcagccgcctcttctcagaaatccagaccaccttgggaacctttggtctaaatggcttagacaggcttctgtgctttatgattgtaaaagagttacagaatttcctcagtatgtttcagaaaattatcctgagagacagaactgttcaggacactttaaaaaccctcatgaatgctgtcagtcccctaaaaagtattgtcgcaaattcaaataaaatttatttttccgccattgccaaaacacagaagatttggactgcgtatctcgaggctataatgaaggttgggcagatgcagattctgagacaacagattgccaatgaattaaattattcttgtcggtttgattctaaacatctggcagctgctctggagaatctcaataaggctctcctagcagacattgaagcccactatcaggacccttcacttccttaccccaaagaagataacacacttttatatgaaatcacagcctatctggaggcagctggcattcacaacccactgaataagatatacataacaacaaagcgcttaccctattttccaattgtaaactttctatttttgatcgctcagttgccaaaacttcaatacaacaaaaatctgggaatggtctgccgaaaaccgaccgacccggttgattggccaccacttgtcctgggactgctcactctgctgaagcagttccattcccggtacaccgagcagttcctggcgctgattggccagtttatctgctccacggtggagcagtgtacaagccagaagatacctgaaattcctgcagatgttgtgggtgcctctgtctgagatattcgtacacagctaccagagtgctgacgaattctatca

SEQ ID NO: 69191 - DNA, 3835 bp, Homo sapiens
aggggcggaagtcggggtctgacccgctccaggtccgggactgcggatagaagaggaccgccgccttgagggaggggtggaaactgggtgccggctccgcgcgcgacctccggccctgcgcgtgcgccgtggcgcggcccggctgacaggttctttaatggaggagccaatctctctgcacacctggtttcatctaataatatacagacaccagctctgaggccagttaatcatccccagtgtccaggcacagagtagtcggtccgcctcacaatgttggactttctagccgagaacaacctctgtggccaagcaatcctaaggattgtttcctgtggtaatgccatcattgctgaacttttgagactctctgagtttattcctgctgtgttcaggttaaaagacagagctgatcaacagaaatatggagatatcatatttgatttcagctattttaagggtccagaattatgggaaagcaaactggatgctaagccagagctacaggatttagatgaagaatttcgtgaaaacaacatagaaattgtgaccagattttatttagcatttcaaagtgtacataaatatattgtagacttaaacagatatctagatgatctcaatgaaggggtttatattcagcaaaccttagaaactgtgcttctcaatgaagatggaaaacaacttctatgtgaagcactgtacttatatggagttatgctactggtcattgaccaaaagattgaaggagaagtcagagagaggatgctggtttcttactaccgatacagtgctgctcgatcttctgctgattcaaatatggacgatatttgtaagctgcttcgaagtacaggttattctagccaaccaggtgccaaaagaccatccaactatcccgagagctatttccagagagtgcctatcaacgaatccttcatcagtatggtcattggtcgactgagatctgatgatatttacaaccaggtctcagcgtatcctttgccggagcatcgcagcacagccctggcaaaccaagctgccatgctgtacgtgattctctactttgagccttccatccttcacacccatcaagcaaaaatgagagagatagtggataaatactttccagataattgggtaattagtatttacatggggatcacagttaatctagtagatgcttgggaaccttacaaagctgcaaaaactgctttaaataataccctggacctttcaaatgtcagagaacaggcaagcagatatgctactgtcagtgaaagagtgcatgctcaagtgcagcaatttctaaaagaaggttatttaagggaggagatggttctggacaatatcccaaagcttctgaactgcctgagagactgcaatgttgccatccgatggctgatgcttcatacagcagactcagcctgtgacccaaacaacaaacgccttcgtcaaatcaaggaccagattctaacagactctcggtacaatcccaggatcctcttccagctgctgttggatactgcacaatttgagtttatactcaaagagatgttcaagcaaatgctttcagaaaagcaaaccaaatgggagcattacaagaaagagggttcggagcggatgactgagcttgctgatgtcttttcaggagtgaaacccctaaccagagtggagaaaaatgaaaaccttcaagcttggttcagagagatctcaaaacaaatattgtctttaaattatgatgattctactgctgcgggcagaaaaactgtacaactgatacaagctttggaagaggttcaagaattccaccagttggaatccaatctgcaagtatgtcagtttcttgccgatactcgaaagtttcttcatcaaatgatcagaaccattaacattaaagaggaggttctgatcacaatgcagatcgttggggacctttctttcgcttggcagttgattgacagtttcacatccatcatgcaagaaagcataagggtaaatccatccatggttactaaactcagagctaccttcctaaagcttgcctctgccctcgatctgccccttcttcgtattaatcaggcaaatagccccgacctgctcagcgtgtcacagtactattctggagagttggtatcctatgtgagaaaagttttgcagatcatcccagaaagcatgtttacatctcttctaaagatcataaagcttcagacccacgacattattgaagtgcctacccgcctggacaaagacaagctgagggactatgctcagctaggcccacgatacgaggttgccaagcttactcatgctatttccatttttactgaaggcatcttaatgatgaaaacgactttggttggcatcatcaaggtggatccaaagcagttgctggaagatggaataaggaaagagcttgtgaagcgcgttgcctttgccctgcataggggactgatattcaaccctcgagccaagccaagtgaattgatgcccaagctgaaagagttgggagcgaccatggatggattccatcgttcttttgaatacatacaggactatgtcaacatttatggtctgaagatttggcaggaagaagtatctcgtatcataaattacaacgtggagcaagagtgtaataactttctaagaacgaagattcaagattggcaaagcatgtaccagtccactcatattccaatacccaagtttacccctgtggatgagtctgtaacgtttattggtcgactctgcagagaaatcctgcggatcacagacccaaaaatgacatgtcacatagaccagctgaacacttggtatgatatgaaaactcatcaggaagtgaccagcagccgcctcttctcagaaatccagaccaccttgggaacctttggtctaaatggcttagacaggcttctgtgctttatgattgtaaaagagttacagaatttcctcagtatgtttcagaaaattatcctgagagacagaactgttcaggacactttaaaaaccctcatgaatgctgtcagtcccctaaaaagtattgtcgcaaattcaaataaaatttatttttccgccattgccaaaacacagaagatttggactgcgtatctcgaggctataatgaaggttgggcagatgcagattctgagacaacagattgccaatgaattaaattattcttgtcggtttgattctaaacatctggcagctgctctggagaatctcaataaggctctcctagcagacattgaagcccactatcaggacccttcacttccttaccccaaagaagataacacacttttatatgaaatcacagcctatctggaggcagctggcattcacaacccactgaataagatatacataacaacaaagcgcttaccctattttccaattgtaaactttctatttttgatcgctcagttgccaaaacatgaaagactgtgaaaatgaatctggaggtgacccaagcattgaattcaacaatccaggctgggtgcggtggctcacaccgggaggctgaggtaggcagatcacctgaggtcagggaagaggttgcagtgagctgagatcacatcactgcactccaacctgggcgacagagagactgtctcaaaagaaaaaaaaaattgtgcttcaggccctgtgtagaacaattggaaattatggaaaagcagaggaaacaacttggtattaagcagtatagtgtggtggctcagagcaaattcgcctctgctgctgaggctggttacgtcatctctccgtgcctcagtttccctatttgggataacgtattacctagtgaatagcggtgacttgaggtaatccgtgaggg

SEQ ID NO: 69192 - DNA, 2990 bp, Homo sapiens
aggggcggaagtcggggtctgacccgctccaggtccgggactgcggatagaagaggaccgccgccttgagggaggggtggaaactgggtgccggctccgcgcgcgacctccggccctgcgcgtgcgccgtggcgcggcccggctgacaggttctttaatggaggagccaatctctctgcacacctggtttcatctaataatatacagacaccagctctgaggccagttaatcatccccagtgtccaggcacagagtagtcggtccgcctcacaatgttggactttctagccgagaacaacctctgtggccaagcaatcctaaggattgtttcctgtggtaatgccatcattgctgaacttttgagactctctgagtttattcctgctgtgttcaggttaaaagacagagctgatcaacagaaatatggagatatcatatttgatttcagctattttaagggtccagaattatgggaaagcaaactggatgctaagccagagctacaggatttagatgaagaatttcgtgaaaacaacatagaaattgtgaccagattttatttagcatttcaaagtgtacataaatatattgtagacttaaacagatatctagatgatctcaatgaaggggtttatattcagcaaaccttagaaactgtgcttctcaatgaagatggaaaacaacttctatgtgaagcactgtacttatatggagttatgctactggtcattgaccaaaagattgaaggagaagtcagagagaggatgctggtttcttactaccgatacagtgctgctcgatcttctgctgattcaaatatggacgatatttgtaagctgcttcgaagtacaggttattctagccaaccaggtgccaaaagaccatccaactatcccgagagctatttccagagagtgcctatcaacgaatccttcatcagtatggtcattggtcgactgagatctgatgatatttacaaccaggtctcagcgtatcctttgccggagcatcgcagcacagccctggcaaaccaagctgccatgctgtacgtgattctctactttgagccttccatccttcacacccatcaagcaaaaatgagagagatagtggataaatactttccagataattgggtaattagtatttacatggggatcacagttaatctagtagatgcttgggaaccttacaaagctgcaaaaactgctttaaataataccctggacctttcaaatgtcagagaacaggcaagcagatatgctactgtcagtgaaagagtgcatgctcaagtgcagcaatttctaaaagaaggttatttaagggaggagatggttctggacaatatcccaaagcttctgaactgcctgagagactgcaatgttgccatccgatggctgatgcttcatacagcagactcagcctgtgacccaaacaacaaacgccttcgtcaaatcaaggaccagattctaacagactctcggtacaatcccaggatcctcttccagctgctgttggatactgcacaatttgagtttatactcaaagagatgttcaagcaaatgctttcagaaaagcaaaccaaatgggagcattacaagaaagagggttcggagcggatgactgagcttgctgatgtcttttcaggagtgaaacccctaaccagagtggagaaaaatgaaaaccttcaagcttggttcagagagatctcaaaacaaatattgtctttaaattatgatgattctactgctgcgggcagaaaaactgtacaactgatacaagctttggaagaggttcaagaattccaccagttggaatccaatctgcaagtatgtcagtttcttgccgatactcgaaagtttcttcatcaaatgatcagaaccattaacattaaagaggaggttctgatcacaatgcagatcgttggggacctttctttcgcttggcagttgattgacagtttcacatccatcatgcaagaaagcataagggtaaatccatccatggttactaaactcagagctaccttcctaaagcttgcctctgccctcgatctgccccttcttcgtattaatcaggcaaatagccccgacctgctcagcgtgtcacagtactattctggagagttggtatcctatgtgagaaaagttttgcagatcatcccagaaagcatgtttacatctcttctaaagatcataaagcttcagacccacgacattattgaagtgcctacccgcctggacaaagacaagctgagggactatgctcagctaggcccacgatacgaggttgccaagcttactcatgctatttccatttttactgaaggcatcttaatgatgaaaacgactttggttggcatcatcaaggtggatccaaagcagttgctggaagatggaataaggaaagagcttgtgaagcgcgttgcctttgccctgcataggggactgatattcaaccctcgagccaagccaagtgaattgatgcccaagctgaaagagttgggagcgaccatggatggattccatcgttcttttgaatacatacaggactatgtcaacatttatggtctgaagatttggcaggaagaagtatctcgtatcataaattacaacgtggagcaagagtgtaataactttctaagaacgaagattcaagattggcaaagcatgtaccagtccactcatattccaatacccaagtttacccctgtggatgagtctgtaacgtttattggtcgactctgcagagaaatcctgcggatcacagacccaaaaatgacatgtcacatagaccagctgaacacttggtatgatatgaaaactcatcaggaagtgaccagcagccgcctcttctcagaaatccagaccaccttgggaacctttggtctaaatggcttagacaggcttctgtgctttatgattgtaaaagagttacaggtgagccttttgactttcatgcctgttttctgccaccctgggggagaggc

SEQ ID NO: 69193 - DNA, 390 bp, Homo sapiens
gcccagaaatatttctttttcccctttttaacattatctcaatagcagatagagagggaagcacaaagatagaatcctggagagggcagactggaatgtggtttactgagaacctcaaagaaggtaaattcatcttcaccacttacaaatttgggccatggagttggccagtaaatcagtgccctaccaaagatgaattcctatatttttagcgatggtagctgactccctatcaaccaaaggctgggtgtcagttggagtatatacttcttggcaaaaaactacaaccttaacttaccaagatttagttcctagccattttaaatctgcttaacagaaagctcagctcattctccagacagcctcagatagctcattgatggtggccta

SEQ ID NO: 69194 - DNA, 954 bp, Homo sapiens
tccaacataatacaacaaaacacacccgcgtctaatcctattatagcgcactcgtcaatatccggcctatggtaacatctccgttttcagaagctcagaaaagtaagctgcttgctcaagaatggacggcttcaaggtggcagagctggaagtttctaactcactcacctcatactcagacctgcactgtttttcaagacagtcaatatttcaggccatctactgattggatgaggcccaccagcattctgaaagacaaggaatctgagacctggctgggagaagaggacttgcctaaagttatcccacacagcaaattagttggaaaaccaggatagttgagtaaatatcctggagcccagccaagtaatgaagccagaattcagaaagctgttttggctagatcttggatttttacaataaagggtctgtaagggatatttgtgaaaaatgttgacacttgacggctgtcctgattcattcagctacctaggttatctctgcctctctttgacttgtgttttgtcttttaagatggcagtcttgctcttttgcctgggctggtcttgaactcctgggctcaagcagttttcctgctttagcctcctgagtagctggggctacaggaggacatcactgtgcccagctctctccgtatctttgactaggttattttacaaccccatacgatagaaatgaagttatagaaaactgataggaatacaaataattattatccatggaaatgcaaattggatctaatggaatgaaactgattttttttccagcagatagtgaccacctttgtatccttttgtaaattcatttcagcattccatatttgactaaaaatgtgtgacactcccaatttgcttttgaattcattgtaatatctaccaattccctcattaattaatgagttaaataaagcctttggcatgtatttattttgta

SEQ ID NO: 69195 - DNA, 941 bp, Homo sapiens
ctctcaatcaaactaatttccagctttgattaataatcacagcgtaattcggcctatggtaacatctccgttttcagaagctcagaaaagtaagctgcttgctcaagaatggacggcttcaaggtggcagagctggaagtttctaactcactcacctcatactcagacctgcactgtttttcaagacagtcaatatttcaggccatctactgattggatgaggcccaccagcattctgaaagacaaggaatctgagacctggctgggagaagaggacttgcctaaagttatcccacacagcaaattagttggaaaaccaggatagttgagtaaatatcctggagcccagccaagtaatgaagccagaattcagaaagctgttttggctagatcttggatttttacaataaagggtctgtaagggatatttgtgaaaaatgttgacacttgacggctgtcctgattcattcagctacctaggttatctctgcctctctttgacttgtgttttgtcttttaagatggcagtcttgctcttttgcctgggctggtcttgaactcctgggctcaagcagttttcctgctttagcctcctgagtagctggggctacaggaggacatcactgtgcccagctctctccgtatctttgactaggttattttacaaccccatacgatagaaatgaagttatagaaaactgataggaatacaaataattattatccatggaaatgcaaattggatctaatggaatgaaactgattttttttccagcagatagtgaccacctttgtatccttttgtaaattcatttcagcattccatatttgactaaaaatgtgtgacactcccaatttgcttttgaattcattgtaatatctaccaattccctcattaattaatgagttaaataaagcctttggcatgtatttattttgta

SEQ ID NO: 69196 - DNA, 1204 bp, Homo sapiens
tgaattcagacactttcagtttagaggataatgccctctgaacaacctcaggccaaaagggcagagacagagaagcctctggaggttcggaaggacagattcatcagacggcagagccggaagcgattttacaccccttctgcaggagtgagaggagtagctgtttgacccccgctgcctcagctgaggccaaaaggcacggctgatttccacttaaggatgtcaaagaggtcagatggataatgtgctgatgtcataacaagattcagagggtggcacatctcacacatgagcatgaacacccaatcatcatgttcatgaactgcaaaaggatctgcagaagctcagaaaagtaagctgcttgctcaagaatggacggcttcaaggtggcagagctggaagtttctaactcactcacctcatactcagacctgcactgtttttcaagacagtcaatatttcaggccatctactgattggatgaggcccaccagcattctgaaagacaaggaatctgagacctggctgggagaagaggacttgcctaaagttatcccacacagcaaattagttggaaaaccaggatagttgagtaaatatcctggagcccagccaagtaatgaagccagaattcagaaagctgttttggctagatcttggatttttacaataaagggtctgtaagggatatttgtgaaaaatgttgacacttgacggctgtcctgattcattcagctacctaggttatctctgcctctctttgacttgtgttttgtcttttaagatggcagtcttgctcttttgcctgggctggtcttgaactcctgggctcaagcagttttcctgctttagcctcctgagtagctggggctacaggaggacatcactgtgcccagctctctccgtatctttgactaggttattttacaaccccatacgatagaaatgaagttatagaaaactgataggaatacaaataattattatccatggaaatgcaaattggatctaatggaatgaaactgattttttttccagcagatagtgaccacctttgtatccttttgtaaattcatttcagcattccatatttgactaaaaatgtgtgacactcccaatttgcttttgaattcattgtaatatctaccaattccctcattaattaatgagttaaataaagcctttggcatgtatttattttgta

SEQ ID NO: 69197 - DNA, 493 bp, Homo sapiens
cccccctcaaaaaaaagttttttcttaattaaaaacaaaaatactttagggtgatttgcaatataattttccaaatgtctcagggattataaatacagacttgcactattatgacgcctctagttatgtatggctattgaagtaaaattaaagactcagatttttttatttgcactagccacattctgcatgttcaaccatcacatttgtctagtggctaccacgtagaacagtgcagatgtagaacacttccatcaccacataaagtcctattggactgcaccactatttaaagatctgagctgaaattgtactgactccagaatctacaatagggcattttgatggtatttaaatagaaatctaggccaggcaccttggctcacactattaatcccagcactttgggatgctgaggctggaggatcgcttgagcccgggagttccagaccagcctgggcaatatagtgagacctcgtctctacagaaaaaa

SEQ ID NO: 69198 - DNA, 845 bp, Homo sapiens
gagtggtaatagagaaatatctgcaaggacagcattgaactcagaactctgtgcaacgatgaaccctgaagctaattatgtaaaaagagagtttggccattatctcagaatagagttagtcggaatacacagtcttaattattgatacacaaatatgctgaagtaataccaagagaaaaaaaagtggacatgtttaggaaaattagagggaattgcaatactgaagaaaagaatatcatcctaaagacctggaaacttattgccctgaaaattagctgctgcaggcttcagaggaaatttccagaaatgttggtgtccttagtggcataacagagaatctgaactcagtaaagatagagtagaaatatacaagtagagaagagtctctaaagtgaaaagagaaatagatacaacaaagaaggacttcagggagctctgaaatactgtatcaaaataaatgcaataaaaagtaacactgaagaatataaaataattgatagttaatagataaacttgatctgatcttaaatgtatctgaaaaggataatgagatggaaactaagaaagaacagatatgaatatcagaggatggaggtccagtgtgagaattaaaggtgtctctaaggaaggtgaaagaacatttggcatagaatcaatgatcaaagacattaagaaactttctctgagttaaaagtatatggtcactaagttttaggcaaaaccagtattaaagcaaccttagaaacaggttagaaagaagcaattaaaagcatgcagaaagaaaaattctggttatctgcaaaaccaaaaagggagggtggatacagagctctgcaacgtcgaac

SEQ ID NO: 69199 - DNA, 2265 bp, Homo sapiens
gtaacttgacagcacaacagagctggtgagtggaagttggaattgaaccagctttaggtcctcaattttcaacaaatagaccatattttcagtttccaaggccttctgctaaggctgaaagaaggtagattgaaagaggttcttgtcctcaaactactcacagtggtaatacttgaatttcttctacctggctcagttgttggtcaagactcttgctcctcttggtgcagtccagagaccagcagcattggcatcatccagaactaggcttggatgcttctcaaacattaatgtggacttcgaatcacctgggatgtctttacaatgcagactcttattcagtaggtttgagatggggcccaagatgcttttctgacaagtttcctggtgatgcaatgttgctgttggggaaacctccatttggtgagttctacaatttgtcttgtttttcagtgtgtctaaggtaggcccagtataccttactgggttccttactgagtcgtagctttcctccaattctgatgttctcttgattcaaatagaagagctttcaccttggcttcttggctatggccctctgctgccctgggtcccaacctacatagctatggccctgcctgcctgcttatctctagcttagactttcgagtccacactcccagttaccagtgatgttctaacatcagcctggttgaggatcttcattccctcctcttcatcaaaaccaactgtgaagcccattaaaaacctgtaagccttctaggtctacaaccatagattttaattctggggctagtctttggaattttattttcatttacaaagttttatagttgattctgatgggtgtcacatactgagaacaacttccctaggggcccctgctatgctctgacctgatgggaacctcttggaaagtaatattggcatggcttgggttcaagtttgcaatacactgagaactttttctctatgcctctgtgttagcaatgagagcacagcatggagagaacttaaaactttactgaactagtttcagaaggctttgctgagtgattggcatttgaattggatagccattgaatgaagaggtcctttgttcaggccaaaggagtggtatatgcaatgatagttaaaagtgagaagtgccttaagtaaacatccatttggacaaaagtgtttgtttaacacatggaaaggagaagtaggagataaaattataaaggtaggtaaaagcctcacttttagaacttcatgtgttacaccaaacagtatgtgctttattctacatattgtgaggattatcagagattaagatggaaagcaagctgatcagatgtgtgtctcagaaagataaccttggcattgaggaagatgaattcagtgaggcaagactgaagacaaagagaccagttaggtacgtgtggtaatagagtgtgagagatgaagagggatcctttccttgtgccatatgcctgggccctgaacctaagttcctctgtctcagacactgatgatgcttttttttttttacagttacatttcatagcaatagcctgctaagcctcttagactttataaatggcatggccttgagcattcaggtaactcaaagcttttatgagccatcagtggttcttacttctcctgattattttattttatagtgctgagacagctagctctagggttcttccctcaggagatacttagagtttttaaggtaattatttggtagaaaatcttctactaatggcctaagataaatttgaaaccagttaatgagcagctatatgaatccaatggttgggagagttgtgtctaggcctgttgaatgcactgctttgctctacctttggagaaagactttgcgttatccttgacctagcttgatttttttaggtactgcctctggatttgttccttttagagcgacagctccagtcagttgccttttaaaagtaagcgtagatgtggctgggcgcggcagctcacgcctgtaatcccagcactttgggaggtgttggtgggtggatcacctgaggtcaggggtttgagaccagcctggccaacatggagaaaccccgtctctactaaaaatacaaaaattagccaggcatggtggcgggtgcctgtaatcccagctactcgggaggctgaggcaggagaattgcttgaacctgggaggggaggttgcagtgactgagattgcaccattgcactccagcctgggcgacagggtaagactctgtctcaaaaaaaaaa

SEQ ID NO: 69200 - DNA, 168 bp, Homo sapiens
  misc_feature (63)..(63): n is a, c, g, or t
tacaagtgtaaagaatgtggtgaagccttcagtcagagctcaactcttacaaaacatataaangtctacactggagagaaaccctacacctgtaaagactgtaggaaagccttcagccagagttcatctcttacccagcatcagagggttcatactggaaagaaacca

SEQ ID NO: 69201 - DNA, 216 bp, Homo sapiens
gattcttaaagaatggacaatcaggttcttactgttttcaagacaattattctttagatccacttggcatagtctattccaaaattaataattcttccttttgaatcaaaacaaatttagaaattctaacatgatttacagtaacaagctctttttatctgctcatcagtagatagaaaatatgtgtttttgttttataactggcttttatatact

SEQ ID NO: 69202 - DNA, 375 bp, Homo sapiens
aaaacgcttctgtttggtgtctggaccctgctggccttgatcctttgcccagacccaggacccagtggaattgagaccttcttaaagaaaactcaggtgggcaaagggcctcagtggaaagagtttcttctggaggatgtcacagagaattccatcctgcagtgcttcttctcttgtgcagggattcaaaaggacacaagccttggcatcactgtgtattagccaccagagcaagtgatcctggagctgcagcctgcctgggtggctgtggacgaagccttcacagtgaagtgtcatgtacccagtgtagcacccttggagagtctcacccttgcccttctccagggtaaccaagaactgcatagaaagaacttt

SEQ ID NO: 69203 - DNA, 296 bp, Homo sapiens
cccgccaataccaaaatctgaggatgctcaaaactctatttatataatatggcatagtatttgcatacaacctacacacatcttctcatatgctttaaatcacctctagattatctacaatatgtaatactatctaaattgttgttataccatattgtttttattcatattattttttatagttgtactgttatttcttttgttttggaatatttttatacacggttgaatgtgcagatacaaagggtcatctgtattattctaaaattaaataaaactatatattatttgccttt

SEQ ID NO: 69204 - DNA, 440 bp, Homo sapiens
aaattaaggcagaaaaccaacaaaaagaaaaaaaaaaaaacgaagaaagaaaactcaagtcagtgttggccaagagggttgggagtcagacagtctcataccaggctggtagaaatacaacgtggaacaaccttttgtggggcagtttggcaataagactaatatgctcgtttcaaaagccttaaatgcacgtttgtgctttgacccggcaattccactttgggaaatttccccgcggggaataattaaggatgtgttcgcaaacttagccgcagaaggcactctataaatagttgttaaatgaagaagtaagtggtactcattgctgcattgtttataataatgaaaattccaataacggggaaaaaaatcaaataatgatggttctggccataaaatggaatcctttgcagccattaaatatgatttggtaaacacgt

SEQ ID NO: 69205 - DNA, 2981 bp, Homo sapiens
  misc_feature (278)..(278): n is a, c, g, or t
  misc_feature (893)..(893): n is a, c, g, or t
  misc_feature (907)..(907): n is a, c, g, or t
  misc_feature (916)..(916): n is a, c, g, or t
  misc_feature (931)..(931): n is a, c, g, or t
  misc_feature (973)..(973): n is a, c, g, or t
  misc_feature (1033)..(1033): n is a, c, g, or t
  misc_feature (1073)..(1073): n is a, c, g, or t
  misc_feature (2750)..(2751): n is a, c, g, or t
  misc_feature (2759)..(2759): n is a, c, g, or t
  misc_feature (2777)..(2777): n is a, c, g, or t
  misc_feature (2819)..(2819): n is a, c, g, or t
  misc_feature (2822)..(2824): n is a, c, g, or t
  misc_feature (2864)..(2864): n is a, c, g, or t
  misc_feature (2873)..(2873): n is a, c, g, or t
  misc_feature (2891)..(2891): n is a, c, g, or t
  misc_feature (2937)..(2937): n is a, c, g, or t
  misc_feature (2960)..(2960): n is a, c, g, or t
  misc_feature (2962)..(2963): n is a, c, g, or t
  misc_feature (2965)..(2965): n is a, c, g, or t
  misc_feature (2976)..(2976): n is a, c, g, or t
  misc_feature (2980)..(2980): n is a, c, g, or t
ggcagcgtccgcgggaggtgaggtggctgtggggacccaggtggcctcttccctggggccttgctaatgacggcaaaatccgggttctgccaaaatatatttaaaaaggtttattcctagtcagtatgagtgactgtggcccaggttattcagcctcaagaggtcctgtgaaagtgcccgagatggtcaggcttgcaggttaattttatacaattcagggagacaggaatttcaggtaaagtcataaatcaggctgagcagtgtggctcatgcctgtngtcccagcactttgggaggccaggagttccagagcagcctgggcagcacagcaagaccctgtctctacatgaaattagaaaaataaaaaaattagcggggcgtggtgtcccatgcctgtggcctcagctacttgggaggcccagtcagttgagtccaggaggtggaggctgtaaccagctatgttggctgcactgcacgctagcctgggtaacacagcgagatcctgcctccaaaaagaaaatcataaatcaataagagaaagatatacacgggttcctcccaaaaagctggtatatctccaaagggtttacacctcatgggggcacttagggattctttagtggacagttggttgagagacttaagctactgcctgaagactggaatcagaagcatgccagagttaaggggattgcgtagatcaaagttcttattatgtagatgaagcctcttagttggcaactctcagaatagatggtaaatgtctgttttcagttttttgggtttttgtgtttttgtttttgtttttagagagagtcttgctctgtcgcccaggctagagtgcagtggcgtgatctcagctcactgcaacctccacctcccaggtttgagcngttctcctgcctcngcctcctgngtagctgggactacnggcgcccgccaccacgcctggctaatttttgtatttttagtngagatggggtttcaccatgttgctgaggctggtcttgacttcctgacctcaggtgatccncccacctctacctcccaaagtgctgggattacaggcgtgngccaccgcgcgtcaggctggctgtctcttccagacctaagaaaggcttagaacaaaggaggtctggctacattaatggagattcgctgcagatgcaaattttcccactaaagatagctttgcggggctatccatttcaatctgttgcccctgtggcagccacttcaaaacatgtcaaagaagtatattttggggtaaaataatttccttcagcatctgctgtcatgtgatgctgtaccagagtcaggttggaaagtgagcctcattatataagagtaataaaactcatctgatgagattttatggtttctcgggcaggattccccaagcctcatacataggcatttgggcaagggaaaaaaggtgaatttagtcctcaccaggttggtagggcttcctcggttattggagtgggagtaacagcaaccattgggcccagcagtttttttaaatgtctctggggctgtggactgaccatccaaataactgattttaatcatttcattatggaaaaattgtcagcagaacccccaagtagagagacccatcagtcaagatatacctcatgaccttgcaagctaatctagcttgacccagatcccctcctaatctgtgcagattcattgaggaatgtcatagccatgcctactggttaagacatagtcctttacagtgagagttgaaacccaagctctatcactttcttggctgtgttgctttgagaaaggcatttaaatgttttgtgcctgtttcctcatctgaaattggtgggtaatagtcacttcataggacagttgtgaagattgaatgcagaaaaatttgtgccacgcctggaaccgtccctggcatatattaaattctaaaaaagtgttaaatattataatgaatatcaacacttccttattctggaagcaccgacaggatatgctgtgtttagtgttagcatcatgtcaggacagggtctgttgcgatgcccacactcaggatctgttcccaggaacctgcgtaaagttttcttctctggaagactttgggtcctttttttttaacaagaagaggctctaccctgggactgggaatttccaaggccacctttgaggatcgcagagctcattttagagccattttagtccccagctcctcttcctccactcccacgttacccgtgagaggactgtctgcagggtaagggaggacagcccaaccccaggtggggacttcttatgtattgccttcctgcagtgccttctctgccctaaaccatggtgggtttcctttgctaatgtctgacatcttgtgccctacactgtcccatctgaggctcagaacctctcagccggttctcatggggaacgttccccagatctgatgccctcattcaggacacttccatcattgtccctacatttcttctctcagtgctttattcaggctgctgcattcgtggtgcagaccaggtcttgtaaaaaattattcagtcagcatgtgctgagccattgtcctgtcccagggacagggctttatagtcattgccctattcatctcttcaaccaatgtggaagttaggaattggaatccccatttcacagactaagaagtggcgtgttaatcagttgaaataatttttacggcttggcgtggtggcccatacctgtaatcccagcactttgggaggccnnggcgggcngattacctgaggccaggngttcgagaccagcctggccaacatggtgaaacctcatctctnctnnnaatacagaaattagccaggcatggtggctcacgcctgtantcccaactnctctggagcctgaagcangataatcgcttgaatccaggagatggaggttgcagtgagcagagancatgccactgcactacagcctgngnnanagtgagactcngtcnc

SEQ ID NO: 69206 - DNA, 342 bp, Homo sapiens
ccatccaggaaaacatgacctcaccaaactaactaaagcactagggaccaatcccaaagagacagaaatatgtgaactttcagaccgaattcaaaaggaactcggttttgaggaaagtcaaagaaattcaaaataacacagaaggaattcagaatcttttcagataaatttaacaaagagattgaaacgattaagtagaatcaagcagaaattctggatttgaaaaatgcagttgacatgccgaaggatgtttcagtctcttaacagcagaattgatgaagcagaagaaagaatcagtgagcttgaagacaagctacttgaaaatacatggtcacagacaaa

SEQ ID NO: 69207 - DNA, 541 bp, Homo sapiens
ccccatgataaatggcatccagtagagggtactgatggtatgctctgcccatgaacttgctggttggatggacttcgaaatcctaaatacccactgtggtcccaccttttctagtggcattgatggaatagagccttccagcttaaggaagagaaagaagtagcatctctaacatctctcttttggacctctttatttctctcttaccgagatcaactagcatttcctcttgctgcagctgcacagcccccaggctcctggctttgtttatacaaacatgtgtggaatgctagggaccagcaggactggattccttaaaagccttagtagcttaaagggcttttacctgctatgtccaacacgtttattacggctgttctctgccaagagtttgaaattattagatatctcaattcccactggcattttttaaaattatttccagttaagccttcaattttaaaatgactcaccagcatcttgtcaaatctgtgtattttgaacatacttttaggtgaaatgtgtcattgtgtgtatctgg

SEQ ID NO: 69208 - DNA, 953 bp, Homo sapiens
tagatgaggcctcccaatattgcccaggtagcactcctggctcaagcaatcctcctacctctcagcatcctaagaagctgagagtacaggcatgagccaccgtgcccagctgtatctgcttcttcctgtatctgcttctttctctcacaaggcacagggatcccagggccaaacagcattaacaacttgccatgtcccaaagcattcactggtggtaccacaaagacgttacctaaggacactgaaaagacataagatgcatgaccagaaacttttctgaccagactcagaggcagagatttggcttgtgatgtggcacaacataggcattgtaccaggacagacatcacagggacctgcatctgcatcaggacagaggtgaactccaaagaactccactgagagactaccgtccacccagtcaccagtgagatgggcctgctctgtgacaggaacaaacagagatcactcttgcaaggtgaggtgattctaagacttgaatcaagagtaagaacgtgcaagaaggatgaggatgagacatacctgacagtaacaatacttgtcatcccctccacagaaggcacaggcaacatttccaagcaaaagcaaatgagatgctacaaaacagaggtaatcatccagaaaagctttagattgaatttcattaccctctaggtcttgcctaaacaaatagagactgggtctccttgcaccaaaagcaaattacatattgtaggtcaacagcctgccccatggaaagggtctctgacagagagctaagagattttttatctaattctgaaaagctaggtgaactctagacctcagttcctccctgcaaaattgtagaatactatccaattcatagaaatgctgtgataaatgtaatataacttggagggagaaaaaaggtccaactgcttgatagaaaagccattaaaaatataataatt

SEQ ID NO: 69209 - DNA, 416 bp, Homo sapiens
ttagctccatgattttacccatctgtcacaccctcctgggcatgtgacctccagattctgagttgaccctcatgtgggagagagatctgtgtttgagtgaagcagccctggaaactacctccttcctgatggaaacccttgatcttctcgggattggtttctagcctcatttgccttcatattccctctgtgctctttaccaccacccagctctgaatacggggacagggaggaggtggggcagggagattcaggatggctgacccctcatcttcctcatccatcattctctggttctcatagaattagggctgcactgggccttgggggattcagcccattcttttactatagagtagcacatttcctcatcagatttttaaagtgattgacttcaccattgaggaattatcttt

SEQ ID NO: 69210 - DNA, 105 bp, Homo sapiens
aagtgctttctgctactctaagaatctattcatgttctactggtatgctcaaataactgataattatcttgatttagaggaaatcatattagtatagcttttttt

SEQ ID NO: 69211 - DNA, 571 bp, Homo sapiens
tatagtatgaaaagtgaagagaaaaaacctattctaaacattttattaattgtcaataattattttaaaatatttaatatagtctcctacctggtccactggcatcaagctgccaaatttacacggtcactttgggaagccagctggcaggcaaacatggaaagtgctggctcctagcgtagtgagaagaccacagatagatggtaattttcttctttgttttatttttctttttcttctctccctctttttcttccctcttgcctttccctcccattgcccactttctttttttggctgccgaagatttattgcctttcagtacttatagatgatgttttcataagttctaatgaggtcccagcagtttttaacaataacaggacattactgttcctaagatatattatgtgttttccctcatctttctcccttgaatgaaatgcttagaagtaggctaacccccaattcccttccctttactatgataaatggctccattacttaatagggctaaatactctgctgtgacttttatactgctgatttgaataaaatcttacgaaaagca

SEQ ID NO: 69212 - DNA, 266 bp, Homo sapiens
ttccaggcctcaccccgtggattcttattttttttttttcttcatgcaggatatgcccttctgttagcatattcctttttcacatggaggatgaagaaggcaacagctttagctctgctgagcaaccatgctcccctgagactgatggctcccaaatcattgaacctggaagttcatctgcttatcgtttaggataggtttctctacagatggctaatttcatttcccacatgctgaatttctttctagctttctgctcagagggg

SEQ ID NO: 69213 - DNA, 4256 bp, Homo sapiens
cccggcacttgacaacgtcgcagtctgcaagaggctgagctgaggagtcgctgggccgggaggggcggacgtgagaaggacggattgacgaactgatggattgacgcgcgggcggtaggagggaggaccgacgccaaacccagaccgccgccgtcgtgctcctgccgcagcccggagccggccgcttcggggccctggccgccggcctcccagccgcgttctcctccgccgctcctccgggcttgccctggagccctcaggctatcaatatgacggctgaagaaacagtgaatgtaaaagaggttgaaatcattaagctaattttggacttcctgaattcaaagaagcttcacattagtatgctggccctggagaaggaaagtggagtcataaatggcctgttttcagatgatatgcttttcctgaggcagctaatacttgatggtcaatgggatgaagttcttcagttcattcagcctctagaatgtatggaaaaatttgacaaaaaaaggtttcgttatattatcctgaagcagaagtttttagaagctttatgtgttaacaacgcgatgtcagcagaagatgagccccagcatctggaatttaccatgcaagaagctgtgcaatgtttacatgctctagaagaatactgtccttctaaagatgactatagtaagctctgtttgcttttgactttgcctcgtctgaccaatcatgccgagtttaaggactggaatcccagcaccgcacgagttcactgttttgaagaggcttgtgtcatggttgcagaattcatccctgctgataggaagctaagtgaagctggttttaaggctagtaacaatcgtttatttcagcttgtaatgaaaggcctgctttatgaatgctgtgtagaattttgtcagagtaaagcaactggagaagaaattacagaaagcgaagtgcttcttggcatcgacctcttatgtggtaatggttgtgatgatttggatctgagtttactgtcatggcttcagaatcttccatcttctgtcttctcttgtgcttttgaacagaaaatgcttaatattcatgttgacaaacttctgaaacctacaaaagctgcatatgctgatcttttgactcctcttatcagcaaactctctccctatccatcatccccaatgagaagacctcaatcagctgatgcctatatgacccgctctctgaatcctgctttagatggcctcacctgtggactaaccagtcatgataagagaatttcagaccttggaaacaaaacttctccaatgtcacactcctttgctaacttccattatccaggggtacaaaacctcagtagaagtctcatgcttgagaatacagaatgtcacagtatttacgaagaatcccctgagcgtgatacacctgttgatgcacagaggcctatcggcagtgaaatcttgggccagagttcagtttcagaaaaagagcctgcaaatggagcacagaatccaggaccagctaaacaagaaaaaaatgagcttcgagattcaacagaacaatttcaagaatattataggcaaagattacgctatcaacagcatttagaacagaaggagcaacagcggcagatataccaacagatgttgcttgaaggaggcgtgaatcaggaggatggtcctgatcagcagcagaatcttactgaacagttccttaataggtccattcaaaagcttggtgaattaaatattggaatggatggccttggtaatgaggtatcagcactcaaccagcaatgtaatgggagcaaaggcaatggatctaatggttcttctgtgactagttttactacaccaccccaagactctagtcagagattaacacatgatgcttcaaatattcatacaagcactcctcgtaatcctggatcaacaaatcacataccttttctggaggaatcaccttgtggaagccaaatctcttcagaacattcggtcattaagccacctcttggagattctccagggagtctttcaaggtcgaaaggggaagaggatgacaaatcaaaaaagcagtttgtttgtattaatatcctagaagacacacaagctgttagagcagtggcttttcatccagctggaggtttatatgctgttggttcaaattcaaaaactctgagagtatgtgcctatccagatgtaattgatccaagtgcacatgagactcctaagcagccggtggtacgttttaaaaggaataaacatcataaaggatccatttactgtgtggcctggagtccttgtgggcagttattagcaacaggatcaaatgacaaatacgtcaaagtgctgcccttcaatgcagagacttgtaacgcaacaggaccagatctggaatttagtatgcatgatggaacaattagagacttggcatttatggaaggcccagaaagcggaggagctattttaataagtgctggagcaggggattgtaacatttatacaaccgattgtcaaagaggacagggcctccatgctttgagtggacatactgggcatattttagcactttatacctggagtggctggatgattgcatctggttcccaagataagactgttagattttgggatcttcgagtaccaagttgtgttcgtgttgttggcacaacatttcatggaactggcagtgcagtggcatctgtagctgtagatcccagtggtcgtctcttagccacaggtcaagaagattctagctgcatgttgtatgacataagaggaggaagaatggtacaaagttatcatcctcattccagtgatgttcgctctgttcgattctcccctggagctcactacttgctaacaggctcttatgatatgaaaataaaggtgacagacctacaaggggacctcaccaagcagcttcctatcatggtggtgggggagcacaaggacaaagtgattcagtgcagatggcacacccaggatctttccttcctgtcatcctctgcagatagaactgtcaccctctggacttacaatgggtagagcacaccgcatgtcagtctatgcagcaaaagcacagagacttaagactactgagttgtgaaaattacaaatctgaagaacatagtgtccaggaaagtggtttagcacgaagaggccccttattaccatgtatcccactgataggaggtgttgggtggtgttattccgcagtgctttcagtcttccatgtgagctcgtgctgctgtgacctgctatatgtagtctcgttgccaaagtctgcagaagagctcttcagttgttggtgtgcactccaagtcaggatggacaatgtgtttacggtttagtattcaatgcattccttggtctttgcctaaataacagttttatatgcacattgaaatggaattatacttcaactatattattaaatgtaatgcaaccaagttcctcccagattaaacttcccaggtgttcagaattacttttgctcttctcacgatcccatattgtattatcacttgtcttctagaggtcagaattccataatatatgtcactcaaaagttacatggttgctttcacttaaggatcattatggagtttaaagatgaatgaaaaactgcttcttagtttactacatggtataggcccttttttcttaaacccagggatatgattattttgtcatataattttgtttcaggctaaaaggtaaatgtgtttgcttcagaaacttgttaacttcagttttttgaatgcaacaggatacctcccttccaaactgaactgtagaagcagagcagcagcagttatgtgatgcaacacttgatggtacagtaaatttactggcatttttctccttaaaaattaaaatccttgacatagaccatagcatggcttgaaatgctatgtctgcatgataatttaaaatggaagatttaaactttgcactccaaaagcttatttggatttttttcttgcactgttttgtgtaatgcagaataatgattttatttctacagctttgtagattctaacatttatgtatctttattttcatattgtacagtaattttactttaaattatttaaataggctattttatttatttcaaatgcagttgtattagttctcattattgaactgtctgtgcactgtatgtagcaagcatttttcatctgttgtatacaagtggaaagggtattagaagtgtaactgtgctattatttcaataaagacctcttgacatttaaaactgtttctgtt

SEQ ID NO: 69214 - DNA, 4089 bp, Homo sapiens
cccggcacttgacaacgtcgcagtctgcaagaggctgagctgaggagtcgctgggccgggaggggcggacgtgagaaggacggattgacgaactgatggattgacgcgcgggcggtaggagggaggaccgacgccaaacccagaccgccgccgtcgtgctcctgccgcagcccggagccggccgcttcggggccctggccgccggcctcccagccgcgttctcctccgccgctcctccgggcttgccctggagccctcaggcagctaatacttgatggtcaatgggatgaagttcttcagttcattcagcctctagaatgtatggaaaaatttgacaaaaaaaggtttcgttatattatcctgaagcagaagtttttagaagctttatgtgttaacaacgcgatgtcagcagaagatgagccccagcatctggaatttaccatgcaagaagctgtgcaatgtttacatgctctagaagaatactgtccttctaaagatgactatagtaagctctgtttgcttttgactttgcctcgtctgaccaatcatgccgagtttaaggactggaatcccagcaccgcacgagttcactgttttgaagaggcttgtgtcatggttgcagaattcatccctgctgataggaagctaagtgaagctggttttaaggctagtaacaatcgtttatttcagcttgtaatgaaaggcctgctttatgaatgctgtgtagaattttgtcagagtaaagcaactggagaagaaattacagaaagcgaagtgcttcttggcatcgacctcttatgtggtaatggttgtgatgatttggatctgagtttactgtcatggcttcagaatcttccatcttctgtcttctcttgtgcttttgaacagaaaatgcttaatattcatgttgacaaacttctgaaacctacaaaagctgcatatgctgatcttttgactcctcttatcagcaaactctctccctatccatcatccccaatgagaagacctcaatcagctgatgcctatatgacccgctctctgaatcctgctttagatggcctcacctgtggactaaccagtcatgataagagaatttcagaccttggaaacaaaacttctccaatgtcacactcctttgctaacttccattatccaggggtacaaaacctcagtagaagtctcatgcttgagaatacagaatgtcacagtatttacgaagaatcccctgagcgtgatacacctgttgatgcacagaggcctatcggcagtgaaatcttgggccagagttcagtttcagaaaaagagcctgcaaatggagcacagaatccaggaccagctaaacaagaaaaaaatgagcttcgagattcaacagaacaatttcaagaatattataggcaaagattacgctatcaacagcatttagaacagaaggagcaacagcggcagatataccaacagatgttgcttgaaggaggcgtgaatcaggaggatggtcctgatcagcagcagaatcttactgaacagttccttaataggtccattcaaaagcttggtgaattaaatattggaatggatggccttggtaatgaggtatcagcactcaaccagcaatgtaatgggagcaaaggcaatggatctaatggttcttctgtgactagttttactacaccaccccaagactctagtcagagattaacacatgatgcttcaaatattcatacaagcactcctcgtaatcctggatcaacaaatcacataccttttctggaggaatcaccttgtggaagccaaatctcttcagaacattcggtcattaagccacctcttggagattctccagggagtctttcaaggtcgaaaggggaagaggatgacaaatcaaaaaagcagtttgtttgtattaatatcctagaagacacacaagctgttagagcagtggcttttcatccagctggaggtttatatgctgttggttcaaattcaaaaactctgagagtatgtgcctatccagatgtaattgatccaagtgcacatgagactcctaagcagccggtggtacgttttaaaaggaataaacatcataaaggatccatttactgtgtggcctggagtccttgtgggcagttattagcaacaggatcaaatgacaaatacgtcaaagtgctgcccttcaatgcagagacttgtaacgcaacaggaccagatctggaatttagtatgcatgatggaacaattagagacttggcatttatggaaggcccagaaagcggaggagctattttaataagtgctggagcaggggattgtaacatttatacaaccgattgtcaaagaggacagggcctccatgctttgagtggacatactgggcatattttagcactttatacctggagtggctggatgattgcatctggttcccaagataagactgttagattttgggatcttcgagtaccaagttgtgttcgtgttgttggcacaacatttcatggaactggcagtgcagtggcatctgtagctgtagatcccagtggtcgtctcttagccacaggtcaagaagattctagctgcatgttgtatgacataagaggaggaagaatggtacaaagttatcatcctcattccagtgatgttcgctctgttcgattctcccctggagctcactacttgctaacaggctcttatgatatgaaaataaaggtgacagacctacaaggggacctcaccaagcagcttcctatcatggtggtgggggagcacaaggacaaagtgattcagtgcagatggcacacccaggatctttccttcctgtcatcctctgcagatagaactgtcaccctctggacttacaatgggtagagcacaccgcatgtcagtctatgcagcaaaagcacagagacttaagactactgagttgtgaaaattacaaatctgaagaacatagtgtccaggaaagtggtttagcacgaagaggccccttattaccatgtatcccactgataggaggtgttgggtggtgttattccgcagtgctttcagtcttccatgtgagctcgtgctgctgtgacctgctatatgtagtctcgttgccaaagtctgcagaagagctcttcagttgttggtgtgcactccaagtcaggatggacaatgtgtttacggtttagtattcaatgcattccttggtctttgcctaaataacagttttatatgcacattgaaatggaattatacttcaactatattattaaatgtaatgcaaccaagttcctcccagattaaacttcccaggtgttcagaattacttttgctcttctcacgatcccatattgtattatcacttgtcttctagaggtcagaattccataatatatgtcactcaaaagttacatggttgctttcacttaaggatcattatggagtttaaagatgaatgaaaaactgcttcttagtttactacatggtataggcccttttttcttaaacccagggatatgattattttgtcatataattttgtttcaggctaaaaggtaaatgtgtttgcttcagaaacttgttaacttcagttttttgaatgcaacaggatacctcccttccaaactgaactgtagaagcagagcagcagcagttatgtgatgcaacacttgatggtacagtaaatttactggcatttttctccttaaaaattaaaatccttgacatagaccatagcatggcttgaaatgctatgtctgcatgataatttaaaatggaagatttaaactttgcactccaaaagcttatttggatttttttcttgcactgttttgtgtaatgcagaataatgattttatttctacagctttgtagattctaacatttatgtatctttattttcatattgtacagtaattttactttaaattatttaaataggctattttatttatttcaaatgcagttgtattagttctcattattgaactgtctgtgcactgtatgtagcaagcatttttcatctgttgtatacaagtggaaagggtattagaagtgtaactgtgctattatttcaataaagacctcttgacatttaaaactgtttctgtt

SEQ ID NO: 69215 - DNA, 2882 bp, Homo sapiens
  misc_feature (138)..(138): n is a, c, g, or t
agtctactgatttcaaatgccaatctcttccagaaatacctgcataaacatgcccagaaataatgttttaccatctatctgggtatctgttaacccagtaaagttgacagcacagaatccaggaccagctaaacaagnaaaaaaatgagcttcgagattcaacagaacaatttcaagaatattataggcaaagattacgctatcaacagcatttagaacagaaggagcaacagcggcagatataccaacagatgttgcttgaaggaggcgtgaatcaggaggatggtcctgatcagcagcagaatcttactgaacagttccttaataggtccattcaaaagcttggtgaattaaatattggaatggatggccttggtaatgaggtatcagcactcaaccagcaatgtaatgggagcaaaggcaatggatctaatggttcttctgtgactagttttactacaccaccccaagactctagtcagagattaacacatgatgcttcaaatattcatacaagcactcctcgtaatcctggatcaacaaatcacataccttttctggaggaatcaccttgtggaagccaaatctcttcagaacattcggtcattaagccacctcttggagattctccagggagtctttcaaggtcgaaaggggaagaggatgacaaatcaaaaaagcagtttgtttgtattaatatcctagaagacacacaagctgttagagcagtggcttttcatccagctggaggtttatatgctgttggttcaaattcaaaaactctgagagtatgtgcctatccagatgtaattgatccaagtgcacatgagactcctaagcagccggtggtacgttttaaaaggaataaacatcataaaggatccatttactgtgtggcctggagtccttgtgggcagttattagcaacaggatcaaatgacaaatacgtcaaagtgctgcccttcaatgcagagacttgtaacgcaacaggaccagatctggaatttagtatgcatgatggaacaattagagacttggcatttatggaaggcccagaaagcggaggagctattttaataagtgctggagcaggggattgtaacatttatacaaccgattgtcaaagaggacagggcctccatgctttgagtggacatactgggcatattttagcactttatacctggagtggctggatgattgcatctggttcccaagataagactgttagattttgggatcttcgagtaccaagttgtgttcgtgttgttggcacaacatttcatggaactggcagtgcagtggcatctgtagctgtagatcccagtggtcgtctcttagccacaggtcaagaagattctagctgcatgttgtatgacataagaggaggaagaatggtacaaagttatcatcctcattccagtgatgttcgctctgttcgattctcccctggagctcactacttgctaacaggctcttatgatatgaaaataaaggtgacagacctacaaggggacctcaccaagcagcttcctatcatggtggtgggggagcacaaggacaaagtgattcagtgcagatggcacacccaggatctttccttcctgtcatcctctgcagatagaactgtcaccctctggacttacaatgggtagagcacaccgcatgtcagtctatgcagcaaaagcacagagacttaagactactgagttgtgaaaattacaaatctgaagaacatagtgtccaggaaagtggtttagcacgaagaggccccttattaccatgtatcccactgataggaggtgttgggtggtgttattccgcagtgctttcagtcttccatgtgagctcgtgctgctgtgacctgctatatgtagtctcgttgccaaagtctgcagaagagctcttcagttgttggtgtgcactccaagtcaggatggacaatgtgtttacggtttagtattcaatgcattccttggtctttgcctaaataacagttttatatgcacattgaaatggaattatacttcaactatattattaaatgtaatgcaaccaagttcctcccagattaaacttcccaggtgttcagaattacttttgctcttctcacgatcccatattgtattatcacttgtcttctagaggtcagaattccataatatatgtcactcaaaagttacatggttgctttcacttaaggatcattatggagtttaaagatgaatgaaaaactgcttcttagtttactacatggtataggcccttttttcttaaacccagggatatgattattttgtcatataattttgtttcaggctaaaaggtaaatgtgtttgcttcagaaacttgttaacttcagttttttgaatgcaacaggatacctcccttccaaactgaactgtagaagcagagcagcagcagttatgtgatgcaacacttgatggtacagtaaatttactggcatttttctccttaaaaattaaaatccttgacatagaccatagcatggcttgaaatgctatgtctgcatgataatttaaaatggaagatttaaactttgcactccaaaagcttatttggatttttttcttgcactgttttgtgtaatgcagaataatgattttatttctacagctttgtagattctaacatttatgtatctttattttcatattgtacagtaattttactttaaattatttaaataggctattttatttatttcaaatgcagttgtattagttctcattattgaactgtctgtgcactgtatgtagcaagcatttttcatctgttgtatacaagtggaaagggtattagaagtgtaactgtgctattatttcaataaagacctcttgacatttaaaactgtttctgtt

SEQ ID NO: 69216 - DNA, 3213 bp, Homo sapiens
cccggcacttgacaacgtcgcagtctgcaagaggctgagctgaggagtcgctgggccgggaggggcggacgtgagaaggacggattgacgaactgatggattgacgcgcgggcggtaggagggaggaccgacgccaaacccagaccgccgccgtcgtgctcctgccgcagcccggagccggccgcttcggggccctggccgccggcctcccagccgcgttctcctccgccgctcctccgggcttgccctggagccctcaggctatcaatatgacggctgaagaaacagtgaatgtaaaagaggttgaaatcattaagctaattttggacttcctgaattcaaagaagcttcacattagtatgctggccctggagaaggaaagtggagtcataaatggcctgttttcagatgatatgcttttcctgaggcagctaatacttgatggtcaatgggatgaagttcttcagttcattcagcctctagaatgtatggaaaaatttgacaaaaaaaggtttcgttatattatcctgaagcagaagtttttagaagctttatgtgttaacaacgcgatgtcagcagaagatgagccccagcatctggaatttaccatgcaagaagctgtgcaatgtttacatgctctagaagaatactgtccttctaaagatgactatagtaagctctgtttgcttttgactttgcctcgtctgaccaatcatgccgagtttaaggactggaatcccagcaccgcacgagttcactgttttgaagaggcttgtgtcatggttgcagaattcatccctgctgataggaagctaagtgaagctggttttaaggctagtaacaatcgtttatttcagcttgtaatgaaaggcctgctttatgaatgctgtgtagaattttgtcagagtaaagcaactggagaagaaattacagaaagcgaagtgcttcttggcatcgacctcttatgtggtaatggttgtgatgatttggatctgagtttactgtcatggcttcagaatcttccatcttctgtcttctcttgtgcttttgaacagaaaatgcttaatattcatgttgacaaacttctgaaacctacaaaagctgcatatgctgatcttttgactcctcttatcagcaaactctctccctatccatcatccccaatgagaagacctcaatcagctgatgcctatatgacccgctctctgaatcctgctttagatggcctcacctgtggactaaccagtcatgataagagaatttcagaccttggaaacaaaacttctccaatgtcacactcctttgctaacttccattatccaggggtacaaaacctcagtagaagtctcatgcttgagaatacagaatgtcacagtatttacgaagaatcccctgagcgtgatacacctgttgatgcacagaggcctatcggcagtgaaatcttgggccagagttcagtttcagaaaaagagcctgcaaatggagcacagaatccaggaccagctaaacaagaaaaaaatgagcttcgagattcaacagaacaatttcaagaatattataggcaaagattacgctatcaacagcatttagaacagaaggagcaacagcggcagatataccaacagatgttgcttgaaggaggcgtgaatcaggaggatggtcctgatcagcagcagaatcttactgaacagttccttaataggtccattcaaaagcttggtgaattaaatattggaatggatggccttggtaatgaggtatcagcactcaaccagcaatgtaatgggagcaaaggcaatggatctaatggttcttctgtgactagttttactacaccaccccaagactctagtcagagattaacacatgatgcttcaaatattcatacaagcactcctcgtaatcctggatcaacaaatcacataccttttctggaggaatcaccttgtggaagccaaatctcttcagaacattcggtcattaagccacctcttggagattctccagggagtctttcaaggtcgaaaggggaagaggatgacaaatcaaaaaagcagtttgtttgtattaatatcctagaagacacacaagctgttagagcagtggcttttcatccagctggaggtttatatgctgttggttcaaattcaaaaactctgagagtatgtgcctatccagatgtaattgatccaagtgcacatgagactcctaagcagccggtggtacgttttaaaaggaataaacatcataaaggatccatttactgtgtggcctggagtccttgtgggcagttattagcaacaggatcaaatgacaaatacgtcaaagtgctgcccttcaatgcagagacttgtaacgcaacaggaccagatctggaatttagtatgcatgatggaacaattagagacttggcatttatggaaggcccagaaagcggaggagctattttaataagtgctggagcaggggattgtaacatttatacaaccgattgtcaaagaggacagggcctccatgctttgagtggacatactgggcatattttagcactttatacctggagtggctggatgattgcatctggttcccaagataagactgttagattttgggatcttcgagtaccaagttgtgttcgtgttgttggcacaacatttcatggaactggcagtgcagtggcatctgtagctgtagatcccagtggtcgtctcttagccacaggtcaagaagattctagctgcatgttgtatgacataagaggaggaagaatggtacaaagttatcatcctcattccagtgatgttcgctctgttcgattctcccctggagctcactacttgctaacaggctcttatgatatgaaaataaaggtgacagacctacaaggggacctcaccaagcagcttcctatcatggtggtgggggagcacaaggacaaagtgattcagtgcagatggcacacccaggatctttccttcctgtcatcctctgcagatagaactgtcaccctctggacttacaatgggtagagcacaccgcatgtcagtctatgcagcaaaagcacagagacttaagactactgagttgtgaaaattacaaatctgaagaacatagtgtccaggaccagctaaacaagaaaaaaatgagcttcgagattcaacagaacaatttcaagaatattataggcaaagattacgctatcaacagcattta

SEQ ID NO: 69217 - DNA, 774 bp, Homo sapiens
gagaacagaagaaatctgagggttgactcctgggattcaccaagctttacgtcaagaagaaaagggaaactagcaaaagatgaagtggcactgaaatcagggagaaatcaagttgagagaatttccgagagagagagagaggcaacttgtcaaatgttgctgtatgggtatatgttagcaaatactaatagcataattaggtaggtagtaatttatccctgtataaacctttcaatgtattatattaatgtagtttaagattttttatactgtaatgtcttaaagtaacaggaagtctatacaatctatacatatacttattttgcattgtaaatcaacatctcttttgtaatttaggggacctcaccaagcagcttcctatcatggtggtgggggagcacaaggacaaagtgattcagtgcagatggcacacccaggatctttccttcctgtcatcctctgcagatagaactgtcaccctctggacttacaatgggtagagcacaccgcatgtcagtctatgcagcaaaagcacagagacttaagactactgagttgtgaaaattacaaatctgaagaacatagtgtccaggaaagtggtttagcacgaagaggccccttattaccatgtatcccactgataggaggtgttgggtggtgttattccgcagtgctttcagtcttccatgtgagctcgtgctgctgtgacctgctatatgtagtctcgttgccaaagtctgcagaagagctcttcagttgttggtgtgcactcca

SEQ ID NO: 69218 - DNA, 4172 bp, Homo sapiens
cccggcacttgacaacgtcgcagtctgcaagaggctgagctgaggagtcgctgggccgggaggggcggacgtgagaaggacggattgacgaactgatggattgacgcgcgggcggtaggagggaggaccgacgccaaacccagaccgccgccgtcgtgctcctgccgcagcccggagccggccgcttcggggccctggccgccggcctcccagccgcgttctcctccgccgctcctccgggcttgccctggagccctcaggctatcaatatgacggctgaagaaacagtgaatgtaaaagaggttgaaatcattaagctaattttggacttcctgaattcaaagaagcttcacattagtatgctggccctggagaaggaaagtggagtcataaatggcctgttttcagatgatatgcttttcctgaggtttcgttatattatcctgaagcagaagtttttagaagctttatgtgttaacaacgcgatgtcagcagaagatgagccccagcatctggaatttaccatgcaagaagctgtgcaatgtttacatgctctagaagaatactgtccttctaaagatgactatagtaagctctgtttgcttttgactttgcctcgtctgaccaatcatgccgagtttaaggactggaatcccagcaccgcacgagttcactgttttgaagaggcttgtgtcatggttgcagaattcatccctgctgataggaagctaagtgaagctggttttaaggctagtaacaatcgtttatttcagcttgtaatgaaaggcctgctttatgaatgctgtgtagaattttgtcagagtaaagcaactggagaagaaattacagaaagcgaagtgcttcttggcatcgacctcttatgtggtaatggttgtgatgatttggatctgagtttactgtcatggcttcagaatcttccatcttctgtcttctcttgtgcttttgaacagaaaatgcttaatattcatgttgacaaacttctgaaacctacaaaagctgcatatgctgatcttttgactcctcttatcagcaaactctctccctatccatcatccccaatgagaagacctcaatcagctgatgcctatatgacccgctctctgaatcctgctttagatggcctcacctgtggactaaccagtcatgataagagaatttcagaccttggaaacaaaacttctccaatgtcacactcctttgctaacttccattatccaggggtacaaaacctcagtagaagtctcatgcttgagaatacagaatgtcacagtatttacgaagaatcccctgagcgtgatacacctgttgatgcacagaggcctatcggcagtgaaatcttgggccagagttcagtttcagaaaaagagcctgcaaatggagcacagaatccaggaccagctaaacaagaaaaaaatgagcttcgagattcaacagaacaatttcaagaatattataggcaaagattacgctatcaacagcatttagaacagaaggagcaacagcggcagatataccaacagatgttgcttgaaggaggcgtgaatcaggaggatggtcctgatcagcagcagaatcttactgaacagttccttaataggtccattcaaaagcttggtgaattaaatattggaatggatggccttggtaatgaggtatcagcactcaaccagcaatgtaatgggagcaaaggcaatggatctaatggttcttctgtgactagttttactacaccaccccaagactctagtcagagattaacacatgatgcttcaaatattcatacaagcactcctcgtaatcctggatcaacaaatcacataccttttctggaggaatcaccttgtggaagccaaatctcttcagaacattcggtcattaagccacctcttggagattctccagggagtctttcaaggtcgaaaggggaagaggatgacaaatcaaaaaagcagtttgtttgtattaatatcctagaagacacacaagctgttagagcagtggcttttcatccagctggaggtttatatgctgttggttcaaattcaaaaactctgagagtatgtgcctatccagatgtaattgatccaagtgcacatgagactcctaagcagccggtggtacgttttaaaaggaataaacatcataaaggatccatttactgtgtggcctggagtccttgtgggcagttattagcaacaggatcaaatgacaaatacgtcaaagtgctgcccttcaatgcagagacttgtaacgcaacaggaccagatctggaatttagtatgcatgatggaacaattagagacttggcatttatggaaggcccagaaagcggaggagctattttaataagtgctggagcaggggattgtaacatttatacaaccgattgtcaaagaggacagggcctccatgctttgagtggacatactgggcatattttagcactttatacctggagtggctggatgattgcatctggttcccaagataagactgttagattttgggatcttcgagtaccaagttgtgttcgtgttgttggcacaacatttcatggaactggcagtgcagtggcatctgtagctgtagatcccagtggtcgtctcttagccacaggtcaagaagattctagctgcatgttgtatgacataagaggaggaagaatggtacaaagttatcatcctcattccagtgatgttcgctctgttcgattctcccctggagctcactacttgctaacaggctcttatgatatgaaaataaaggtgacagacctacaaggggacctcaccaagcagcttcctatcatggtggtgggggagcacaaggacaaagtgattcagtgcagatggcacacccaggatctttccttcctgtcatcctctgcagatagaactgtcaccctctggacttacaatgggtagagcacaccgcatgtcagtctatgcagcaaaagcacagagacttaagactactgagttgtgaaaattacaaatctgaagaacatagtgtccaggaaagtggtttagcacgaagaggccccttattaccatgtatcccactgataggaggtgttgggtggtgttattccgcagtgctttcagtcttccatgtgagctcgtgctgctgtgacctgctatatgtagtctcgttgccaaagtctgcagaagagctcttcagttgttggtgtgcactccaagtcaggatggacaatgtgtttacggtttagtattcaatgcattccttggtctttgcctaaataacagttttatatgcacattgaaatggaattatacttcaactatattattaaatgtaatgcaaccaagttcctcccagattaaacttcccaggtgttcagaattacttttgctcttctcacgatcccatattgtattatcacttgtcttctagaggtcagaattccataatatatgtcactcaaaagttacatggttgctttcacttaaggatcattatggagtttaaagatgaatgaaaaactgcttcttagtttactacatggtataggcccttttttcttaaacccagggatatgattattttgtcatataattttgtttcaggctaaaaggtaaatgtgtttgcttcagaaacttgttaacttcagttttttgaatgcaacaggatacctcccttccaaactgaactgtagaagcagagcagcagcagttatgtgatgcaacacttgatggtacagtaaatttactggcatttttctccttaaaaattaaaatccttgacatagaccatagcatggcttgaaatgctatgtctgcatgataatttaaaatggaagatttaaactttgcactccaaaagcttatttggatttttttcttgcactgttttgtgtaatgcagaataatgattttatttctacagctttgtagattctaacatttatgtatctttattttcatattgtacagtaattttactttaaattatttaaataggctattttatttatttcaaatgcagttgtattagttctcattattgaactgtctgtgcactgtatgtagcaagcatttttcatctgttgtatacaagtggaaagggtattagaagtgtaactgtgctattatttcaataaagacctcttgacatttaaaactgtttctgtt

SEQ ID NO: 69219 - DNA, 4153 bp, Homo sapiens
actctagaggagccactgacgctcctttagcttctcagcttcttcctccatctccctgactcgagctttgatagcttccagctccggggcctcaatggcgccgtcccccgtgtcaccctcctccgccgctcctccgggcttgccctggagccctcaggctatcaatatgacggctgaagaaacagtgaatgtaaaagaggttgaaatcattaagctaattttggacttcctgaattcaaagaagcttcacattagtatgctggccctggagaaggaaagtggagtcataaatggcctgttttcagatgatatgcttttcctgaggcagctaatacttgatggtcaatgggatgaagttcttcagttcattcagcctctagaatgtatggaaaaatttgacaaaaaaaggtttcgttatattatcctgaagcagaagtttttagaagctttatgtgttaacaacgcgatgtcagcagaagatgagccccagcatctggaatttaccatgcaagaagctgtgcaatgtttacatgctctagaagaatactgtccttctaaagatgactatagtaagctctgtttgcttttgactttgcctcgtctgaccaatcatgccgagtttaaggactggaatcccagcaccgcacgagttcactgttttgaagaggcttgtgtcatggttgcagaattcatccctgctgataggaagctaagtgaagctggttttaaggctagtaacaatcgtttatttcagcttgtaatgaaaggcctgctttatgaatgctgtgtagaattttgtcagagtaaagcaactggagaagaaattacagaaagcgaagtgcttcttggcatcgacctcttatgtggtaatggttgtgatgatttggatctgagtttactgtcatggcttcagaatcttccatcttctgtcttctcttgtgcttttgaacagaaaatgcttaatattcatgttgacaaacttctgaaacctacaaaagctgcatatgctgatcttttgactcctcttatcagcaaactctctccctatccatcatccccaatgagaagacctcaatcagctgatgcctatatgacccgctctctgaatcctgctttagatggcctcacctgtggactaaccagtcatgataagagaatttcagaccttggaaacaaaacttctccaatgtcacactcctttgctaacttccattatccaggggtacaaaacctcagtagaagtctcatgcttgagaatacagaatgtcacagtatttacgaagaatcccctgagcgtgatacacctgttgatgcacagaggcctatcggcagtgaaatcttgggccagagttcagtttcagaaaaagagcctgcaaatggagcacagaatccaggaccagctaaacaagaaaaaaatgagcttcgagattcaacagaacaatttcaagaatattataggcaaagattacgctatcaacagcatttagaacagaaggagcaacagcggcagatataccaacagatgttgcttgaaggaggcgtgaatcaggaggatggtcctgatcagcagcagaatcttactgaacagttccttaataggtccattcaaaagcttggtgaattaaatattggaatggatggccttggtaatgaggtatcagcactcaaccagcaatgtaatgggagcaaaggcaatggatctaatggttcttctgtgactagttttactacaccaccccaagactctagtcagagattaacacatgatgcttcaaatattcatacaagcactcctcgtaatcctggatcaacaaatcacataccttttctggaggaatcaccttgtggaagccaaatctcttcagaacattcggtcattaagccacctcttggagattctccagggagtctttcaaggtcgaaaggggaagaggatgacaaatcaaaaaagcagtttgtttgtattaatatcctagaagacacacaagctgttagagcagtggcttttcatccagctggaggtttatatgctgttggttcaaattcaaaaactctgagagtatgtgcctatccagatgtaattgatccaagtgcacatgagactcctaagcagccggtggtacgttttaaaaggaataaacatcataaaggatccatttactgtgtggcctggagtccttgtgggcagttattagcaacaggatcaaatgacaaatacgtcaaagtgctgcccttcaatgcagagacttgtaacgcaacaggaccagatctggaatttagtatgcatgatggaacaattagagacttggcatttatggaaggcccagaaagcggaggagctattttaataagtgctggagcaggggattgtaacatttatacaaccgattgtcaaagaggacagggcctccatgctttgagtggacatactgggcatattttagcactttatacctggagtggctggatgattgcatctggttcccaagataagactgttagattttgggatcttcgagtaccaagttgtgttcgtgttgttggcacaacatttcatggaactggcagtgcagtggcatctgtagctgtagatcccagtggtcgtctcttagccacaggtcaagaagattctagctgcatgttgtatgacataagaggaggaagaatggtacaaagttatcatcctcattccagtgatgttcgctctgttcgattctcccctggagctcactacttgctaacaggctcttatgatatgaaaataaaggtgacagacctacaaggggacctcaccaagcagcttcctatcatggtggtgggggagcacaaggacaaagtgattcagtgcagatggcacacccaggatctttccttcctgtcatcctctgcagatagaactgtcaccctctggacttacaatgggtagagcacaccgcatgtcagtctatgcagcaaaagcacagagacttaagactactgagttgtgaaaattacaaatctgaagaacatagtgtccaggaaagtggtttagcacgaagaggccccttattaccatgtatcccactgataggaggtgttgggtggtgttattccgcagtgctttcagtcttccatgtgagctcgtgctgctgtgacctgctatatgtagtctcgttgccaaagtctgcagaagagctcttcagttgttggtgtgcactccaagtcaggatggacaatgtgtttacggtttagtattcaatgcattccttggtctttgcctaaataacagttttatatgcacattgaaatggaattatacttcaactatattattaaatgtaatgcaaccaagttcctcccagattaaacttcccaggtgttcagaattacttttgctcttctcacgatcccatattgtattatcacttgtcttctagaggtcagaattccataatatatgtcactcaaaagttacatggttgctttcacttaaggatcattatggagtttaaagatgaatgaaaaactgcttcttagtttactacatggtataggcccttttttcttaaacccagggatatgattattttgtcatataattttgtttcaggctaaaaggtaaatgtgtttgcttcagaaacttgttaacttcagttttttgaatgcaacaggatacctcccttccaaactgaactgtagaagcagagcagcagcagttatgtgatgcaacacttgatggtacagtaaatttactggcatttttctccttaaaaattaaaatccttgacatagaccatagcatggcttgaaatgctatgtctgcatgataatttaaaatggaagatttaaactttgcactccaaaagcttatttggatttttttcttgcactgttttgtgtaatgcagaataatgattttatttctacagctttgtagattctaacatttatgtatctttattttcatattgtacagtaattttactttaaattatttaaataggctattttatttatttcaaatgcagttgtattagttctcattattgaactgtctgtgcactgtatgtagcaagcatttttcatctgttgtatacaagtggaaagggtattagaagtgtaactgtgctattatttcaataaagacctcttgacatttaaaactgtttctgtt

SEQ ID NO: 69220 - DNA, 2113 bp, Homo sapiens
  misc_feature (16)..(16): n is a, c, g, or t
cctcgtgcaagtcgancctgtggcgctctatccagatgtaattgatccaagtgcacatgagactcctaagcagccggtggtacgttttaaaaggaataaacatcataaaggatccatttactgtgtggcctggagtccttgtgggcagttattagcaacaggatcaaatgacaaatacgtcaaagtgctgcccttcaatgcagagacttgtaacgcaacaggaccagatctggaatttagtatgcatgatggaacaattagagacttggcatttatggaaggcccagaaagcggaggagctattttaataagtgctggagcaggggattgtaacatttatacaaccgattgtcaaagaggacagggcctccatgctttgagtggacatactgggcatattttagcactttatacctggagtggctggatgattgcatctggttcccaagataagactgttagattttgggatcttcgagtaccaagttgtgttcgtgttgttggcacaacatttcatggaactggcagtgcagtggcatctgtagctgtagatcccagtggtcgtctcttagccacaggtcaagaagattctagctgcatgttgtatgacataagaggaggaagaatggtacaaagttatcatcctcattccagtgatgttcgctctgttcgattctcccctggagctcactacttgctaacaggctcttatgatatgaaaataaaggtgacagacctacaaggggacctcaccaagcagcttcctatcatggtggtgggggagcacaaggacaaagtgattcagtgcagatggcacacccaggatctttccttcctgtcatcctctgcagatagaactgtcaccctctggacttacaatgggtagagcacaccgcatgtcagtctatgcagcaaaagcacagagacttaagactactgagttgtgaaaattacaaatctgaagaacatagtgtccaggaaagtggtttagcacgaagaggccccttattaccatgtatcccactgataggaggtgttgggtggtgttattccgcagtgctttcagtcttccatgtgagctcgtgctgctgtgacctgctatatgtagtctcgttgccaaagtctgcagaagagctcttcagttgttggtgtgcactccaagtcaggatggacaatgtgtttacggtttagtattcaatgcattccttggtctttgcctaaataacagttttatatgcacattgaaatggaattatacttcaactatattattaaatgtaatgcaaccaagttcctcccagattaaacttcccaggtgttcagaattacttttgctcttctcacgatcccatattgtattatcacttgtcttctagaggtcagaattccataatatatgtcactcaaaagttacatggttgctttcacttaaggatcattatggagtttaaagatgaatgaaaaactgcttcttagtttactacatggtataggcccttttttcttaaacccagggatatgattattttgtcatataattttgtttcaggctaaaaggtaaatgtgtttgcttcagaaacttgttaacttcagttttttgaatgcaacaggatacctcccttccaaactgaactgtagaagcagagcagcagcagttatgtgatgcaacacttgatggtacagtaaatttactggcatttttctccttaaaaattaaaatccttgacatagaccatagcatggcttgaaatgctatgtctgcatgataatttaaaatggaagatttaaactttgcactccaaaagcttatttggatttttttcttgcactgttttgtgtaatgcagaataatgattttatttctacagctttgtagattctaacatttatgtatctttattttcatattgtacagtaattttactttaaattatttaaataggctattttatttatttcaaatgcagttgtattagttctcattattgaactgtctgtgcactgtatgtagcaagcatttttcatctgttgtatacaagtggaaagggtattagaagtgtaactgtgctattatttcaataaagacctcttgacatttaaaactgtttctgtt

SEQ ID NO: 69221 - DNA, 814 bp, Homo sapiens
ctcattaatctcatcagcattaaaactcctaggatataaaattaaaaccatccatcatagacgctcgtagattcctctgctgggaaatattttttctcaagatagaaatgggaattttcagttatgtgacttaaagacttgaaaacagttgaaacttgaattagactgttcaaataatctttttttatattaaaatatcttattatatggtagattattatttttcagttttgaaagttttgtgaacagatggccaagttttgttgcactgattttcaagggctgattgagggccattattaagaaaagaggcattacagttgcgtacagttcttgaatatcatcttagtgtactgctaaatcccattatgaagaattcattggcagtctgctgaaaggtacactagcttataccacacacagcggtacattcttaagcacgttgttatccagaagttaatgactatctttgtttacgaagttgtatatagggtgactaagagcagctgaaaagaaatgcaacccatgccaagtataattagctttttccttgaatactggaatcacccgtttaccctagttagaggcctttgatatttttggtggttgctttctagcacattagctatcagccactcttctagaattgcttaacatgatgggctttgcttgaaagcagactggtaacctatgaaaacatcacagtattgatgattttcaggactagggatcacaactgcagtttcatatggttggatggagtagtctttttgtggaggaatttatatgagaatcttagcttactgtctctttg

SEQ ID NO: 69222 - DNA, 440 bp, Homo sapiens
tctatgaaattactcgtatttatttagtttttctccttcaacaaaaatggaatcaactataaaaactcttgcatcctactttttttcacttactaaatcttagagagttttctgtcaaaacatattgccctagctcatttaaaaaaataacatatatcttatcagtttcctgtgaatagccatttagtctgtttcccatttttattaaaacaatcagtgcccatgtttacttttttttttttgagacggagcttcgctcttgttgcccaggctggagtgcaatggtgtgatctcagctcagcgcaacctccgcctcccaggttcaagcgattctcatgcctcagcctcctgagtagctgggattacaggcatgcaccaccatgcctggctaattttgtatttttagtagagacggggtttctccatgttggtcaggctgg

SEQ ID NO: 69223 - DNA, 383 bp, Homo sapiens
cgcgttcattatgtaccttggcaatgggcaaaaagccaaccattctgcagggcaagccaattgcctgcctcctacacacaagccttgatccgtcttgatgacaacttggttctcagctcttcttcctctctgctctcatccttactcagccagtctctactctcatcttctgtttcagtctagctgtcacagcctctatagcctccatttactactgctcagaaaggactccctttgtctcttcgtactcaagatgccccaacttgaacttaatgtctattttgctcatcaccacactcccagctggcccctgcttcctgttagcaaaactggaccaggtggctgaggttccaggggtcaggagaccctaacttctccaggct

SEQ ID NO: 69224 - DNA, 1214 bp, Homo sapiens
gggatttcttttcattatggggctcaatgtatttcttattactgattacacatccacctggtgtcatatccacctatttacatcttcagcctggcttgattgttaacatgtggggagtttgtgttttggtgccgtgtgagtgtgtgtctgaaagcagtgagttatgaatgtagtagggattccaggaatgatgtgtatgggtgtttgcatagcaaacgaagcaggaattttctgtgtataaaaataggaatgtgcacctaactgatgtactagataactgagtccagtgatcttcctttcccataaaaaattccaaatgagagcaagattattacaacagccttataacaaaaggaaagaaaaaaaaatcacagtcagcaaaatttacaaagaacggtcatttcagcattaaatatattgtgctgtttagactctcaatttaaattttttctctcaaatgagatttctaaactcattctacactgtcaagattgagctgctgcaggcaatgaggcatgcagtctccaggtgactgaagtttcagggacaaatgtgacttccaaaagagtcactgcaccatttgtctgcttgaccctgttcatgcccagaagctgcacagccaagaactcccaagacaggtgtttccaaagaagaaaaaaatttttttaatgtatgtgaagatatgtgtgtgcatctgtggagatagtggaatagaaaggaccccagtttcaataaatgaatgacctaatataggaaatcactaatttgatatagtcggcatctatacattaaaaaaaaaaacctttttcaggagttttgagagaaaaaatctttttcctaaattgaaggaggatttaatgcacttagaaactagagattcttcagggaaaccttataacctgctttttttttttttcttaacatggtgtccccatttaaatgaatccagaggctgacaagggtttcagctttacaaagctgagcagccccttgatgtttagtgaaacgaaacagatgatttatcagctttaaatctaggttagggtttgcctgcttcaaacttattgatgggagcatgttggatgtgtggttaggcagcatgcttttcatttccccgaatcctttgccatcaacattattgcttgctaaagaaaaggatgtggtggagaggtaatcttcctaacctatactcttttaattgagttatttcctat

SEQ ID NO: 69225 - DNA, 571 bp, Homo sapiens
ctactactactaattcgcggccctcgacgtgctggccaaggacatcatctaggcagggggagagcctgggctgaacagctgtgaccaaaactcccttctgccccaccctgccccctccacttcctgccctctgttccatcttcccccttcccaaaggccacagcctttattccaggcccagggatgtaggagggggaaggaggaaacaggaagcccagagagggcaaagggcctacctcggggcgcgaaccatgccccagactattatctcagggctttctgggcactgcacttcagcgtggcccacctgcccatgccctgaggccagttggcgaggggtggctcctgagggtttttataccctttgtttgctaatgtttaattttgcatcataatttctacattgtccctgagtgtcagaactataatttattccatttctctctgtgtctgtgccaagaaacgcaggctctgggcctgccccttgcccaggaggccttgccagcctgtgtgcttgtgggaacaccttgtacctgagcttacaggtaccaataaagaggctttattttta

SEQ ID NO: 69226 - DNA, 3186 bp, Homo sapiens
gcgggcggggctgggcgcaggcagtctcccgccgccgccgccgctgccggacgcgcagagcgaggggcggctggaccgacggctgccgggccgagcgcacagagtcgcggcgcagggggcgtccccggccgggacgcgggtcgcgtcgttgtcctccgcgagcgtccggattgcaggctgtctgtccccagaccccagagcacgtccggcaccaccatgactgggctgttgaagaggaaatttgaccagctggatgaggacaactcctcggtctcctcctcctcctcttcctctgggtgccagtctcgctcctgctccccaagctcttctgtctcccgtgcctgggactcagaggaggaaggcccctgggatcagatgcccctgcctgaccgtgacttctgcggccccagaagtttcacccccctgtctatcctgaagcgggctcgccgggagcgcccaggccgtgtagcctttgatgggatcaccgtcttctacttcccccgctgccagggcttcaccagtgtgcccagccgtggtggctgtactctgggtatggcccttcgccacagtgcttgccgtcgcttctctttggctgagtttgcgcaggagcaagcccgtgcacggcacgagaagctccgccagcgcttgaaagaggagaagttggagatgctgcagtggaagctttcggcagctggggtaccccaggcagaggcagggctgccacctgtggtggatgccattgatgacgcctctgtggaggaggacttggcagtcgctgtggcaggtggccggttggaagaagtgagcttcctacagccctacccagcccggcgacgtcgagctctgctgagggcttcaggtgtgcgaaggatcgatcgggaggagaagcgggagctgcaggcactgcgccaatcccgggaggattgtggctgtcactgcgataggatctgcgaccctgagacctgcagctgcagcctggcaggcatcaagtgccagatggaccacacagcattcccctgtggctgctgcagggagggctgtgagaaccccatgggccgtgtggaatttaatcaggcaagagttcagacccatttcatccacacactcacccgcctgcagttggaacaggaggctgagagctttagggagctggaggcccctgcccagggcagcccacccagccctggtgaggaggccctggtccctactttcccactggccaagccccccatgaacaatgagctgggagacaacagctgcagcagcgacatgactgattcttccacagcatcttcatcagcatcgggcactagtgaggctcctgactgccccacccacccaggcctgcctggccctggcttccagcctggcgttgatgatgacagcctggcacgcatcttgagtttcagtgactctgacttcggtggggaggaggaggaagaggaggaagggagtgtggggaacctggacaacctcagctgcttccatccagctgacatctttggtactagtgaccctggtggcctggccagctggacccacagctattctggctgtagcttcacatcaggcatcctggatgagaatgccaacctggatgccagctgcttcctaaatggtggccttgaagggtcaagggaaggcagccttcctggcacctcagtgccacccagcatggacgctggccggagtagctcagtggatctcagcttgtcttcttgtgactcctttgagttactccaggctctgccagattatagtctggggcctcactacacatcacagaaggtgtctgacagcctggacaacatcgaggcacctcacttccccctgcctggcctgtctccacctggggatgccagcagttgcttcctggagtccctcatgggcttctccgagccagccgccgaagccctagatccctttattgacagccagtttgaggacactgtcccagcatctctaatggagcctgtgccggtgtgaggaccaggatgtcttttcccagccccaagagacctgttgctgctttcttgtaattatggggctccccagagtctgcgtaacagtctcccactggctggctcacccacaggtgccatgtgcacactcctggttttcaaacaattctctggatttatttatttgttttaacttttctgtgctgaagagaggactagggggagggggcttcccctttcagctgcccggccccccacacccacagcttgctcttctatctccacaacgtgagcctggaagaggagaaaatgtggctcctctggagcttggcagaccacttttcggtctttgcgtgatgttccttagcccaaagacggtgagacagggctgaaatcaggtggcttctgccaccctgagccctagacccatgggtggctaaatccactggactgtgaagactataatttatttccataatttatttggagattgaggaggctttggttgcacttctttggctggtgggtaatgccaggggtggggtgggcacaggccctcaagagccccttttgccttgtagtcctacaccttgccctgcctgggctttggtgcagactaggtgtggatttgagctctgtgatctatgtctgctgcctggctcctagatggctctgcgggcaggtgctggccaaggacatcatctaggcagggggagagcctgggctgaacagctgtgaccaaaactcccttctgccccaccctgccccctccacttcctgccctctgttccatcttcccccttcccaaaggccacagcctttattccaggcccagggatgtaggagggggaaggaggaaacaggaagcccagagagggcaaagggcctacctcggggcgcgaaccatgccccagactattatctcagggctttctgggcactgcacttcagcgtggcccacctgcccatgccctgaggccagttggcgaggggtggctcctgagggtttttataccctttgtttgctaatgtttaattttgcatcataatttctacattgtccctgagtgtcagaactataatttattccatttctctctgtgtctgtgccaagaaacgcaggctctgggcctgccccttgcccaggaggccttgccagcctgtgtgcttgtgggaacaccttgtacctgagcttacaggtaccaataaagaggctttattttta

SEQ ID NO: 69227 - DNA, 3147 bp, Homo sapiens
gcgggcggggctgggcgcaggcagtctcccgccgccgccgccgctgccggacgcgcagagcgaggggcggctggaccgacggctgccgggccgagcgcacagagtcgcggcgcagggggcgtccccggccgggacgcgggtcgcgtcgttgtcctccgcgagcgtccggattgcaggctgtctgtccccagaccccagagcacgtccggcaccaccatgactgggctgttgaagaggaaatttgaccagctggatgaggacaactcctcggtctcctcctcctcctcttcctctgggtgccagtctcgctcctgctccccaagctcttctgtctcccgtgcctgggactcagaggaggaaggcccctgggatcagatgcccctgcctgaccgtgacttctgcggccccagaagtttcacccccctgtctatcctgaagcgggctcgccgggagcgcccaggccgtgtagcctttgatgggatcaccgtcttctacttcccccgctgccagggcttcaccagtgtgcccagccgtggtggctgtactctgggtatggcccttcgccacagtgcttgccgtcgcttctctttggctgagtttgcgcaggagcaagcccgtgcacggcacgagaagctccgccagcgcttgaaagaggagaagttggagatgctgcagtggaagctttcggcagctggggtaccccaggcagaggcagggctgccacctgtggtggatgccattgatgacgcctctgtggaggaggacttggcagtcgctgtggcaggtggccggttggaagaagtgagcttcctacagccctacccagcccggcgacgtcgagctctgctgagggcttcaggtgtgcgaaggatcgatcgggaggagaagcgggagctgcaggcactgcgccaatcccgggaggattgtggctgtcactgcgataggatctgcgaccctgagacctgcagctgcagcctggcaggcatcaagtgccagatggaccacacagcattcccctgtggctgctgcagggagggctgtgagaaccccatgggccgtgtggaatttaatcaggcaagagttcagacccatttcatccacacactcacccgcctgcagttggaacaggaggctgagagctttagggagctggaggcccctgcccagggcagcccacccagccctggtgaggaggccctggtccctactttcccactggccaagccccccatgaacaatgagctgggagacaacagctgcagcagcgacatgactgattcttccacagcatcttcatcagcatcgggcactagtgaggctcctgactgccccacccacccaggcctgcctggccctggcttccagcctggcgttgatgatgacagcctggcacgcatcttgagtttcagtgactctgacttcggtggggaggaggaggaagaggaggaagggagtgtggggaacctggacaacctcagctgcttccatccagctgacatctttggtactagtgaccctggtggcctggccagctggacccacagctattctggctgtagcttcacatcaggcatcctggatgagaatgccaacctggatgccagctgcttcctaaatggtggccttgaagggtcaagggaaggcagccttcctggcacctcagtgccacccagcatggacgctggccggagtagctcagtggatctcagcttgtcttcttgtgactcctttgagttactccaggctctgccagattatagtctggggcctcactacacatcacagaaggtgtctgacagcctgtctccacctggggatgccagcagttgcttcctggagtccctcatgggcttctccgagccagccgccgaagccctagatccctttattgacagccagtttgaggacactgtcccagcatctctaatggagcctgtgccggtgtgaggaccaggatgtcttttcccagccccaagagacctgttgctgctttcttgtaattatggggctccccagagtctgcgtaacagtctcccactggctggctcacccacaggtgccatgtgcacactcctggttttcaaacaattctctggatttatttatttgttttaacttttctgtgctgaagagaggactagggggagggggcttcccctttcagctgcccggccccccacacccacagcttgctcttctatctccacaacgtgagcctggaagaggagaaaatgtggctcctctggagcttggcagaccacttttcggtctttgcgtgatgttccttagcccaaagacggtgagacagggctgaaatcaggtggcttctgccaccctgagccctagacccatgggtggctaaatccactggactgtgaagactataatttatttccataatttatttggagattgaggaggctttggttgcacttctttggctggtgggtaatgccaggggtggggtgggcacaggccctcaagagccccttttgccttgtagtcctacaccttgccctgcctgggctttggtgcagactaggtgtggatttgagctctgtgatctatgtctgctgcctggctcctagatggctctgcgggcaggtgctggccaaggacatcatctaggcagggggagagcctgggctgaacagctgtgaccaaaactcccttctgccccaccctgccccctccacttcctgccctctgttccatcttcccccttcccaaaggccacagcctttattccaggcccagggatgtaggagggggaaggaggaaacaggaagcccagagagggcaaagggcctacctcggggcgcgaaccatgccccagactattatctcagggctttctgggcactgcacttcagcgtggcccacctgcccatgccctgaggccagttggcgaggggtggctcctgagggtttttataccctttgtttgctaatgtttaattttgcatcataatttctacattgtccctgagtgtcagaactataatttattccatttctctctgtgtctgtgccaagaaacgcaggctctgggcctgccccttgcccaggaggccttgccagcctgtgtgcttgtgggaacaccttgtacctgagcttacaggtaccaataaagaggctttattttta

SEQ ID NO: 69228 - DNA, 3611 bp, Homo sapiens
  misc_feature (3210)..(3210): n is a, c, g, or t
  misc_feature (3219)..(3219): n is a, c, g, or t
  misc_feature (3221)..(3222): n is a, c, g, or t
gcgggcggggctgggcgcaggcagtctcccgccgccgccgccgctgccggacgcgcagagcgaggggcggctggaccgacggctgccgggccgagcgcacagagtcgcggcgcagggggcgtccccggccgggacgcgggtcgcgtcgttgtcctccgcgagcgtccggattgcaggctgtctgtccccagaccccagagcacgtccggcaccaccatgactgggctgttgaagaggaaatttgaccagctggatgaggacaactcctcggtctcctcctcctcctcttcctctgggtgccagtctcgctcctgctccccaagctcttctgtctcccgtgcctgggactcagaggaggaaggcccctgggatcagatgcccctgcctgaccgtgacttctgcggccccagaagtttcacccccctgtctatcctgaagcgggctcgccgggagcgcccaggccgtgtagcctttgatgggatcaccgtcttctacttcccccgctgccagggcttcaccagtgtgcccagccgtggtggctgtactctgggtatggcccttcgccacagtgcttgccgtcgcttctctttggctgagtttgcgcaggagcaagcccgtgcacggcacgagaagctccgccagcgcttgaaagaggagaagttggagatgctgcagtggaagctttcggcagctggggtaccccaggcagaggcagggctgccacctgtggtggatgccattgatgacgcctctgtggaggaggacttggcagtcgctgtggcaggtggccggttggaagaagtgagcttcctacagccctacccagcccggcgacgtcgagctctgctgagggcttcaggtgtgcgaaggatcgatcgggaggagaagcgggagctgcaggcactgcgccaatcccgggaggattgtggctgtcactgcgataggatctgcgaccctgagacctgcagctgcagcctggcaggcatcaagtgccagatggaccacacagcattcccctgtggctgctgcagggagggctgtgagaaccccatgggccgtgtggaatttaatcaggcaagagttcagacccatttcatccacacactcacccgcctgcagttggaacaggaggctgagagctttagggagctggaggcccctgcccagggcagcccacccagccctggtgaggaggccctggtccctactttcccactggccaagccccccatgaacaatgagctgggagacaacagctgcagcagcgacatgactgattcttccacagcatcttcatcagcatcgggcactagtgaggctcctgactgccccacccacccaggcctgcctggccctggcttccagcctggcgttgatgatgacagcctggcacgcatcttgagtttcagtgactctgacttcggtggggaggaggaggaagaggaggaagggagtgtggggaacctggacaacctcagctgcttccatccagctgacatctttggtactagtgaccctggtggcctggccagctggacccacagctattctggctgtagcttcacatcaggcatcctggatgagaatgccaacctggatgccagctgcttcctaaatggtggccttgaagggtcaagggaaggcagccttcctggcacctcagtgccacccagcatggacgctggccggagtagctcagtggatctcagcttgtcttcttgtgactcctttgagttactccaggctctgccagattatagtctggggcctcactacacatcacagaaggtgtctgacagcctggacaacatcgaggcacctcacttccccctgcctggcctgtctccacctggggatgccagcagttgcttcctggagtccctcatgggcttctccgagccagccgccgaagccctagatccctttattgacagccagtttgaggacactgtcccagcatctctaatggagcctgtgccggtgtgaggaccaggatgtcttttcccagccccaagagacctgttgctgctttcttgtaattatggggctccccagagtctgcgtaacagtctcccactggctggctcacccacaggtgccatgtgcacactcctggttttcaaacaattctctggatttatttatttgttttaacttttctgtgctgaagagaggactagggggagggggcttcccctttcagctgcccggccccccacacccacagcttgctcttctatctccacaacgtgagcctggaagaggagaaaatgtggctcctctggagcttggcagaccacttttcggtctttgcgtgatgttccttagcccaaagacggtgagacagggctgaaatcaggtggcttctgccaccctgagccctagacccatgggtggctaaatccactggactgtgaagactataatttatttccataatttatttggagattgaggaggctttggttgcacttctttggctggtgggtaatgccaggggtggggtgggcacaggccctcaagagccccttttgccttgtagtcctacaccttgccctgcctgggctttggtgcagactaggtgtggatttgagctctgtgatctatgtctgctgcctggctcctagatggctctgcgggcaggtgctggccaaggacatcatctaggcagggggagagcctgggctgaacagctgtgaccaaaactcccttctgccccaccctgccccctccacttcctgccctctgttccatcttcccccttcccaaaggccacagcctttattccaggcccagggatgtaggagggggaaggaggaaacaggaagcccagagagggcaaagggcctacctcggggcgcgaaccatgccccagactattatctcagggctttctgggcactgcacttcagcgtggcccacctgcccatgccctgaggccagttggcgaggggtggctcctgagggtttttataccctttgtttgctaatgtttaattttgcatcataatttctacattgtccctgagtgtcagaactataatttattccatttctctctgtgtctgtgccaagaaacgcaggctctgggcctgccccttgcccaggaggccttgccagcctgtgtgcttgtgggaacaccttgtacctgagcttacaggtaccaataaagaggctttatttttaaaaaaaaaaaaaaaaaaaaaaaanaaaaaaaanannaaaaaaaaaaaaaaaaaacaaaaaaaaaaattgtgtgtgggcgcgcgccgcgcggcgccccccggaaaagtttttaaaacccccttggtgggggcgcgggggcgcccccaggagtaggagaagaacagtgcgggacaccagggggtttcctccaggagagaaacacccggcggcaaccagaacagagcgggcggggggtagctcccaccaaataaaaaaaaacccgcgccgcgggggaagaacgacacgtgggttctgaaaacaaacccccctacagaaggagggccctcgagaggagaccacagacgggaggctcctctaaaccaagagggggccaccaaggagagcgcccccagagtatcaaataattacccccccgccgggtgggt

SEQ ID NO: 69229 - DNA, 2967 bp, Homo sapiens
gcgggcggggctgggcgcaggcagtctcccgccgccgccgccgctgccggacgcgcagagcgaggggcggctggaccgacggctgccgggccgagcgcacagagtcgcggcgcagggggcgtccccggccgggacgcgggtcgcgtcgttgtcctccgcgagcgtccggattgcaggctgtctgtccccagaccccagagcacgtccggcaccaccatgactgggctgttgaagaggaaatttgaccagctggatgaggacaactcctcggtctcctcctcctcctcttcctctgggtgccagtctcgctcctgctccccaagctcttctgtctcccgtgcctgggactcagaggaggaaggcccctgggatcagatgcccctgcctgaccgtgacttctgcggccccagaagtttcacccccctgtctatcctgaagcgggctcgccgggagcgcccaggccgtgtagcctttgatgggatcaccgtcttctacttcccccgctgccagggcttcaccagtgtgcccagccgtggtggctgtactctgggtatggcccttcgccacagtgcttgccgtcgcttctctttggctgagtttgcgcaggagcaagcccgtgcacggcacgagaagctccgccagcgcttgaaagaggagaagttggagatgctgcagtggaagctttcggcagctggggtaccccaggcagaggcagggctgccacctgtggtggatgccattgatgacgcctctgtggaggaggacttggcagtcgctgtggcaggtggccggttggaagaagtgagcttcctacagccctacccagcccggcgacgtcgagctctgctgagggcttcaggtgtgcgaaggatcgatcgggaggagaagcgggagctgcaggcactgcgccaatcccgggaggattgtggctgtcactgcgataggatctgcgaccctgagacctgcagctgcagcctggcaggcatcaagtgccagatggaccacacagcattcccctgtggctgctgcagggagggctgtgagaaccccatgggccgtgtggaatttaatcaggcaagagttcagacccatttcatccacacactcacccgcctgcagttggaacaggaggctgagagctttagggagctggaggcccctgcccagggcagcccacccagccctggtgaggaggccctggtccctactttcccactggccaagccccccatgaacaatgagctgggagacaacagctgcagcagcgacatgactgattcttccacagcatcttcatcagcatcgggcactagtgaggctcctgactgccccacccacccaggcctgcctggccctggcttccagcctggcgttgatgatgacagcctggcacgcatcttgagtttcagtgactctgacttcggtggggaggaggaggaagaggaggaagggagtgtggggaacctggacaacctcagctgcttccatccagctgacatctttggtactagtgaccctggtggcctggccagctggacccacagctattctggctgtagcttcacatcaggcatcctggatgagaatgccaacctggatgccagctgcttcctaaatggtggccttgaagggtcaagggaaggcagccttcctggcacctcagtgccacccagcatggacgctggccggagtagctcagtggatctcagcttgtcttcttgtgactcctttgagttactccaggctctgccagattatagtctggggcctcactacacatcacagaaggtgtctgacagcctggacaacatcgaggcacctcacttccccctgcctggcctgtctccacctggggatgccagcagttgcttcctggagtccctcatgggcttctccgagccagccgccgaagccctagatccctttattgacagccagtttgaggacactgtcccagcatctctaatggagcctgtgccggtgtgaggaccaggatgtcttttcccagccccaagagacctgttgctgctttcttgtaattatggggctccccagagtctgcgtaacagtctcccactggctggctcacccacaggtgccatgtgcacactcctggttttcaaacaattctctggatttatttatttgttttaacttttctgtgctgaagagaggactagggggagggggcttcccctttcagctgcccggccccccacacccacagcttgctcttctatctccacaacgtgagcctggaagaggagaaaatgtggctcctctggagcttggcagaccacttttcggtctttgcgtgatgttccttagcccaaagacggtgagacagggctgaaatcaggtggcttctgccaccctgagccctagacccatgggtggctaaatccactggactgtgaagactataatttatttccataatttatttggagattgaggaggctttggttgcacttctttggctggtgggtaatgccaggggtggggtgggcacaggccctcaagagccccttttgccttgtagtcctacaccttgccctgcctgggctttggtgcagactaggtgtggatttgagctctgtgatctatgtctgctgcctggctcctagatggctctgcgggcaggtgctggccaaggacatcatctaggcagggggagagcctgggctgaacagctgtgaccaaaactcccttctgccccaccctgccccctccacttcctgccctctgttccatcttcccccttcccaaaggccacagcctttattccaggcccagggatgtaggagggggaaggaggaaacaggaagcccagagagggcaaagggcctacctcggggcgcgaaccatgccccagactattatctcagggggccttgccagcctgtgtgcttgtgggaacaccttgtacctgagcttacaggtaccaataaagaggctttattttta

SEQ ID NO: 69230 - DNA, 2102 bp, Homo sapiens
gcgggcggggctgggcgcaggcagtctcccgccgccgccgccgctgccggacgcgcagagcgaggggcggctggaccgacggctgccgggccgagcgcacagagtcgcggcgcagggggcgtccccggccgggacgcgggtcgcgtcgttgtcctccgcgagcgtccggattgcaggctgtctgtccccagaccccagagcacgtccggcaccaccatgactgggctgttgaagaggaaatttgaccagctggatgaggacaactcctcggtctcctcctcctcctcttcctctgggtgccagtctcgctcctgctccccaagctcttctgtctcccgtgcctgggactcagaggaggaaggcccctgggatcagatgcccctgcctgaccgtgacttctgcggccccagaagtttcacccccctgtctatcctgaagcgggctcgccgggagcgcccaggccgtgtagcctttgatgggatcaccgtcttctacttcccccgctgccagggcttcaccagtgtgcccagccgtggtggctgtactctgggtatggcccttcgccacagtgcttgccgtcgcttctctttggctgagtttgcgcaggagcaagcccgtgcacggcacgagaagctccgccagcgcttgaaagaggagaagttggagatgctgcagtggaagctttcggcagctggggtaccccaggcagaggcagggctgccacctgtggtggatgccattgatgacgcctctgtggaggaggacttggcagtcgctgtggcaggtggccggttggaagaagtgagcttcctacagccctacccagcccggcgacgtcgagctctgctgagggcttcaggtgtgcgaaggatcgatcgggaggagaagcgggagctgcaggcactgcgccaatcccgggaggattgtggctgtcactgcgataggatctgcgaccctgagacctgcagctgcagcctggcaggcatcaagtgccagatggaccacacagcattcccctgtggctgctgcagggagggctgtgagaaccccatgggccgtgtggaatttaatcaggcaagagttcagacccatttcatccacacactcacccgcctgcagttggaacaggaggctgagagctttagggagctggaggcccctgcccagggcagcccacccagccctggtgaggaggccctggtccctactttcccactggccaagccccccatgaacaatgagctgggagacaacagctgcagcagcgacatgactgattcttccacagcatcttcatcagcatcgggcactagtgaggctcctgactgccccacccacccaggcctgcctggccctggcttccagcctggcgttgatgatgacagcctggcacgcatcttgagtttcagtgactctgacttcggtggggaggaggaggaagaggaggaagggagtgtggggaacctggacaacctcagctgcttccatccagctgacatctttggtactagtgaccctggtggcctggccagctggacccacagctattctggctgtagcttcacatcaggcatcctggatgagaatgccaacctggatgccagctgcttcctaaatggtggccttgaagggtcaagggaaggcagccttcctggcacctcagtgccacccagcatggacgctggccggagtagctcagtggatctcagcttgtcttcttgtgactcctttgagttactccaggctctgccagattatagtctggggcctcactacacatcacagaaggtgtctgacagcctgtctccacctggggatgccagcagttgcttcctggagtccctcatgggcttctccgagccagccgccgaagccctagatccctttattgacagccagtttgaggacactgtcccagcatctctaatggagcctgtgccggtgtgaggaccaggatgtcttttcccagccccaagagacctgttgctgctttcttgtaattatggggctgccccttgcccaggaggccttgccagcctgtgtgcttgtgggaacaccttgtacctgagcttacaggtaccaataaagaggctttattttta

SEQ ID NO: 69231 - DNA, 724 bp, Homo sapiens
tggaggcccggcgtgcgtcagcgcagtgagccccggagttttccactgacgaggagggcggagcggcgggcggggctgggcgcaggcagtctcccgccgccgccgccgctgccggacgcgcagagcgaggggcggctggaccgacggctgccgggccgagcgcacagagtcgcggcgcagggggcgtccccggccgggacgcgggtcgcgtcgttgtcctccgcgagcgtccggattgcaggtgagcgccgaggggcctcgggcccggcaggacgggactttggggagggggcattcagcgcgagtggcactgccgctcctgcctcctgccgttcactccccggcaccctgagcgggcgcgggggctggagctgcccggctctgacggcgtgccgcggccggagtcgggggccgggggcccggccggcgggagtcgcaggttttctgctcccctcccccgcccgccgcggtaaccccgagagaagtcacggctccccgagctcggcgcgagtggggacagagccgggcttgcgcgcgagcggcgaggcgacgggggcgtgcgtccgcgggtgagtttccttttgacccagttgcctgagaacttttcagaagttcctcgcgtggccggagcaggtgacatttgtcgccttcctcctcgggctcccccctcggggaggctgcgggagctgcggcgtgtgccgggcgcccccggccggcgggggtc

SEQ ID NO: 69232 - DNA, 1982 bp, Homo sapiens
aggctggtcctggtcccgggggtgtatgggatcgccgccgctgccggacgcgcagagcgaggggcggctggaccgacggctgccgggccgagcgcacagagtcgcggcgcagggggcgtccccggccgggacgcgggtcgcgtcgttgtcctccgcgagcgtccggattgcaggctgtctgtccccagaccccagagcacgtccggcaccaccatgactgggctgttgaagaggaagaggaggaagggagtgtggggaacctggacaacctcagctgcttccatccagctgacatctttggtactagtgaccctggtggcctggccagctggacccacagctattctggctgtagcttcacatcaggcatcctggatgagaatgccaacctggatgccagctgcttcctaaatggtggccttgaagggtcaagggaaggcagccttcctggcacctcagtgccacccagcatggacgctggccggagtagctcagtggatctcagcttgtcttcttgtgactcctttgagttactccaggctctgccagattatagtctggggcctcactacacatcacagaaggtgtctgacagcctggacaacatcgaggcacctcacttccccctgcctggcctgtctccacctggggatgccagcagttgcttcctggagtccctcatgggcttctccgagccagccgccgaagccctagatccctttattgacagccagtttgaggacactgtcccagcatctctaatggagcctgtgccggtgtgaggaccaggatgtcttttcccagccccaagagacctgttgctgctttcttgtaattatggggctccccagagtctgcgtaacagtctcccactggctggctcacccacaggtgccatgtgcacactcctggttttcaaacaattctctggatttatttatttgttttaacttttctgtgctgaagagaggactagggggagggggcttcccctttcagctgcccggccccccacacccacagcttgctcttctatctccacaacgtgagcctggaagaggagaaaatgtggctcctctggagcttggcagaccacttttcggtctttgcgtgatgttccttagcccaaagacggtgagacagggctgaaatcaggtggcttctgccaccctgagccctagacccatgggtggctaaatccactggactgtgaagactataatttatttccataatttatttggagattgaggaggctttggttgcacttctttggctggtgggtaatgccaggggtggggtgggcacaggccctcaagagccccttttgccttgtagtcctacaccttgccctgcctgggctttggtgcagactaggtgtggatttgagctctgtgatctatgtctgctgcctggctcctagatggctctgcgggcaggtgctggccaaggacatcatctaggcagggggagagcctgggctgaacagctgtgaccaaaactcccttctgccccaccctgccccctccacttcctgccctctgttccatcttcccccttcccaaaggccacagcctttattccaggcccagggatgtaggagggggaaggaggaaacaggaagcccagagagggcaaagggcctacctcggggcgcgaaccatgccccagactattatctcagggctttctgggcactgcacttcagcgtggcccacctgcccatgccctgaggccagttggcgaggggtggctcctgagggtttttataccctttgtttgctaatgtttaattttgcatcataatttctacattgtccctgagtgtcagaactataatttattccatttctctctgtgtctgtgccaagaaacgcaggctctgggcctgccccttgcccaggaggccttgccagcctgtgtgcttgtgggaacaccttgtacctgagcttacaggtaccaataaagaggctttattttta

SEQ ID NO: 69233 - DNA, 3575 bp, Homo sapiens
  misc_feature (3210)..(3210): n is a, c, g, or t
  misc_feature (3219)..(3219): n is a, c, g, or t
  misc_feature (3221)..(3222): n is a, c, g, or t
gcgggcggggctgggcgcaggcagtctcccgccgccgccgccgctgccggacgcgcagagcgaggggcggctggaccgacggctgccgggccgagcgcacagagtcgcggcgcagggggcgtccccggccgggacgcgggtcgcgtcgttgtcctccgcgagcgtccggattgcaggctgtctgtccccagaccccagagcacgtccggcaccaccatgactgggctgttgaagaggaaatttgaccagctggatgaggacaactcctcggtctcctcctcctcctcttcctctgggtgccagtctcgctcctgctccccaagctcttctgtctcccgtgcctgggactcagaggaggaaggcccctgggatcagatgcccctgcctgaccgtgacttctgcggccccagaagtttcacccccctgtctatcctgaagcgggctcgccgggagcgcccaggccgtgtagcctttgatgggatcaccgtcttctacttcccccgctgccagggcttcaccagtgtgcccagccgtggtggctgtactctgggtatggcccttcgccacagtgcttgccgtcgcttctctttggctgagtttgcgcaggagcaagcccgtgcacggcacgagaagctccgccagcgcttgaaagaggagaagttggagatgctgcagtggaagctttcggcagctggggtaccccaggcagaggcagggctgccacctgtggtggatgccattgatgacgcctctgtggaggaggacttggcagtcgctgtggcaggtggccggttggaagaagtgagcttcctacagccctacccagcccggcgacgtcgagctctgctgagggcttcaggtgtgcgaaggatcgatcgggaggagaagcgggagctgcaggcactgcgccaatcccgggaggattgtggctgtcactgcgataggatctgcgaccctgagacctgcagctgcagcctggcaggcatcaagtgccagatggaccacacagcattcccctgtggctgctgcagggagggctgtgagaaccccatgggccgtgtggaatttaatcaggcaagagttcagacccatttcatccacacactcacccgcctgcagttggaacaggaggctgagagctttagggagctggaggcccctgcccagggcagcccacccagccctggtgaggaggccctggtccctactttcccactggccaagccccccatgaacaatgagctgggagacaacagctgcagcagcgacatgactgattcttccacagcatcttcatcagcatcgggcactagtgaggctcctgactgccccacccacccaggcctgcctggccctggcttccagcctggcgttgatgatgacagcctggcacgcatcttgagtttcagtgactctgacttcggtggggaggaggaggaagaggaggaagggagtgtggggaacctggacaacctcagctgcttccatccagctgacatctttggtactagtgaccctggtggcctggccagctggacccacagctattctggctgtagcttcacatcaggcatcctggatgagaatgccaacctggatgccagctgcttcctaaatggtggccttgaagggtcaagggaaggcagccttcctggcacctcagtgccacccagcatggacgctggccggagtagctcagtggatctcagcttgtcttcttgtgactcctttgagttactccaggctctgccagattatagtctggggcctcactacacatcacagaaggtgtctgacagcctggacaacatcgaggcacctcacttccccctgcctggcctgtctccacctggggatgccagcagttgcttcctggagtccctcatgggcttctccgagccagccgccgaagccctagatccctttattgacagccagtttgaggacactgtcccagcatctctaatggagcctgtgccggtgtgaggaccaggatgtcttttcccagccccaagagacctgttgctgctttcttgtaattatggggctccccagagtctgcgtaacagtctcccactggctggctcacccacaggtgccatgtgcacactcctggttttcaaacaattctctggatttatttatttgttttaacttttctgtgctgaagagaggactagggggagggggcttcccctttcagctgcccggccccccacacccacagcttgctcttctatctccacaacgtgagcctggaagaggagaaaatgtggctcctctggagcttggcagaccacttttcggtctttgcgtgatgttccttagcccaaagacggtgagacagggctgaaatcaggtggcttctgccaccctgagccctagacccatgggtggctaaatccactggactgtgaagactataatttatttccataatttatttggagattgaggaggctttggttgcacttctttggctggtgggtaatgccaggggtggggtgggcacaggccctcaagagccccttttgccttgtagtcctacaccttgccctgcctgggctttggtgcagactaggtgtggatttgagctctgtgatctatgtctgctgcctggctcctagatggctctgcgggcaggtgctggccaaggacatcatctaggcagggggagagcctgggctgaacagctgtgaccaaaactcccttctgccccaccctgccccctccacttcctgccctctgttccatcttcccccttcccaaaggccacagcctttattccaggcccagggatgtaggagggggaaggaggaaacaggaagcccagagagggcaaagggcctacctcggggcgcgaaccatgccccagactattatctcagggctttctgggcactgcacttcagcgtggcccacctgcccatgccctgaggccagttggcgaggggtggctcctgagggtttttataccctttgtttgctaatgtttaattttgcatcataatttctacattgtccctgagtgtcagaactataatttattccatttctctctgtgtctgtgccaagaaacgcaggctctgggcctgccccttgcccaggaggccttgccagcctgtgtgcttgtgggaacaccttgtacctgagcttacaggtaccaataaagaggctttatttttaaaaaaaaaaaaaaaaaaaaaaaanaaaaaaaanannaaaaaaaaaaaaaaaaaaaggggggggcgggccccaaggacccccccagggggggccacacgaaaaccgcctccccaggataaggggacacaggggggcaccaagacgccagccaggacagaccgcaggccccgcggacgagagcacaccagccgaaaggggcaacaagggcaacccgcggccacacgacgcaagggcaccccacccggcgggagcgcacacacggggaaccccccaacgacacaacacccccccggcacccacaccacccacgcggcccacgaggccccacccgcccccccaccgagcgcgccaccaccgcctccacggccccgcccagcacccacccccgc

SEQ ID NO: 69234 - DNA, 1938 bp, Homo sapiens
gcgggcggggctgggcgcaggcagtctcccgccgccgccgccgctgccggacgcgcagagcgaggggcggctggaccgacggctgccgggccgagcgcacagagtcgcggcgcagggggcgtccccggccgggacgcgggtcgcgtcgttgtcctccgcgagcgtccggattgcaggctgtctgtccccagaccccagagcacgtccggcaccaccatgactgggctgttgaagaggaaatttgaccagctggatgaggacaactcctcggtctcctcctcctcctcttcctctgggtgccagtctcgctcctgctccccaagctcttctgtctcccgtgcctgggactcagaggaggaaggcccctgggatcagatgcccctgcctgaccgtgacttctgcggccccagaagtttcacccccctgtctatcctgaagcgggctcgccgggagcgcccaggccgtgtagcctttgatgggatcaccgtcttctacttcccccgctgccagggcttcaccagtgtgcccagccgtggtggctgtactctgggtatggcccttcgccacagtgcttgccgtcgcttctctttggctgagtttgcgcaggagcaagcccgtgcacggcacgagaagctccgccagcgcttgaaagaggagaagttggagatgctgcagtggaagctttcggcagctggggtaccccaggcagaggcagggctgccacctgtggtggatgccattgatgacgcctctgtggaggaggacttggcagtcgctgtggcaggtggccggttggaagaagtgagcttcctacagccctacccagcccggcgacgtcgagctctgctgagggcttcaggtgtgcgaaggatcgatcgggaggagaagcgggagctgcaggcactgcgccaatcccgggaggattgtggctgtcactgcgataggatctgcgaccctgagacctgcagctgcagcctggcaggcatcaagtgccagatggaccacacagcattcccctgtggctgctgcagggagggctgtgagaaccccatgggccgtgtggaatttaatcaggcaagagttcagacccatttcatccacacactcacccgcctgcagttggaacaggaggctgagagctttagggagctggaggcccctgcccagggcagcccacccagccctggtgaggaggccctggtccctactttcccactggccaagccccccatgaacaatgagctgggagacaacagctgcagcagcgacatgactgattcttccacagcatcttcatcagcatcgggcactagtgaggctcctgactgccccacccacccaggcctgcctggccctggcttccagcctggcgttgatgatgacagcctggcacgcatcttgagtttcagtgactctgacttcggtggggaggaggaggaagaggaggaagggagtgtggggaacctggacaacctcagctgcttccatccagctgacatctttggtactagtgaccctggtggcctggccagctggacccacagctattctggctgtagcttcacatcaggcatcctggatgagaatgccaacctggatgccagctgcttcctaaatggtggccttgaagggtcaagggaaggcagccttcctggcacctcagtgccacccagcatggacgctggccggagtagctcagtggatctcagcttgtcttcttgtgactcctttgagttactccaggctctgccagattatagtctggggcctcactacacatcacagaaggtgtctgacagcctggacaacatcgaggcacctcacttccccctgcctggcctgtctccaccatttaggaagcagctggcatccaggttggcattctcatccaggacgcctgatgtgaagctacagccagaatagctgtgggtccagctg

SEQ ID NO: 69235 - DNA, 383 bp, Homo sapiens
caaaagccagaattgacaaatgggatctaattaaactaaggaacttgtgcagttttatttgggagtgtgcatgaggtacctctgagttttaaaaatgaagaaagtaagtggtcatgctttcctgactctttggtagacacagccttttaagacggtgattctgagctgttatggttttgggttttctataatactaaagcttactgccgacatgtaaccaaaagcttgaattaatgaaaaaaaaattacccaaatgcacgttaaaaacctcttacaacatatgtgcacattcatagataacatgtagaactttattttgtgttaaaaagcttgtagaaaagttcaggcagtgcacttaatgaataaaacttggtctttgtaaa

SEQ ID NO: 69236 - DNA, 359 bp, Homo sapiens
gcaatgtctgcctcccaggctcaagtgattctcgtgcttcagtctcccaagtagctgggacctataggtgtgcaccaccttgcccggttaatttttttagcagagacacggtttcaccacgtttcccagactggtcttgaactcctgagctcaagcgatctgcctgccttggcttccccaagtgctgggattacaggtgtcagccacctcacccagcctcattagattaattaataagaaaaataaagattttatgggttatcaaatgctttatattgctagtctttttaattttagtaagatagtcctgaaagtgatattgctgggtcagagggcctgtacattttatatcttgtaga

SEQ ID NO: 69237 - DNA, 318 bp, Homo sapiens
tacaaaaagaaaataaatatgatacaaactctaataggaaaatgcacagagagcacataagaggggatgagtttcaggaagacttcccaagggagaaaatactttagtggaatgttaaaggacaaatactcattacctcagcagaagatagagttaaaggaaattttatatatggcaatgatttttcaaaatttatggagctaaaatgcatgacatttccaagagccacatgtgctttggctggagtgcccaatatggtggagatgagtatgagaaatgatggacaagaagctggtgcaggtcacaaaagacctttgt

SEQ ID NO: 69238 - DNA, 734 bp, Homo sapiens
tttagggccttgatgtttcagcatggaatcctctgcacaggaagtatttcctctttactgagggccccactggcggtgacattttaaccttaatcttgccaatcttgtcactatcagatttcagtttctggtttgcattgagtaagagcttggatgaggaaatagactttttcttaaatgcattcgaatcataattttccctaatctttcttatgtgaagcagctctccactgcaagtatttgttttgtcatttaaaaaggatttagtgaaattcaagcctgggcaacatggcagaacccatctctggtaaaaatacaaaaattagccaggcgtagcatgtgtaccctctagttctagccacttgtgagactgaggtgaagggatcgcctgagtctgggaagttgaggctccagtgagccgtgtttgtgtcactgcacttcagcctgggtgacaaaatgagaccctgtctaaaaaaaaaaaaaaaaaaagatttaatgaaatttagacatttgtttgatggttgttcaatcatctgtttctcatatgttcatgcagcatcatatacacctaaatgatcatgttttgtttcaaattaaggcaacagaatgttttagggaaattgtcccaagcgcaggcatacttgttaatgatctagcagggacatcttatgcacatcaccttctctgaggccggataagagcgtgggataggtcagaacacagactcagaatgg

SEQ ID NO: 69239 - DNA, 596 bp, Homo sapiens
gagaaagggcctttaaaggtgactaagataaaacaaggtcatatggatgagctctaatccaataggactggtgtctttatcagaagaggacagacacacagactcagggacaatcacgtggggacacagcaaaaaggtaaccatttgggagccaaggaaagaggctctactaaaaatacaaaaattagccaggcgtagcatgtgtaccctctagttctagccacttgtgagactgaggtgaagggatcgcctgagtctgggaagttgaggctccagtgagccgtgtttgtgtcactgcacttcagcctgggtgacaaaatgagaccctgtctaaaaaaaaaaaaaaaaaaagatttaatgaaatttagacatttgtttgatggttgttcaatcatctgtttctcatatgttcatgcagcatcatatacacctaaatgatcatgttttgtttcaaattaaggcaacagaatgttttagggaaattgtcccaagcgcaggcatacttgttaatgatctagcagggacatcttatgcacatcaccttctctgaggccggataagagcgtgggataggtcagaacacagactcagaatgg

SEQ ID NO: 69240 - DNA, 1944 bp, Homo sapiens
acaggacccaggtgctgggggagaacagacctcgggagcagccaggagtcctcggtcctgggagggtttaaaagccagggggccgtctcgacctcagtctgaccttccctcccggcagcagcatgcgggggttgctggtgttgagtgtcctgttgggggctgtctttggcaaggaggactttgtggggcatcaggtgctccgaatctctgtagccgatgaggcccaggtacagaaggtgaaggagctggaggacctggagcacctgcagctggacttctggcggggccctgcccaccctggctcccccatcgacgtccgagtgcccttccccagcatccaggcggtcaagatctttctggagtcccacggcatcagctatgagaccatgatcgaggacgtgcagtcgctgctggacgaggagcaggagcagatgttcgccttccggtcccgggcgcgctccaccgacacttttaactacgccacctaccacaccctggaggagatctatgacttcctggacctgctggtggcggagaacccgcaccttgtcagcaagatccagattggcaacacctatgaagggcgtcccatttacgtgctgaagttcagcacggggggcagtaagcgtccagccatctggatcgacacgggcatccattcccgggagtgggtcacccaggccagtggggtctggtttgcaaagaagatcactcaagactacgggcaggatgcagctttcaccgccattctcgacaccttggacatcttcctggagatcgtcaccaaccctgatggctttgccttcacgcacagcacgaatcgcatgtggcgcaagactcggtcccacacagcaggctccctctgtattggcgtggaccccaacaggaactgggacgctggctttgggttgtccggagccagcagtaacccctgctcggagacttaccacggcaagtttgccaattccgaagtggaggtcaagtccattgtagactttgtgaaggaccatgggaacatcaaggccttcatctccatccacagctactcccagctcctcatgtatccctatggctacaaaacagaaccagtccctgaccaggatgagctggatcagctttccaaggctgctgtgacagccctggcctctctctacgggaccaagttcaactatggcagcatcatcaaggcaatttatcaagccagtggaagcactattgactggacctacagccagggcatcaagtactccttcaccttcgagctccgggacactgggcgctatggcttcctgctgccagcctcccagatcatccccacagccaaggagacgtggctggcgcttctgaccatcatggagcacaccctgaatcacccctactgagctgaccctttgacacccttcttgtcctcctctctggccccatccaggcaaccaaataaagtttgagtgtaccaggaacagaatcctggggcttgcaaaaaaaaaaaaaaaaaaaaaaaaaaaaagaaaacaaaaaaaaaaaaaaaaaaaaacaaaaaaagggggggcgccacacaaaaaataccccagggggggcccaaaatagggggccaccccagaatctactgtgacaaaagggacgcccaaaaagagggaggcaggacatacatcacagacccagacgacgcgacggcgtaaaaacaaggcacaaaactggagaacacgggaaacggagcgacactaggaagagaggcgccccccatacagatggagggcagggcacaacactcggcggcacccaccaccccaccgcgaggagactacacaccccacaggggggacaacaaacacagaagtacccaagcgtacaacacggggctaaaccacagagcacgaaatatgcgcccggccaccgcgagaaaccttcgccaccccgaacgtacacgcgagacgccttatcacc

SEQ ID NO: 69241 - DNA, 1715 bp, Homo sapiens
  misc_feature (1508)..(1508): n is a, c, g, or t
  misc_feature (1517)..(1517): n is a, c, g, or t
  misc_feature (1526)..(1526): n is a, c, g, or t
  misc_feature (1531)..(1531): n is a, c, g, or t
  misc_feature (1534)..(1534): n is a, c, g, or t
  misc_feature (1537)..(1538): n is a, c, g, or t
  misc_feature (1542)..(1543): n is a, c, g, or t
  misc_feature (1546)..(1546): n is a, c, g, or t
  misc_feature (1562)..(1562): n is a, c, g, or t
acaggacccaggtgctgggggagaacagacctcgggagcagccaggagtcctcggtcctgggagggtttaaaagccagggggccgtctcgacctcagtctgaccttccctcccggcagcagcatgcgggggttgctggtgttgagtgtcctgttgggggctgtctttggcaaggaggactttgtggggcatcaggtgctccgaatctctgtagccgatgaggcccaggtacagaaggtgaaggagctggaggacctggagcacctgcagctggacttctggcggggccctgcccaccctggctcccccatcgacgtccgagtgcccttccccagcatccaggcggtcaagatctttctggagtcccacggcatcagctatgagaccatgatcgaggacgtgcagtcgctgctggacgaggagcaggagcagatgttcgccttccggtcccgggcgcgctccaccgacacttttaactacgccacctaccacaccctggaggagatctatgacttcctggacctgctggtggcggagaacccgcaccttgtcagcaagatccagattggcaacacctatgaagggcgtcccatttacgtgctgaagttcagcacggggggcagtaagcgtccagccatctggatcgacacgggcatccattcccgggagtgggtcacccaggccagtggggtctggtttgcaaagaagatcactcaagactacgggcaggatgcagctttcaccgccattctcgacaccttggacatcttcctggagatcgtcaccaaccctgatggctttgccttcacgcacagcacgaatcgcatgtggcgcaagactcggtcccacacagcaggctccctctgtattggcgtggaccccaacaggaactgggacgctggctttgggttgtccggagccagcagtaacccctgctcggagacttaccacggcaagtttgccaattccgaagtggaggtcaagtccattgtagactttgtgaaggaccatgggaacatcaaggccttcatctccatccacagctactcccagctcctcatgtatccctatggctacaaaacagaaccagtccctgaccaggatgagctggatcagctttccaaggctgctgtgacagccctggcctctctctacgggaccaagttcaactatggcagcatcatcaaggcaatttatcaagccagtggaagcactattgactggacctacagccagggcatcaagtactccttcaccttcgagctccgggacactgggcgctatggcttcctgctgccagcctcccagatcatccccacagccaaggagacgtggctggcgcttctgaccatcatggagcacaccctgaatcacccctactgagctgaccctttgacacccttcttgtcctcctctctggccccatccaggcaaccaaataaagtttgagtgtaccaaaaaaaaaaaaaaaaaaaaaaaaaaaaactgtgtgttggggcgcgcgcccgnggcccccgngaaaaaggnttttnaanacnnattnncgnttggggcgcggcgggncccccagtggtatgtggcgacacttgggcgcatccgagcgggttccaccaaggagaacacctcggggccacgcgactttgggttgggtttctccccaacattaaaaaaacgcgccgggggggacccgggctgtctctggaaaaacccaagagg

SEQ ID NO: 69242 - DNA, 377 bp, Homo sapiens
ccactcagcattgcacaaggcacagagctttggacagggttggatcgttaacccaacccgtgtaaatattcccaaagtgattgaccctttctctcctattttactcctgccccagatcaagccagtggaagcactattgactggacctacagccagggcatcaagtactccttcaccttcgagctccgggacactgggcgctatggcttcctgctgccagcctcccagatcatccccacagccaaggagacgtggctggcgcttctgaccatcatggagcacaccctgaatcacccctactgagctgaccctttgacacccttcttgtcctcctctctggccccatccaggcaaccaaataaagtttgagtgtacca

SEQ ID NO: 69243 - DNA, 1688 bp, Homo sapiens
acaggacccaggtgctgggggagaacagacctcgggagcagccaggagtcctcggtcctgggagggtttaaaagccagggggccgtctcgacctcagtctgaccttccctcccggcagcagcatgcgggggttgctggtgttgagtgtcctgttgggggctgtctttggcaaggaggactttgtggggcatcaggtgctccgaatctctgtagccgatgaggcccaggtacagaaggtgaaggagctggaggacctggagcacctgcagctggacttctggcggggccctgcccaccctggctcccccatcgacgtccgagtgcccttccccagcatccaggcggtcaagatctttctggagtcccacggcatcagctatgagaccatgatcgaggacgtgcagtcgctgctggacgaggagcaggagcagatgttcgccttccggtcccgggcgcgctccaccgacacttttaactacgccacctaccacaccctggaggagatctatgacttcctggacctgctggtggcggagaacccgcaccttgtcagcaagatccagattggcaacacctatgaagggcgtcccatttacgtgctgaagttcagcacggggggcagtaagcgtccagccatctggatcgacacgggcatccattcccgggagtgggtcacccaggccagtggggtctggtttgcaaagaagatcactcaagactacgggcaggatgcagctttcaccgccattctcgacaccttggacatcttcctggagatcgtcaccaaccctgatggctttgccttcacgcacagcacgaatcgcatgtggcgcaagactcggtcccacacagcaggctccctctgtattggcgtggaccccaacaggaactgggacgctggctttgggttgtccggagccagcagtaacccctgctcggagacttaccacggcaagtttgccaattccgaagtggaggtcaagtccattgtagactttgtgaaggaccatgggaacatcaaggccttcatctccatccacagctactcccagctcctcatgtatccctatggctacaaaacagaaccagtccctgaccaggatgagctggatcagctttccaaggctgctgtgacagccctggcctctctctacgggaccaagttcaactatggcagcatcatcaaggcaatttatcaagccagtggaagcactattgactggacctacagccagggcatcaagtactccttcaccttcgagctccgggacactgggcgctatggcttcctgctgccagcctcccagatcatccccacagccaaggagacgtggctggcgcttctgaccatcatggagcacaccctgaatcacccctactgagctgaccctttgacacccttcttgtcctcctctctggccccatccaggcaaccaaataaagtttgagtgtaccaggaacagaatcctggggcttgcaaaaaaaaaaaaaaaaaaaaaaaaaaaaatttgggggcggccgggccccggaaaaagttttaaacctccttttggggccgcccgcccccttggttttggactggccacgcggcccacgaagccgggtctgcacggggtgggtctccccaaaaacgcccgggggcccgcgcttggcacacccggggccgcggctcggttcacgggccggct

SEQ ID NO: 69244 - DNA, 985 bp, Homo sapiens
gaagatgtccaaggtgtcgagaatggcggtgaaagctgcatcctgcccgtagtcttgagtgatcttcctggagatcgtcaccaaccctgatggctttgccttcacgcacagcacgaatcgcatgtggcgcaagactcggtcccacacagcaggctccctctgtattggcgtggaccccaacaggaactgggacgctggctttgggttgtccggagccagcagtaacccctgctcggagacttaccacggcaagtttgccaattccgaagtggaggtcaagtccattgtagactttgtgaaggaccatgggaacatcaaggccttcatctccatccacagctactcccagctcctcatgtatccctatggctacaaaacagaaccagtccctgaccaggatgagctggatcagctttccaaggctgctgtgacagccctggcctctctctacgggaccaagttcaactatggcagcatcatcaaggcaatttatcaagccagtggaagcactattgactggacctacagccagggcatcaagtactccttcaccttcgagctccgggacactgggcgctatggcttcctgctgccagcctcccagatcatccccacagccaaggagacgtggctggcgcttctgaccatcatggagcacaccctgaatcacccctactgagctgaccctttgacacccttcttgtcctcctctctggccccatccaggcaaccaaataaagtttgagtgtaccaggaacagaatcctggggcttgcaaaaaaaaaaaaaaaaaaaaaaaaaaaaatttgggggcggccgggccccggaaaaagttttaaacctccttttggggccgcccgcccccttggttttggactggccacgcggcccacgaagccgggtctgcacggggtgggtctccccaaaaacgcccgggggcccgcgcttggcacacccggggccgcggctcggttcacgggccggct

SEQ ID NO: 69245 - DNA, 325 bp, Homo sapiens
ggtactattacctttggatcactattattaatcattccttaatagaactttggatttttccccaggcttaagtacactggttatttctaattctttgtgattttcctggcttcagatctttccaggaacagctctgggtctcttggccaatttggcatcagggctctgggcctttgcccccagcttctgtgattctctcaaaggtctttcagtattgatcagggagtcattcccactgagtccttcaagttttcttttactgcttccccacaaaccgtagaatgagaaaaggatgattgaagtgaagagcctagcctagtgccgg

SEQ ID NO: 69246 - DNA, 762 bp, Homo sapiens
catgactttggatttcctcaggaggagtttgatggcaaccagttccagaaggctcaagccatctctgtcctccatgagatgatccagcagaccttcaatctcttcagcacaaaggactcatctgctacttgggatgagacacttctagacaaattctacactgaactttaccagcagctgaatgacctggaagcctgtatgatgcaggaggttggagtggaagacactcctctgatgaatgtggactctatcctgactgtgagaaaatactttcaaagaatcaccctctatctgacagagaagaaatacagcccttgtgcatgggaggttgtcagagcagaaatcatgagatccttctctttatcagcaaacttgcaagaaagattaaggaggaaggaatgaaaactggttcaacatcgaaatgattctcattgactagtacaccatttcacacttcttgagttctgccgtttcaaatattaatttctgctatatccatgacttgagttgaatcaaaattttcaaacgtttcacacgtgttaagcaacacttctttagctccacagggacaaaatctttacagatgatcatgccaatctatctattctatctatttatctatctgtctgtcttctatctaatctatttaaatatttatttatttataagatttaaattattttaaattatgtttgttcaggtaatattacatccaccttactttgtggctaatataataaaatatgttctttatgttttgtc

SEQ ID NO: 69247 - DNA, 216 bp, Homo sapiens
cttcattgggcagttgtagcttgttgtaactcatgaggtcagatgttggacagattctatctctgcctgaaggagttctcattttaggggaagtgatgagcaatcaagttattctgcaattataaaacagttggatactttccagaaaaggggtaaaagcaaggtgctgtggaaaacctaatccagtcttgagagtcagggaaaattttccagagg

SEQ ID NO: 69248 - DNA, 452 bp, Homo sapiens
gaatttgttggtacataaatattcgtccgtgttctgggatatttaagagacttccaaaagtataggacaaagaatatgaacactaccaaagctcattacttatattggctccactgctttaaaaaagatttatgacagcctttggtctcaccgtgatttcattgcaccctctctagcactgggtgttcactcttgttaaaaccctaaaaccagaaacaccttaattttaagaaaattttctattagagtaacatacatagaaaactgcacagatcattaatgtgatagcttgatacatttccacaaaataagcacacctgtgtaacaagacccaagttactagacaggacatttccagcctctcagaggtccccatcctgtcccctttcagtgactaaccatctcccctttctctccagaaaccaccatcctgacttgtaataggaaaaaaa

SEQ ID NO: 69249 - DNA, 436 bp, Homo sapiens
cacaatctcagctcaggccttattcatcaccgcattcctggcaccaggcctggcccatgagaaatgggtcagattaagagctaaatgtgttttcatggtcacttgttttcttcaggcctcctttctttgtgccaatatctttgggtttctggttaaagttttcagcagctgcatgcggttccatttttcttaccaggtaagagacatagcttcatgaaaacaaaggcagaacgcttgtgaccagagaactcccagtcctctccctgcataggaaaactggacttctccggaaggctccagctcctgggcaaatctctagggccacttaattgggctatcccccacctttgtttctggttttgaagggaccaaagttgggaatcctttttcagtctctacacacggagcccttctttggtgggaaagtcttaacata

SEQ ID NO: 69250 - DNA, 474 bp, Homo sapiens
ttgcagcgttatgatctgacaaataagacgtacagaagccagaaaggctccctagcttgctggttttgtgattacgaagattcttaactttatgaacagtaacagaaagtgacttctcactatctatttatcaagtggctggttcctacttatatcattcaaattattcactatcagttcaaatgtattttgaaatattgtcatttgtcactgccttataacatcccttgcatggttttcaacaaccttatcttcttcattgaatattttaaaacttttcttatgcaagcttcttttcctactaaattttgataccccagaaagcattggcgaacactagaagagacctgtttgcaaccagactgaggagctcaattgtttttactttgaactcagtaattgttgcttattatttatttaaataaattggctatatacttattcagaaaatatcaaaggaagctagaaagaaga

SEQ ID NO: 69251 - DNA, 3796 bp, Homo sapiens
cccctggcttttctggggaggcaggcagggttgtggccacagggatggaggggctcacaggcctctgccggatgctgctagtcctcctttaatctcagtatgggtggctggacccttggccgagtctcagtgtgggtgggcctcctgggcagctggcaggagggtgcagggggggtggggagccgtgcgaagaccccaaagggctaccacttggcggaagctctctctactcacaaccttagggttgcagtcaggggtcaccagggcctggctcagcctgggcagtggctggtcactgcggcctgggaaagaggtcctcggggtcctctgcagtagccctcacacgtggggaaggatttgcagttccctgggggccctgcttggtcctctgccacccccgagagcccagagtcactggagctgctctaaacatagtggcaggcagtgtccggcatgacctcatcgcctccacgtcccccacaacacccaccagcagccgccttgcctggcgccagccagtgacccaccctcttggctgggctgtggactcaggtgtccggctgtcatgtcctgtgagtcggggctgggcggggagcctcctgaggtgctcctctccctctgcgtggcagggaggaggctggcagccctggcccagtgtccagatgggacaaagtgggggtagggaccacagccagggtggcgtgatctggagccgcagggctggggggacttgccagggctgtagaggggatggtgtgggtgtggccagctgtgctgagggaggggcatccgatgtgtgtctgtgcatctgtgtgtggcctgtgtctgtctgtctgcctgggtgtggggtgagggggactctagtgctggaggctgcccagggccttgagagccaggcaagctggacgttcccaggaagagatgaggacccataataggtccaggaccaggggtcctgctccgtgaagtttggagggtccccaaggcttctctggccactgagcttgggccccagcattctccaaaagagggcaggcagttcatgagtctaggggcattcctctgcctctggaaccccacctcagtctgtcctggactaggtgggctatggcccacccttgggaaggagcctatctgtagcccccaagccccagtcagaaaggcagagtttgggggcaagctttctctacaagggtggggctggcctgggcactgagtggacactgtcctcctgcctgccacctgcccctctccctcagcttggacaggaaccccggcctctgagtgaggtccgcaaaggatgctgggtagtccccctccgtggctctgggtgggagcttggcttggcgcggctctgggccgggatggcaggacctcccagccactgcctgggcacagacctcccaggatcccaccagcccagcccctgcggctgcaagagcagcgaggctgggaccaattaccgagtcccgcagggcctggaccctcctgctcctcaagggtgaaggtgggggttcctgttggatgcagtttcaggtggagggggctctctggcctcccgaacctcggctctctccagttcagatcctaccttctgcccacagctgaacacctcttcctacagggagcccccgacctcccagccactgtcctccagaggccatagcatcttggtctccttctgtctgctgcctcggtaggcttcctttgggacccgtggaggcatgtctgactcctcaggagctctgtatttagtgggccttgtcctggggtggcggctccaggcctagtgagacatggcagaggccagggcagggagaatgtgaagctggggcgagggtctgtgacgaggccgcctgacgcctcagcaccaggtggacacagttgtgtgcatgtccctcttggccaatgacaggtccggttcaggtggcccttgcccagggacagaggcttctcctggctccgtgccttccagctctcagtcctggtgtgcacagcgtcaccgggcttccgatagctgccggcctcaactctgggagagggcaggtggggcggcaggaggtgcctgtgctttcctaggcatgagcaggcatgagaggtgcacatgctcctgctcacctgggcggcgcctctcaactgttaggtgtggggttagggttcacctgacgatttgccgcagtccagcggacccgagagttgcatgcagagctggggttgcggtgcgagtggggaagggtctgaaggtgtgggtgcagggggctgtgctggggcctgcaggctggggtgtgcggtgtgagtggggtgcttttgtagtctaaggggtgatgtgccagtcgtcgtgtggtgtcaggtgtcagtcgtcgtgtggtgtcagggtctcttctactcggtgctaagggccagcaggaccgagaggggtaggggcttctctgggtcgagggccacagggggctggtgggggtgggagtgctgaatgcacagggtgatgctgggcttcgggtagcagatgtgctgtggacagtcggggtcgggtcatctgcggcgagcggggcttctgtaggtgctcccagggccctggtgatgtggaagctgttctcaaattctggggtgttgtgctgtggtgggcatgtacctagggtgttatcaagggctgtgcccacttttaggggcactgggcaagagtcggggtgtcagagcagctgcttgagctccgtgggggccattgtgtggcccttggggtgtcctgccctgggggcggctgcagggccgcttgtgtccctgggtgttgctgcctgctgtgcggccttcccagtgatgtttgtgtgtgtgtgtgtgttgggggggttccatgggaagcaggctggggggctgggctgctccgggtttctgaggcaacagcagggaggggccaggaaactgcagctcaggaaggaaggccggccttgcaggagggggcctggggccagcttgggctgagcaggcgccagacattctgtgctgcggccccggcccccactggctgggagctcctgcccaagttccgctggccccacccttgtctccacctccatgcttgtatggctgcctttattcagaccgtggtgacttgggcttgggtctgtgggtgacctggtcctgtgcttatgtgagccccagtccatttgtggctctgtagaggcccagatggggctctcagtgtaccctgcaccgtggggcatgtgttagcacactccggtccccagggtccctggagggcagtgtccactctgactaccctgtcctgggctggcccagcctccttctcccctgccaggctggtaagtcgggagagggagaacatcctcaggggtcatctgtctcccagccacggaggggcactgcagggccggatgcctgaagctgtgtgtttctttttgttgcttgtcctggcattggtgacagccagctggggctgccacataggctggagggggcaggcctgtgttctgggggctcatccaccccttcttgctcagggacaggcaacatctatccatccatttgttattgagcacctgttgtgtagtagaccctgttttaggggttaggaatttggcagagaacaaaacagacaggtccctgcctgtgggaagcttccattatggtgagaagagacagacaatcaacaaatccacaaacaggtgtggtgactcatgcctgtaatcccagcactttgggaggctaaggtgggcggatcacctgaggtcaggagttcgagaccagcttggccaatatagtgaaacccctgcctctactt

SEQ ID NO: 69252 - DNA, 293 bp, Homo sapiens
cctccagaatgggtttcctgctttgcttgagaaatgctttaattgggtgtcattagtaatcctgtcaagggtaaaaaaaacctcccttgttaggaatcaaagcaaaaagctctctctgaggagtaatgaggaatatactctttctaatatgatgcggaagcacttaatatttgttattggtgtttacagaaatgattacttctcaaacattgctgcttacagaaatgattaattctcaaactatgccgggaaggtgagtatggtaatgattttacaagggaggaatctgaagt

SEQ ID NO: 69253 - DNA, 478 bp, Homo sapiens
ggggtcaggtaattatctttctctagtgcctattattttacaaatatctcattaaagacagccgatgataaccattctcatgattctttggcctcaaatgtgtttcactggtttgttttttatagtaggaaggaattatgttaatgttatgattcttagaaaagtattttgatcttattagtttagtgtgtatcctgattatgttttggaaataagtggttaaattgatctgtgggagtcttacaaactgattaccaagtttctgatacagcttgcctgtgtcttgatccacgtattgtaagtctttcctattatcagtgaatttttccatacttctgtttcagagaatggaatgatgactaagttaaaaatcacttcgggacaaaatttattatccttcacagggtaaatgacaaacatgtcatttacctggtagaggataccaatagtatctgtgttcacagtcagctatgctatg

SEQ ID NO: 69254 - DNA, 625 bp, Homo sapiens
ggtccacagcctcggtgtggaaaatggtctctgtggttgaattgagagaagagcaaatgaactggtctggaatagggtgtacacgtaagtagaagataagattgaaaacaaatttagtgccaaaatctgagggaccttgagccccatgccaaagagtctgtataccttatctaatttgtttaatggggccactaggcaattacgggtccgggacccgcatggcaagaatgccttccatccacagcagcccttgatgtgaggtcagaaagctaactgctaaacttgcagtcctgagggaacaccctcaaatggataaacccagctaagcaagctggaccatttccttgggaattattcacctctcaatcaaagaaggaaacttcccaaattcaatccatttgccttaacgtggtgtcccattaccatgaatactgagttgtatacattcttccctagctcccttgaacaaattagataaggtatacagactctttggcatggggctcaaggtccctcagattttggcactaaatttgttttcaatcttatcttctacttacgtgtacaccctattccagaccagttcatttgctcttctctcaattcaaccacagagaccattttc

SEQ ID NO: 69255 - DNA, 272 bp, Homo sapiens
ggtccacagcctcggtgtggaaaatggtctctgtggttgaattgagagaagagcaaatgaactggtctggaatagggtgtacacgtaagtagaagataagattgaaaacaaatttagtgccaaaatctgagggaccttgagccccatgccaaagagtctgtataccttatctaatttgttcaagggagctagggaaaaatgtatacaactcagtattcatggtaatgggacaccacgttaaggcaaatggattgaatttgggaagtttcctt

SEQ ID NO: 69256 - DNA, 2654 bp, Homo sapiens
  misc_feature (2540)..(2540): n is a, c, g, or t
ataggtcaggtagcgaggccggtgtctgatgaagtccaccagccgggatggccgtgctgtatttctctgaatccctcgtgcccacggcaaggaaggctttgtgtgacccactggaggaggtcagagaggcggcagccaagactttcgagcagctgcattccaccatcggccaccaggctctggaggacattctcccatttttactaaagcagctggatgacgaggaggtgtcagagtttgccttggatggtctgaagcaagtcatggctattaagagtcgtgtggtgctgccctaccttgtgcccaagctgacaacgccacctgtcaacacccgggtgctggctttcctttcgtcagtggctggtgatgccctcacccgtcatcttggcgtgatcctcccagcggtcatgctggccctgaaggaaaagcttgggaccccagatgagcagctggagatggccaattgtcaggctgtgatcctctccgtagaggatgacacagggcaccggatcatcatcgaggatctgctggaggccacccgcagccctgaggtgggcatgaggcaagctgctgccatcatcctcaacatctactgttcccgctcaaaggctgactacaccagccacctgcggagcctggtctcgggcctgatccgcctcttcaatgactccagccctgtggttctggaggagagctgggatgccctaaatgccatcactaagaagctggatgctggcaaccagttggcactcattgaagagctgcacaaggaaatccggctcatagggaacgagagcaaaggcgagcatgtgccaggattctgcctcccgaagaagggagtgacctccatccttccagtgttgcgggaaggagtcctgactggcagccctgagcagaaggaggaggcagccaaagccttaggcttggtaatccgcctgacctcggctgacgccctgaggccctccgtggtcagcatcactggccctctgatccgcatcctgggggacaggttcagctggaatgtgaaggcggctctgctcgagacactcagcctcttgttggctaaggttgggattgccctgaagcccttcctgccccagctgcagaccactttcaccaaagccctgcaggactccaaccggggggtgcgcctgaaggccgcagatgctctggggaagctcatttccatccacattaaggtggaccccctcttcacagagctgctcaatggcatccgcgccatggaggacccaggtgtcagggacaccatgctgcaggccctgaggtttgtgattcagggagcaggggccaaagtggatgccgtcatccggaaaaacatcgtctcactcctgctgagcatgctgggacacgatgaggacaacactcgcatctcctcagccgggtgcctaggggaactgtgtgcctttttgactgaagaggagcttagtgccgttctacagcagtgcttgctggcggacgtgtccggcattgactggatggttcggcacgggcggagcctggcactttccgtggctgtgaatgtggctcctggcagactttgtgccggcagatatagcagtgatgttcaggaaatgatcctgagcagtgccacggcggacaggatccccattgcggtgagcggggtccggggcatgggctttctcatgagacaccacatcgagacaggcggagggcagttgccggccaaactttccagcctgttcgttaagtgtctgcagaacccatccagcgacatcaggctggtggctgagaagatgatctggtgggcaaataaggacccactgcctcccctggacccccaggccatcaagcccatcctgaaggctcttcttgacaacaccaaggataagaacaccgtggtcagggcctacagcgaccaggcaattgtcaacctcctcaagatgcggcagggtgaagaggtgtttcagtccctctccaagatcctggatgtggccagtttggaggtgctgaacgaggttaaccgaaggtccctgaagaagctggccagccaggccgactccacggagcaggtggacgacaccatcctgacatgagaggcctgggccagcagcagcattgccgctccacatctttgctcaatgttttcatttttgaaaatacatttgttccaatggggagcttggaagatggcgttcccagaaagtattttaatatcaatagaccacagccaaagccttaaatcaaacccacacacaactgaaaattgcctcctccatctctcaccttttcctgtggagaagagaaggaaaagcacacgcatgcgcctcagcaaatggcagcccaggagctgtttgtccagtttagcatggctaggtctggaactataatagcagggtcagactgtgggttcctcttctcctgtgcttgagctctggtttgagagctggcgctaccaacctttttcctatatcccgagtggggcacagacggtggatctctgcccagtgtggtgtgtctggcttggcttttcaatattgtgaggtctgaatggatctganccctgtcagatgaaaatgattcacagctctggcagttcccaagtctggggaggggtataggtttgaaaggctgtttgaaagaggaatgtttaataaaggctttgatttaatctt

SEQ ID NO: 69257 - DNA, 7819 bp, Homo sapiens
  misc_feature (7705)..(7705): n is a, c, g, or t
ggatctgatactgcccaccatacagaagtccttactgaggagtccagagaatgttattgaaactatttctagtctgctggcatcagtgacgcttgacctcagccagtatgccatggacatcgtgaaaggactggctggtcacctgaaatccaacagtccccgcctgatggatgaagctgtgctggcactgcggaacctggcacgccagtgcagtgactcttcggccatggaatccctgaccaagcacctatttgctatcctcggaggctcggaaggaaaactaactgttgtagcccagaagatgagcgtcctctcagggattgggagcgtcagtcatcacgtggtgtctggaccttccagtcaggtcctgaatgggatcgtggctgagctgttcatcccgttccttcagcaggaagttcatgaagggaccttggtacacgctgtctcagtcctggctctctggtgtaaccgattcactatggaagtgcccaagaagctcactgaatggttcaaaaaagctttcagccttaaaacctccacatctgcggtgaggcatgcctacctgcagtgcatgttggcctcttaccggggtgacacgctgttgcaggccctggacttactgcccttgctcatccagacagtggagaaggcagcctcccaaagcactcaggttcccaccatcaccgaaggggttgccgcagccttgttgctcttaaagttgtcagtggctgactcacaggctgaggccaaactgagcagtttctggcagttgattgtggatgagaaaaagcaggttttcacttctgagaaattcctggtcatggcttcagaggatgccctgtgtactgtgttgcatctgacagagagacttttccttgaccacccgcatagactcactggcaacaaagttcagcagtaccaccgggctctggtggcggtgctcctgagccgcacctggcacgtccgcaggcaggctcagcagacagttcggaagctgctgtcctctcttgggggctttaagctggcgcacggactcttggaggagctgaagactgtcctcagttctcacaaggtgctgcccttagaggctttggtgactgatgctggagaggtgactgaggcaggcaaggcctacgtgcctccacgggtcctgcaggaggctctgtgtgtcatctccggtgtgccagggctcaagggtgatgtcaccgacactgaacaactggcccaggaaatgctgatcatctcccaccacccatccttagttgccgtgcagtctggactttggccagcacttcttgccaggatgaagatcgatcctgaagcctttatcaccaggcacctggatcagatcattcccaggatgaccacacagagtcccctaaaccagtcctccatgaatgccatgggctccctttccgtcctgtcgccggaccgggtcctcccacagctcatcagcaccatcactgcctccgtgcagaaccctgcactgcgcctggtgacgcgggaggagtttgccattatgcagacccctgctggggagctgtatgacaaatccatcattcagagtgcccagcaggacagcataaaaaaggccaacatgaagcgagagaacaaagcttattccttcaaagagcagatcatcgagctggagctgaaggaggagataaagaagaagaaaggcatcaaagaggaggtgcagctgaccagcaagcagaaggagatgctgcaggcccagctagacagggaggcgcaggtccggaggcggctgcaggagctggatggggagctggaggcggcgcttggactgctggacatcatcctggccaagaacccgtccggcctgacccagtacatccctgttttggtcgactcttttctgcccttgctgaagtctcccctggctgctcccaggatcaagaaccccttcttgtccttggctgcctgtgtcatgccctctaggctcaaggctttgggcactttggtgagccacgtgaccctgcgcctgctgaagccagagtgtgtcctggataagtcctggtgccaggaagagctgtcggtggctgtgaagagggcggtgatgctgctgcacacccacaccatcaccagcagggtgggcaagggggagccaggtgctgcgcccttgtccgcgccagccttctccttagtcttcccgtttctgaagatggtgctgacggagatgccccaccacagtgaggaggaggaggagtggatggcccagattcttcagatcctcactgtccaagcccagctgagggcctcccccaacaccccacccgggcgggtggacgagaatggcccggagttgctgcctcgcgtggccatgctgcgtcttctgacttgggtgatcgggacgggctcgcctcgcttacaggttctggcttcagacaccctgaccaccctgtgtgccagcagcagtggtgatgatggctgtgcctttgcagagcaggaggaggtggacgtgctgctctgtgccttgcagtccccgtgtgccagcgtgcgggaaaccgtgctccgggggctgatggaactccacatggtattgccagcacctgatactgatgagaagaatggcctgaaccttctgcggagactctgggtggtcaagtttgacaaggaggaggagatccggaagctggctgagaggctctggtcaatgatgggcctagacctgcagccagacctctgctccttgctgattgacgacgtgatctatcatgaggcggctgtaaggcaggcaggggccgaagccctctcccaagcagtggcacgttaccagcggcaggcggcggaggttatgggcaggctcatggagatttaccaggaaaagctctaccggccgcccccagtgctggatgctttgggacgagttatttcagaatctcctccagatcagtgggaagccaggtgtggcttggcgttggccctcaacaagctctcccagtatttggacagctctcaggtgaagccactctttcagttttttgtccctgatgccctcaatgaccgacacccagatgtccggaagtgcatgttggatgcagccctcgcaacgctcaacactcatgggaaggagaacgtcaactcgctgttgccagtattcgaggagttcctgaagaacgcgcccaatgatgccagctatgatgctgtgcgacagagtgtggtggtcctgatgggctctctggccaagcacctggacaagagtgaccccaaagtgaagcccattgttgccaagctcatcgctgccctctccaccccctcccagcaggtccaggagtccgtagccagctgcttgccacccctcgtgccagccatcaaggaggatgctggagggatgatccagaggcttatgcagcagctgctggagtcagacaagtacgcagagcgcaaaggggccgcctatggcctggcgggcctggtgaagggcctgggcatcctctcgctgaagcaacaggagatgatggcggcactgactgatgccatccaagataagaagaacttccgccggcgagagggagccctctttgccttcgagatgctctgcaccatgctggggaaactttttgagccgtatgtggttcacgtgctgccccatctgctcctgtgctttggggatggaaaccagtatgtgcgtgaggctgcagatgactgtgccaaggctgtgatgagcaacttgagtgctcacggggtgaagctggtgctcccctccttactggctgccctggaggaggaatcgtggcggaccaaagctgggtcagtggagcttcttggggcaatggcgtactgtgctcctaagcagctgtcatcctgtctacccaacattgtgcccaagcttacggaggtgctgaccgactcccatgtcaaagtccagaaggctggacagcaggcgctcaggcagatcggctccgttatcaggaacccggagatcctggccattgctccagtcctcctggatgccctgacggatccctccaggaagacccagaagtgcttgcagaccctgctggacaccaagtttgtccacttcattgatgccccatccctggccctcatcatgcccattgtccagagagccttccaggaccgttccacggacacgcggaagatggcagcccagattattggcaacatgtactccctgacagaccagaaggacttggctccgtacctgcccagcgtgacgcctggcctgaaagcatcgcttttggaccctgtgcctgaggtgcggaccgtatctgcaaaggcccttggggccatggtgaagggcatgggggagtcgtgctttgaggacttgctgccgtggctgatggagacactgacctatgagcagagctctgtggatcgctcaggcgctgcacaggggttggctgaggtcatggccggtttgggggtggagaagttggagaagttgatgccagaaatcgtggctacagccagcaaagtggacattgcaccccatgtccgagatggctacattatgatgtttaactacctgcccatcacctttggagacaagtttactccttatgtggggcccatcatcccctgtatcctcaaagctcttgctgatgagaatgagtttgtgcgtgacaccgccctgcgcgcgggccagcgggttatctccatgtacgctgagacagccatcgccctgctgctgccccagctagagcaaggcctctttgatgacctttggagaatcaggttcagctctgttcagctccttggggatctcctgtttcacatctcaggagtcactgggaagatgaccacagaaactgcctctgaggatgataactttggaactgcccagtccaacaaggcgatcatcactgccctgggggtagagcggcggaaccgggtgttggcagggctgtacatgggccgctcagacacccagctggtggtgcggcaggcgtccctgcatgtctggaagattgttgtctccaataccccccgcaccttgcgtgagatcctacccactctctttgggctcctgctgggtttcctggccagcacgtgtgcagataagagaacgattgcagcgagaacattgggagatcttgtgcggaagttaggggagaaaatcctccccgagatcatccccatccttgaggaaggcctgaggtctcagaagagcgatgagaggcagggtgtgtgcattggcctaagtgagatcatgaagtccaccagccgggatgccgtgctgtatttctctgaatccctcgtgcccacggcaaggaaggctttgtgtgacccactggaggaggtcagagaggcggcagccaagactttcgagcagctgcattccaccatcggccaccaggctctggaggacattctcccatttttactaaagcagctggatgacgaggaggtgtcagagtttgccttggatggtctgaagcaagtcatggctattaagagtcgtgtggtgctgccctaccttgtgcccaagctgacaacgccacctgtcaacacccgggtgctggctttcctttcgtcagtggctggtgatgccctcacccgtcatcttggcgtgatcctcccagcggtcatgctggccctgaaggaaaagcttgggaccccagatgagcagctggagatggccaattgtcaggctgtgatcctctccgtagaggatgacacagggcaccggatcatcatcgaggatctgctggaggccacccgcagccctgaggtgggcatgaggcaagctgctgccatcatcctcaacatctactgttcccgctcaaaggctgactacaccagccacctgcggagcctggtctcgggcctgatccgcctcttcaatgactccagccctgtggttctggaggagagctgggatgccctaaatgccatcactaagaagctggatgctggcaaccagttggcactcattgaagagctgcacaaggaaatccggctcatagggaacgagagcaaaggcgagcatgtgccaggattctgcctcccgaagaagggagtgacctccatccttccagtgttgcgggaaggagtcctgactggcagccctgagcagaaggaggaggcagccaaagccttaggcttggtaatccgcctgacctcggctgacgccctgaggccctccgtggtcagcatcactggccctctgatccgcatcctgggggacaggttcagctggaatgtgaaggcggctctgctcgagacactcagcctcttgttggctaaggttgggattgccctgaagcccttcctgccccagctgcagaccactttcaccaaagccctgcaggactccaaccggggggtgcgcctgaaggccgcagatgctctggggaagctcatttccatccacattaaggtggaccccctcttcacagagctgctcaatggcatccgcgccatggaggacccaggtgtcagggacaccatgctgcaggccctgaggtttgtgattcagggagcaggggccaaagtggatgccgtcatccggaaaaacatcgtctcactcctgctgagcatgctgggacacgatgaggacaacactcgcatctcctcagccgggtgcctaggggaactgtgtgcctttttgactgaagaggagcttagtgccgttctacagcagtgcttgctggcggacgtgtccggcattgactggatggttcggcacgggcggagcctggcactttccgtggctgtgaatgtggctcctggcagactttgtgccggcagatatagcagtgatgttcaggaaatgatcctgagcagtgccacggcggacaggatccccattgcggtgagcggggtccggggcatgggctttctcatgagacaccacatcgagacaggcggagggcagttgccggccaaactttccagcctgttcgttaagtgtctgcagaacccatccagcgacatcaggctggtggctgagaagatgatctggtgggcaaataaggacccactgcctcccctggacccccaggccatcaagcccatcctgaaggctcttcttgacaacaccaaggataagaacaccgtggtcagggcctacagcgaccaggcaattgtcaacctcctcaagatgcggcagggtgaagaggtgtttcagtccctctccaagatcctggatgtggccagtttggaggtgctgaacgaggttaaccgaaggtccctgaagaagctggccagccaggccgactccacggagcaggtggacgacaccatcctgacatgagaggcctgggccagcagcagcattgccgctccacatctttgctcaatgttttcatttttgaaaatacatttgttccaatggggagcttggaagatggcgttcccagaaagtattttaatatcaatagaccacagccaaagccttaaatcaaacccacacacaactgaaaattgcctcctccatctctcaccttttcctgtggagaagagaaggaaaagcacacgcatgcgcctcagcaaatggcagcccaggagctgtttgtccagtttagcatggctaggtctggaactataatagcagggtcagactgtgggttcctcttctcctgtgcttgagctctggtttgagagctggcgctaccaacctttttcctatatcccgagtggggcacagacggtggatctctgcccagtgtggtgtgtctggcttggcttttcaatattgtgaggtctgaatggatctganccctgtcagatgaaaatgattcacagctctggcagttcccaagtctggggaggggtataggtttgaaaggctgtttgaaagaggaatgtttaataaaggctttgatttaatctt

SEQ ID NO: 69258 - DNA, 1554 bp, Homo sapiens
  misc_feature (1440)..(1440): n is a, c, g, or t
ataggtcaggtagcgaggccggtgtctgatgaagtccaccagccgggatggccgtgctgtatttctctgaatccctcgtgcccacggcaaggaaggctttgtgtgacccactggaggaggtcagagaggcggcagccaagactttcgagcagctgcattccaccatcggccaccaggctctggaggacattctcccatttttactaaagcagctggatgacgaggaggtgtcagagtttgccttggatggtctgaagcaagtcatggctattaagagtcgtgtggtgctgccctaccttgtgcccaagctgacaacgccacctgtcaacacccgggtgctggctttcctttcgtcagtggctggtgatgccctcacccgtcatcttggcgtgatcctcccagcggtcatgctggccctgaaggaaaagcttgggaccccagatgagcagctggagatggccaattgtcaggctgtgatcctctccgtagaggatgacacagggcaccggatcatcatcgaggatctgctggaggccacccgcagccctgaggtgggcatgaggcaagctacaccacatcgagacaggcggagggcagttgccggccaaactttccagcctgttcgttaagtgtctgcagaacccatccagcgacatcaggctggtggctgagaagatgatctggtgggcaaataaggacccactgcctcccctggacccccaggccatcaagcccatcctgaaggctcttcttgacaacaccaaggataagaacaccgtggtcagggcctacagcgaccaggcaattgtcaacctcctcaagatgcggcagggtgaagaggtgtttcagtccctctccaagatcctggatgtggccagtttggaggtgctgaacgaggttaaccgaaggtccctgaagaagctggccagccaggccgactccacggagcaggtggacgacaccatcctgacatgagaggcctgggccagcagcagcattgccgctccacatctttgctcaatgttttcatttttgaaaatacatttgttccaatggggagcttggaagatggcgttcccagaaagtattttaatatcaatagaccacagccaaagccttaaatcaaacccacacacaactgaaaattgcctcctccatctctcaccttttcctgtggagaagagaaggaaaagcacacgcatgcgcctcagcaaatggcagcccaggagctgtttgtccagtttagcatggctaggtctggaactataatagcagggtcagactgtgggttcctcttctcctgtgcttgagctctggtttgagagctggcgctaccaacctttttcctatatcccgagtggggcacagacggtggatctctgcccagtgtggtgtgtctggcttggcttttcaatattgtgaggtctgaatggatctganccctgtcagatgaaaatgattcacagctctggcagttcccaagtctggggaggggtataggtttgaaaggctgtttgaaagaggaatgtttaataaaggctttgatttaatctt

SEQ ID NO: 69259 - DNA, 208 bp, Homo sapiens
caaatacttggaaacttaaaacaggaagaggtgtcagaatgaatgctcttgggggcaatgggctggagggggagctctttagaaagttactgaaggctgaataaaaatatttactgttttggactgtgtatataaagccttctgtattttatgagacttagtgaaatacttcttgaaacagctcctactgcatttaaatatatgcttt

SEQ ID NO: 69260 - DNA, 276 bp, Homo sapiens
gagcaaagccattccaagctgcagggctctgggctgacttccaacttggaacagagcttttctaattatcgcttttacttttgactttgtggaggatatctctgaagaaaggagttattgcttaacaaatattacttagtacttaccacatggcagacatggggatgtttttaaacattgaaaaccaaagctttagagtagtatctgcttgtccatctggctgcctcacaatcatcccaggagactgccccagaatctgaatatttaagattcttg

SEQ ID NO: 69261 - DNA, 440 bp, Homo sapiens
gaaggaaggaagaaagagagaaaggaatcaccttctatataatgcaaaatggtaataataatataacaacataaggtaacctataatatagcataataatttgatatgctatgctgtagacattttacataactatcttggttattgtctgccctccccaaaataatggacactcatcagggcaggaacttctgtctttatgtttactactgtatcctcagcaccaagaacagcattgctgaaggaggcaagaaggaacatcaatgcaatttacaagctgatgatcttgggacagcattcattcactcaaaaattacttgtgggctgggagcattggctcacgactgtaatcccgtactttgggaggctgaggtgggagggtcgcttgagcccaggcattcaagaccagcctaggcaacataataagactctatctctac

SEQ ID NO: 69262 - DNA, 463 bp, Homo sapiens
aaacatcaggctaaagagaccctgaacaccagagcagcatttccaggaaatattcattggtcttaaccatcttatttatgtaaagcaggtgaagttttttggaaaaaaataaaaacctgaagcttacctaacaaagcctatgccttggcagctcccatcctcgtttgttctctttctttgctggcatgaatgttcagataacccaaaaggttttatgaaaatattctaacctctgagttcaggtctgctgtttctgaaaatcatttttgtgagaataacaagacaaataaaaacaattagtatatatctgtgtgactgtgcagtgagcaaagcatacacctgtgcctgcagtggcaaaagtggttctgttcttaaaagaatcagttttggccaggtgtggtggctcacgcctgtaatcccagcactttgggaggcagaggtgggtggatcacaaggtcaggag

SEQ ID NO: 69263 - DNA, 319 bp, Homo sapiens
taaaagtatgatgtttattgtagaatcaattgaatgaatatatttaataaaatgggaagataggttttttttttttaacatttatgtgaaattatattttgtctgttcatagctctataaatagctaatgaaggttcctttgtgccagatctaacaggtatgggattggacgctgttgttttctggcttgactttttaatttttatcattcttcatgtgtcttacatactatagtagctgctgcttgtcaataaaatacccatttggggtacaggagttaatttatcaaagctttcctcagaagaaagctgatacctgg

SEQ ID NO: 69264 - DNA, 903 bp, Homo sapiens
ttctccccgccttgtggcagtgaaccatgacccctgaagcccatgttagagccaggagttggggtggggggcattgcaactaaagaccagggctccacctcctgtcctgagccccaatgtggctagcagagccaccagacggtgagagtgaatcctgtgcccagcactgccctaccagatcttacaccatccttgcagccagctgactaggctgtggtcagcaaacccatttcacagatggggaaactgaggggcattagcaaggtaaggattgaaacccagatctggctccacatcttatgatttctcccttctacccattagctgggagcaccatcaggccaggatggctcatggtggcagcccctatacccctggctgggcagaggaggtgctgacaattactggctgaatgaatgaataaaggaaggaacaaaccacaccttccctggccttactaagatgcaatgaggtgttcttccagagggaattttggagggaaccaaggggagatgaaaggtactcaggagtggggattaggtgggacccagcaataactaacttggaatgaactaacccagaatagccagacctagttggttattcacactgcaatttgggcctttttcagtttttgttcaagtctgattatatcaaggaaaaggtcttggtttgaggctaacatgtctttaatgactgtaacatttgtcactgtctctttttaatagagagaaggtctcaaactcagggctgttgacatcagcgtgctagaatgtactgatagcgctttgttttctttgtacttgccgttactttctggttttggcaagtgctactggttttccatgtacagtaatgatgtaaagcttccttgataaatgcattgattgaagtcctttaaaa

SEQ ID NO: 69265 - DNA, 326 bp, Homo sapiens
gcccaggctgcagtgagccatgattgtgtcactgcacgccagcgtggatgacaagcaagaccctgtctcaaaaaacaaaaaaatatggtttcacaaaaatgggaacagcatgggaaacagacagcccctaaatcccctctctgacggtcatcataatcagcagttcgatgtgcatcctcccatgtttatgtgtttgcatatatatatgaatctaaataactatataaatatatatgtatgaatatacatatagttatatatgtaatatatgtgtgaaattatatatttacataaattgaactatatgtatgcagtgtttatcactt

SEQ ID NO: 69266 - DNA, 4491 bp, Homo sapiens
  misc_feature (3285)..(3285): n is a, c, g, or t
  misc_feature (3720)..(3720): n is a, c, g, or t
  misc_feature (4471)..(4471): n is a, c, g, or t
ggaagatggagagaatcaggccatcactgggaaggaccatagggtggtacagactaggagaacaggaagcatgaattctaaataatcaggagtacagagacttcaataagcatgttagggaagtcagaactcgttaagttcacaatccattgtacatttactttcttactgatctttaactgtcagccactgttcatctccatcaaatgctgttcctctctggatagaacagcagacctggcttgtgcatttccggagaatggggaagttcagaaagcccccagactgtcagccagctgacttcctttttactgggctttttctctgtgcgaataagcaaaggaatcacacacggacagatggttgggtgggtgttcttgatagcgtgtatttggaagttactgtcaagtcagggtgcatgaggcataattccccctctgatttgctttccagtgggaacttttgtgtctgagagagagtgggagagtaaggagggttcatttccccacaaatcttttactcaaactgtctggcttctcagactatacctctagtcgctgagctaccttgagagtggtaccatttcatactagctaggagagtcttcatgttaattcctttgctcagtgagttcagcagtttacagggcagacattttccttcatttgattctctgtgagatgctgtgttaggtctaggggcttcattggacaatgggcacaaatcctggctgtatggggttgggagttggtggtctctctgcgggtggtggtaggtggtaggtggggaggcatctgggtggcacagactgtggaacaaagtagttgtgttatagtggaagctgggtggcttttcttcttggcggtgaaactgtgtctttgaagacattgcactttggcacctgtgccttgctaaggatttcatccctatcttgtctttgtcctgagattatatctcaggacctgccaattttgccagaaatgtcaagttaccatgcactgaaaaatctcagacagccaagaaatgtactatttttgctagcatcaagagcctaagtgataagagtgtccaggtggtggccactgctgcccctgggatatctcaggcctcctgcttgactgggaggcagcagccacgccagctgtttgggccccactcacaccagggcccccattgcattggagtctgccctactgtggaatttgggatgctgcccttgttgcattcgctctgctttgagtacttggtgcttcctaaaagagcacagcaagtgttctttgcaggtgatattgttcatgccctcaccttgtttagactctaaatggtacctgaaatggcataggttatcagtgtttattagctaaggcatggctcagccttgagtccctctcaagagctacaggaaaggcctttgcattgtctctaaatgatcctttgctgcttattttaatcacagaagccttaaggggactgatagttgtatgaagggtaggagcttgtttagcaggcaggacatattgtcattttagattcataacccttcattcctaaattagattgaaaatctgagcagctctgtgacatctacagtattgacattctcggttttgtgttcatgggttgccaacacagagcatactccgacaaaactgtaaaattgtatataacttaagaatgaatttttatgattggaggctctcctgtattgtacaagtcatcttattttggggttgcagatagtaataaatacagaagttttataaacttacatttggaaattaaataaagaaaaatcactaaggaagtatatgcttcaaaccaaaaatgaagctactcagattttcctaatttaaacataatgtattttcccattcttttccctaagacaatggtatctatcccctgtgctagagaaagtagtgtgatgtggttattgttatttagacccacttggaagttcctgagggacatggcgagggtggatggacttgtctgcctgtgtagcagtgtggaagccatgttttaggaaagaagtggtgggacatggagagaaagcaggtaagagagttgtgaatggggtagggtgacttctacaagtacacagttctgacgttctccttgcctttcagttgcaactctaactcatcagtgatgataggccgtcaggaaaatcctctttgtggatgttataaaccctaaataccaccctgtaaagaattcgcctcctcatgggagcagatgggatggccatacctaacacttgtctcttattgttaagcaaagccccatcttggtctttaaatcatttcctgtgagataggctctgaacatgtggcttttgaaaatccctttcttagggcccttggtttagaaattgcttgccttttctgtttgagattgggagccaggtttatcttaattcattctgtgtcacaaatgagacagaggacttgttactgcagacctacaatttttgtctggagaaaaggtatgaaagggatcagaatctcccctcctcaactccagcagtggcctgatctggcccctagagacctgactacaaggtgtggacagttcctctgttgtctactgtccaccttcaagggatcaaacccagttctgaaacccacaacctgtcagagcagagaagaacccaccatcaggcaaaaggactagacatagggcaggtggaatctaagaatatcttggcactacattgggtgaggaatatagaatgtggggagacttctgattggtctctgccccttggcacgctgaaattcctgactcatgaagggcaggacatgtgtttttcctcactctgttcccaacgtttagcacaatgcctggcacatagcagaagcccagtaaatatgtacttaaagcccgttagaattagtggtgctttccgttctgaatagattgggacagcctatggatcttgaaaggcataagcaaccaagggtgttagactctgtagctattaattaccaaacaaaattatagtcttgtactctaagaagcagccatgtcttgagtgagaaggcttaggatatgaggactagatatcagcaaggataccataggtttggaaagacattttaatttacccttagaatacacaactttactgatttttaaggatgatcagcccatcatatagcactttattttttcttttaaagacaatcctgtttcatttaccttcacttgacacaggagtttgagaagtcctgggcaggtatacctggttattttgtcattggtagtctttttaacttttanaaaataatcctagtaaactaaacctgagcctctgaataagatgttgtctgcctttgtagctatatgagaagagtggcagaccacagcttttgacggggatttttgaataaaataactaaaaccaacaatacagcaaaagctcatctgggaaaaggacaaagagtaaactagtaaaatgtaaggctgtaaggaaaggggtagaagatcagaggaattctcatcaaaatattgcaaattatcccctgaacacaaactggtaacggtggtttgcttaagggaaggaaattcggagattagggatactgggtgaaaggcagattcttttttttaccatatattcctttgtatcttttaaattttgtattacattcgtgatctttcagaaataaataaataaaaatgcagtagcttcctgatcagaaagagggaataatngctgtcacttgcgtttcagaaacatagcatccaaactgatgtgattatggtgacctgtcccacttagttttgctgatgtactataattactttctccagtgaggctgacttcagaaacagttgcagatgcagaattttaatccagggtatgctgtatataagtaacttttgcatttacaatctaccatttggcgttttatggctaataatccacaaatatctaaactaatttataaaggcaaaaactactgatttaatgtagtactctgcttctgtatccccgaggtgagtcagaaaaatttcaagttgccacgccttggccagaccccacagtatattggttattggtcctgaagttagttctttaaaataacttgaaatgtttcatgcttagttctaggatctatactttctttgatttgactgggactgaaaggctcagaataactgaatatccttggctctaaataagaagctgtaactttgggccaggtgcagtgcctcatgcctttgggaggccaaggcaggaaggtagcttgaagtcaggaatttaagacagtctgggcaacatagtgagacccccatctctataaatgctttttaaaagtagcagggcatggtggcatgtgcctgcaatctcagctacttggatgggtgagttgggagcgtcgcttgagcccaggagttctgagctgcagtgagctgtggttgcactactgagctgtgattgcactcaaggctgggccacagngtgagaccctgtatttaaag

SEQ ID NO: 69267 - DNA, 368 bp, Homo sapiens
actaaatcagtttctaagaaactaagtcagtttattaggtattagggttatcgtctgtatatttgtgtgctttagatgttaaaagtggataaaaatccagccgtccttttctaaataattctgactggcatttctccttaatctagtttatttgtagaaatttttgtataggaatctttttctcctttggaaataatgttctactccatggtctgttagtaacaatcatttaggattttttgccaggtgttcagttcacacatgtattacatgctgttcggcaaattctatctcatgatgtaagactgacttaattttcctctactttgtgtctgtagctttgtgtgcatgtgttagggttttacctt

SEQ ID NO: 69268 - DNA, 288 bp, Homo sapiens
aggtctataccctgctgctattgtaatagacttttgctgcaatcttttggtattgtacagtttcaaaagaacactatatcttctgataccctgtgaaataaaaataacaattttctttagcacaattatttttccagtggaaatgctgaaaattaaaagcatattaatatgtttctactgttagtgagttgcttttgcttcttttgggacagagagtaatgaatgagcactgaggtattgagggctcctgcagttaatagccagagaaggtcttaatttaagatactc

SEQ ID NO: 69269 - DNA, 142 bp, Homo sapiens
agcccaggttctgtcttcaagaagccatagctgctgagaactaatgaaagggaaagacctcacccatactcgggaactgaacagatgcttgggaatgtgtgcacctgcgggcacacgcgcacactggcagaaaacttcaggg

SEQ ID NO: 69270 - DNA, 338 bp, Homo sapiens
ggtcgaccggaagtgacgggagaaacacgctgtggttagtgattaaagactggacataaaattgtctccaaacccattttttaaaagtctttgaacatgaccaaaattgtattaacgagctttggctggaaagaacactacagtgttctctatctccatttctcacattttagttaaacttataaacccttcccccagatgggcttcccctggtaaccatattaaacagaaacattagacagaatcagtaagaaaatgttcacatttgtaatcccagcactttgggaggccgaggggggcagatcacctgaggtcaggaattctcaactagcctgacc

SEQ ID NO: 69271 - DNA, 347 bp, Homo sapiens
gacatattggaaagcaatttggcactgtcaactaatagtgtgtgtgtctctcttatgagttattgtatctagtgtggtgttactggatgctgaaaaacacttcatgaatacttcttgcattcaaaatttcatcaagaataatcaacatgttcagttttatttctgttcattttttcttgcatggtgagctttgagaccttgtacaaaatccctgatctttctgggcctcatctgtgaagattatgatgatcacggagccctgtgacacattcctcagagatccaggtgctggctggtgaggagctggacaggtgctctgtgctgaaattcaccaaagttgtgaaggg

SEQ ID NO: 69272 - DNA, 116 bp, Homo sapiens
tgctgttagattatcttctgagcaatttcaagttttaagaatatgttggtgaagtcaacaatgaacaattccaggagacttggttccacccgggccctgctcaggaaagatgagga

SEQ ID NO: 69273 - DNA, 405 bp, Homo sapiens
tgagatggagaaggtgaatactagtaaaagactacattgatatgctgtaggcacttgaggtttctgtttgtttgtttgtttgtttttttggaaaccttcgagagacttatggaaaacactgtataattgtttcattgaggagcacggaactgatcatgtttattcaccaactctcatgcctttttggttgaaggatgctcctaggggcattcacacctgctctgaactccttcttcatctccagcctgcctcccttatgggccatttcatgccactgtacctagataaagccttagggccaagagattcaggtgcttgaggctgggtctatccttctgagctgcaaataacttccagggtggatcaagggaatgtggggtcaggatagattatattgcctctcat

SEQ ID NO: 69274 - DNA, 967 bp, Homo sapiens
  misc_feature (24)..(24): n is a, c, g, or t
gggggaacacccattgattcagtnacctgcccccaggtctctgccaccacacatggggattatgggaactacaactcaagatgagatttgggtggggacacaggcaaattatatcagctgttgtgctcattagtttgtatatcatccttggctcctttagcactataagggcaggattgagtccttgcaacagaaaccattcagcctgcaaagctgaacctatttacctggtaaaccttttcctgtcttcaccatccccatgcagcattttccatattcctgtatgtatgttttgagagtggataaggaaggatgagttctgctgtgttcatttcagcatcattttctttacacttgctttgttgctaggaggtgttacagttctcatttttacttacggtgcagtgtcagtaaataggtccttagccaccttgttgctggacttggattatattttgtccactgtgatcagggctgcccctggcaccagtgttgtgatcttcattggcttctattgtggcattagcttccttgggcagataaccatggaggggtccataatatccttaaataccattggtgtggctttaagtggcttttgtttgttttactttgcttgaaaaaattttttaggcctggtacggtggctcattgccaggattataggcatgggccattgtgcctggctagctttttctttaaagccgtattcgtgtcctcttgccactgtaaaaaataaccacaaacttcgtggtgtcaaacaaaacaaatttagtctggctaacatggtgagaccttgtctctactaaaaatacaaaaacttagctgggtgtggtggcgcatgcctgtaattccagctacatgggaagctgaggcaggagaatcgcttgaacccgggaggcagaggttgcagtgagtcgaggtcataccactgtactccagcctgggtgacagagtgagactctca

SEQ ID NO: 69275 - DNA, 850 bp, Homo sapiens
gttcgatgaagccccgtctctactaaaaatacaaaaattagccaggtgtggtggcgcacgcctgtggtcccagctactcgggaggctccacctcccgggttcaagtgattctcctgcctcagcctcccgagtacctgggattacaggcacccgccaccagcctggtaaaccttttcctgtcttcaccatccccatgcagcattttccatattcctgtatgtatgttttgagagtggataaggaaggatgagttctgctgtgttcatttcagcatcattttctttacacttgctttgttgctaggaggtgttacagttctcatttttacttacggtgcagtgtcagtaaataggtccttagccaccttgttgctggacttggattatattttgtccactgtgatcagggctgcccctggcaccagtgttgtgatcttcattggcttctattgtggcattagcttccttgggcagataaccatggaggggtccataatatccttaaataccattggtgtggctttaagtggcttttgtttgttttactttgcttgaaaaaattttttaggcctggtacggtggctcatgcctgtaatcccagcactttaggaggctgaggtgggtagatcacttgaggccaggagttcaataccagcctggccaatatggtgaaaccctatctctactaaacatacatatattagctgggcatagtggcacatgcctgtagtcccagctactcaggagactgaggtagaggaatcacttgaactcgggaggcggaggttacagtgagccgagtggtgcacttcagcctgagtgacacagtgagacccctgtctcaaaaaaga

SEQ ID NO: 69276 - DNA, 2772 bp, Homo sapiens
cgtcctgccgcttggccgcggggcgcctggctcagtggcttctgcgggcttcgaggagcgggatgttgcgggctgggtggctccggggcgcggcggcgctggcgctgctgctggcggcccgagtggtggcggcgttcgagcccatcaccgtgggcctagccatcggggccgcgtcggccatcaccggctacctgtcctacaatgacatctactgccgcttcgccgagtgctgccgcgaggagcggccgctcaacgcttcggctctcaagctggatttggaggagaagctgtttggacagcatctagccacggaagtgattttcaaggcgctgactggcttcaggaacaacaaaaatcccaagaaaccactgaccctttccttacacggctgggctggcacaggcaagaattttgtcagtcaaattgtggctgaaaatcttcacccaaaaggtctgaagagtaactttgtccacctgtttgtatcgactctgcacttccctcatgagcagaagataaaactgtaccaggaccagttacagaagtggatccgcggtaatgtgagtgcatgtgcgaactctgttttcatatttgacgagatggataaattgcaccccgggatcattgacgcaatcaagccgtttctagactactacgagcaggttgacggagtgtcttaccgcaaagccatcttcatctttctcagcaatgcaggcggggaccttataactaagacggctcttgacttttggcgggccggaagaaagagggaagacattcagctgaaggacctggaacctgtactgtctgtcggagtcttcaataataaacacagtggcctgtggcacagtggactgatcgacaaaaacctcattgattactttatccccttcctgcctttggagtacagacatgtgaaaatgtgtgtgagggccgagatgagggcccgtggttctgccatagatgaagacattgtcacaagagtggcagaggaaatgacgtttttccccagagacgagaaaatctactcagacaagggctgcaagactgtgcagtcgcggctggatttccactgagctcctatccagatggggtaggagacagctgggaggctccgcacgccagaggccttgcctttcagaagaaccctgaagaccgctttggggttttgcctgtttgcaccttagacttttgggtatagaatcttttttttgagaagaggtctcactccgtcatccaagctggagtgcagtggtgcaatcctcaactcactgcaacctccgctcccggtttgagtgattctcatgcctcagcctcccgagtagctgggattacaggcatgagccactgtgcccagctgggatatagaatctaagagttgattgtggaaaacacgtgaatctattgcgcgcatttgtcatttagcaagatggcagcagtccagctgttctttgcagctggagatgaacttttaaaaatccccttcacacttaatgtactgaccgagacagaagtacctgaaaacagctgtgcatggcaggcccggcaatagcttctgacccacagcacccgcgcctcagaagctacggtcacaactaaaggagtccagggacttgctgcaggctggggggcactgggtggttctcaccagcaggctgcggggcactgtgttctcattggccaaaaacatccttttgctctgtctcgttctttacacagagttcactgacttgaagtatactcagttaaaatcggggctggaggtgcagacggtgtctgaccggaggatgtggccgtgcccgccgagcactcttgatctgagctgacctgtgtgtgtgtgtgggggggggtggggccttcacctaagacctctgcagcagacctggacagacaggcccctcccgcctgtccatcgctctagctgctaatacagccctggctgtggaatccttcaccgtctcagctggtatcagccccagcctgccttgtgccatatctcagcttggatctctgctagagtccccccaaccatatatcatagagttgaatcacaatgagaccgttggctttgaatttgagtcgttggttcccatggtgagatgcttgttaagactttatacttgggtcaatctctcactttattttgtagaaccatttgaaatcctaggatgtgcttgttctggaaggatgacatgggcccagactgaacaagtcagcttgatgatcttaaatgatggaagtataggacgttgcttattttaaaacaagggaaggacacaaaatggaatgactgcttagtcctttctcagatactcttaaaacaattttttattgttaaatttgtggtaatacatggtcacaaccgtggatcaaacaaggtcagtctaaagtggcaggtcctaggtgtgacctgataccaccaccctttgtggcagcaccgggctggactgccctgatccctgggacgtgagacttagcttccagccagtgtgaatcattgtatctgtctcataatcacagcacagctgcagacacaacaacgtgcagcattttttacataaaaatatggtagaattaatttatgacatggaaatgccttacgtggtatcacacttagtcttgaaaaaaacaccaaggtgacgtttaaaatttttagtacatatcctcaaattggagctaagttatacttcttttataaccttttgggcatctggtcgagagaagacaagattttctctatttacagtgaggcaataaatatgtttgccacctttg

SEQ ID NO: 69277 - DNA, 1061 bp, Homo sapiens
ctggttttcctgcaggtcagcaagggtggctgggattagcaagcgctcagtcaagcgatggttcatctctgaatgaatgaacatttagcttccttatcagaccccgaagcgttaaggacctccacataatcttgaaagtggcatcgtttgactgcctcggccctagggtgtggcagacaccctgctgtgtccctggataatctgtgcttcttgctttggccagctaagaaagtgctgcgttgctgatgcatttttaaggtctgtttctctctttgttctggggctgttcttgcagctctcaagctggatttggaggagaagctgtttggacagcatctagccacggaagtgattttcaaggcgctgactggcttcaggaacaacaaaaatcccaagaaaccactgaccctttccttacacggctgggctggcacaggcaagaattttgtcagtcaaattgtggctgaaaatcttcacccaaaaggtctgaagagtaactttgtccacctgtttgtatcgactctgcacttccctcatgagcagaagataaaactgtaccaggcaagagaacccgctattatctcgtctgcaggccagtcggactggtccgggtgacctgctcactaactctggcctctgcttctctttcctttgtgttgctgtagcccccggctccactgagttaaggcacacttagtccaggtagttacaaagctctcctacaacatttctcttacttggttccaaaacagtccagtggggtaggggatgttatttccattaaaagatggggagccaagggcctggcgccgtggctcacgcctgtaatcccagcattttggggaagccgaggcgggcggatcatttgaggccaggagtttgagaccagcctggccaacatggtgaaaccccatctctacctaaaagtaccaaaattacctgagcacggtggcacgcacctgtaatcccagctacttgggaggctgaggcaggagaatcgcttgaacctgggtggcagaggttgcagtgagctgagatcgcgccaccgtactcggtctcaa

SEQ ID NO: 69278 - DNA, 2806 bp, Homo sapiens
ctggttttcctgcaggtcagcaagggtggctgggattagcaagcgctcagtcaagcgatggttcatctctgaatgaatgaacatttagcttccttatcagaccccgaagcgttaaggacctccacataatcttgaaagtggcatcgtttgactgcctcggccctagggtgtggcagacaccctgctgtgtccctggataatctgtgcttcttgctttggccagctaagaaagtgctgcgttgctgatgcatttttaaggtctgtttctctctttgttctggggctgttcttgcagctctcaagctggatttggaggagaagctgtttggacagcatctagccacggaagtgattttcaaggcgctgactggcttcaggaacaacaaaaatcccaagaaaccactgaccctttccttacacggctgggctggcacaggcaagaattttgtcagtcaaattgtggctgaaaatcttcacccaaaaggtctgaagagtaactttgtccacctgtttgtatcgactctgcacttccctcatgagcagaagataaaactgtaccaggaccagttacagaagtggatccgcggtaatgtgagtgcatgtgcgaactctgttttcatatttgacgagatggataaattgcaccccgggatcattgacgcaatcaagccgtttctagactactacgagcaggttgacggagtgtcttaccgcaaagccatcttcatctttctcagcaatgcaggcggggaccttataactaagacggctcttgacttttggcgggccggaagaaagagggaagacattcagctgaaggacctggaacctgtactgtctgtcggagtcttcaataataaacacagtggcctgtggcacagtggactgatcgacaaaaacctcattgattactttatccccttcctgcctttggagtacagacatgtgaaaatgtgtgtgagggccgagatgagggcccgtggttctgccatagatgaagacattgtcacaagagtggcagaggaaatgacgtttttccccagagacgagaaaatctactcagacaagggctgcaagactgtgcagtcgcggctggatttccactgagctcctatccagatggggtaggagacagctgggaggctccgcacgccagaggccttgcctttcagaagaaccctgaagaccgctttggggttttgcctgtttgcaccttagacttttgggtatagaatcttttttttgagaagaggtctcactccgtcatccaagctggagtgcagtggtgcaatcctcaactcactgcaacctccgctcccggtttgagtgattctcatgcctcagcctcccgagtagctgggattacaggcatgagccactgtgcccagctgggatatagaatctaagagttgattgtggaaaacacgtgaatctattgcgcgcatttgtcatttagcaagatggcagcagtccagctgttctttgcagctggagatgaacttttaaaaatccccttcacacttaatgtactgaccgagacagaagtacctgaaaacagctgtgcatggcaggcccggcaatagcttctgacccacagcacccgcgcctcagaagctacggtcacaactaaaggagtccagggacttgctgcaggctggggggcactgggtggttctcaccagcaggctgcggggcactgtgttctcattggccaaaaacatccttttgctctgtctcgttctttacacagagttcactgacttgaagtatactcagttaaaatcggggctggaggtgcagacggtgtctgaccggaggatgtggccgtgcccgccgagcactcttgatctgagctgacctgtgtgtgtgtgtgggggggggtggggccttcacctaagacctctgcagcagacctggacagacaggcccctcccgcctgtccatcgctctagctgctaatacagccctggctgtggaatccttcaccgtctcagctggtatcagccccagcctgccttgtgccatatctcagcttggatctctgctagagtccccccaaccatatatcatagagttgaatcacaatgagaccgttggctttgaatttgagtcgttggttcccatggtgagatgcttgttaagactttatacttgggtcaatctctcactttattttgtagaaccatttgaaatcctaggatgtgcttgttctggaaggatgacatgggcccagactgaacaagtcagcttgatgatcttaaatgatggaagtataggacgttgcttattttaaaacaagggaaggacacaaaatggaatgactgcttagtcctttctcagatactcttaaaacaattttttattgttaaatttgtggtaatacatggtcacaaccgtggatcaaacaaggtcagtctaaagtggcaggtcctaggtgtgacctgataccaccaccctttgtggcagcaccgggctggactgccctgatccctgggacgtgagacttagcttccagccagtgtgaatcattgtatctgtctcataatcacagcacagctgcagacacaacaacgtgcagcattttttacataaaaatatggtagaattaatttatgacatggaaatgccttacgtggtatcacacttagtcttgaaaaaaacaccaaggtgacgtttaaaatttttagtacatatcctcaaattggagctaagttatacttcttttataaccttttgggcatctggtcgagagaagacaagattttctctatttacagtgaggcaataaatatgtttgccacctttg

SEQ ID NO: 69279 - DNA, 2500 bp, Homo sapiens
acctttaaaaagtcagatttaatagtcatttgagttaggaaaaaacttctctgcattttagcatctatctctgccaatttccactttttagagataaggttttagaaaagctgctacctagcgagtgggggtgagggtgccattctaagagctctgacctcgtccttcagtgcatgaggagcagatggagcctgcgcgcctcttggtgcaccctttgagcttcgcatcctgtttcttctttcatggttggtccaggaccagttacagaagtggatccgcggtaatgtgagtgcatgtgcgaactctgttttcatatttgacgagatggataaattgcaccccgggatcattgacgcaatcaagccgtttctagactactacgagcaggttgacggagtgtcttaccgcaaagccatcttcatctttctcagcaatgcaggcggggaccttataactaagacggctcttgacttttggcgggccggaagaaagagggaagacattcagctgaaggacctggaacctgtactgtctgtcggagtcttcaataataaacacagtggcctgtggcacagtggactgatcgacaaaaacctcattgattactttatccccttcctgcctttggagtacagacatgtgaaaatgtgtgtgagggccgagatgagggcccgtggttctgccatagatgaagacattgtcacaagagtggcagaggaaatgacgtttttccccagagacgagaaaatctactcagacaagggctgcaagactgtgcagtcgcggctggatttccactgagctcctatccagatggggtaggagacagctgggaggctccgcacgccagaggccttgcctttcagaagaaccctgaagaccgctttggggttttgcctgtttgcaccttagacttttgggtatagaatcttttttttgagaagaggtctcactccgtcatccaagctggagtgcagtggtgcaatcctcaactcactgcaacctccgctcccggtttgagtgattctcatgcctcagcctcccgagtagctgggattacaggcatgagccactgtgcccagctgggatatagaatctaagagttgattgtggaaaacacgtgaatctattgcgcgcatttgtcatttagcaagatggcagcagtccagctgttctttgcagctggagatgaacttttaaaaatccccttcacacttaatgtactgaccgagacagaagtacctgaaaacagctgtgcatggcaggcccggcaatagcttctgacccacagcacccgcgcctcagaagctacggtcacaactaaaggagtccagggacttgctgcaggctggggggcactgggtggttctcaccagcaggctgcggggcactgtgttctcattggccaaaaacatccttttgctctgtctcgttctttacacagagttcactgacttgaagtatactcagttaaaatcggggctggaggtgcagacggtgtctgaccggaggatgtggccgtgcccgccgagcactcttgatctgagctgacctgtgtgtgtgtgtgggggggggtggggccttcacctaagacctctgcagcagacctggacagacaggcccctcccgcctgtccatcgctctagctgctaatacagccctggctgtggaatccttcaccgtctcagctggtatcagccccagcctgccttgtgccatatctcagcttggatctctgctagagtccccccaaccatatatcatagagttgaatcacaatgagaccgttggctttgaatttgagtcgttggttcccatggtgagatgcttgttaagactttatacttgggtcaatctctcactttattttgtagaaccatttgaaatcctaggatgtgcttgttctggaaggatgacatgggcccagactgaacaagtcagcttgatgatcttaaatgatggaagtataggacgttgcttattttaaaacaagggaaggacacaaaatggaatgactgcttagtcctttctcagatactcttaaaacaattttttattgttaaatttgtggtaatacatggtcacaaccgtggatcaaacaaggtcagtctaaagtggcaggtcctaggtgtgacctgataccaccaccctttgtggcagcaccgggctggactgccctgatccctgggacgtgagacttagcttccagccagtgtgaatcattgtatctgtctcataatcacagcacagctgcagacacaacaacgtgcagcattttttacataaaaatatggtagaattaatttatgacatggaaatgccttacgtggtatcacacttagtcttgaaaaaaacaccaaggtgacgtttaaaatttttagtacatatcctcaaattggagctaagttatacttcttttataaccttttgggcatctggtcgagagaagacaagattttctctatttacagtgaggcaataaatatgtttgccacctttg

SEQ ID NO: 69280 - DNA, 2546 bp, Homo sapiens
cgtcctgccgcttggccgcggggcgcctggctcagtggcttctgcgggcttcgaggagcgggatgttgcgggctgggtggctccggggcgcggcggcgctggcgctgctgctggcggcccgagtggtggcggcgttcgagcccatcaccgtgggcctagccatcggggccgcgtcggccatcaccggctacctgtcctacaatgacatctactgccgcttcgccgagtgctgccgcgaggagcggccgctcaacgcttcggctctcaagctggatttggaggagaagctgtttggacagcatctagccacggaagtgattttcaaggcgctgactggcttcaggaacaacaaaaatcccaagaaaccactgaccctttccttacacggctgggctggcacaggcaagaattttgtcagtcaaattgtggctgaaaatcttcacccaaaaggtctgaagagtaactttgtccacctgtttgtatcgactctgcacttccctcatgagcagaagataaaactgtaccaggaccagttacagaagtggatccgcggtaatgtgagtgcatgtgcgaactctgttttcatatttgacgagatggataaattgcaccccgggatcattgacgcaatcaagccgtttctagactactacgagcaggttgacggagtgtcttaccgcaaagccatcttcatctttctcagcaatgcaggcggggaccttataactaagacggctcttgacttttggcgggccggaagaaagagggaagacattcagctgaaggacctggaacctgtactgtctgtcggagtcttcaataataaacacagtggcctgtggcacagtggactgatcgacaaaaacctcattgattactttatccccttcctgcctttggagtacagacatgtgaaaatgtgtgtgagggccgagatgagggcccgtggttctgccatagatgaagacattgtcacaagagtggcagaggaaatgacgtttttccccagagacgagaaaatctactcagacaagggctgcaagactgtgcagtcgcggctggatttccactgagctcctatccagatggggtaggagacagctgggaggctccgcacgccagaggccttgcctttcagaagaaccctgaagaccgctttggggttttgcctgtttgcaccttagacttttgggtatagaatcttttttttgagaagaggtctcactccgtcatccaagctggagtgcagtggtgcaatcctcaactcactgcaacctccgctcccggtttgagtgattctcatgcctcagcctcccgagtagctgggattacaggcatgagccactgtgcccagctgggatatagaatctaagagttgattgtggaaaacacgtgaatctattgcgcgcatttgtcatttagcaagatggcagcagtccagctgttctttgcagctggagatgaacttttaaaaatccccttcacacttaatgtactgaccgagacagaagtacctgaaaacagctgtgcatggcaggcccggcaatagcttctgacccacagcacccgcgcctcagaagctacggtcacaactaaaggagtccagggacttgctgcaggctggggggcactgggtggttctcaccagcagacctggacagacaggcccctcccgcctgtccatcgctctagctgctaatacagccctggctgtggaatccttcaccgtctcagctggtatcagccccagcctgccttgtgccatatctcagcttggatctctgctagagtccccccaaccatatatcatagagttgaatcacaatgagaccgttggctttgaatttgagtcgttggttcccatggtgagatgcttgttaagactttatacttgggtcaatctctcactttattttgtagaaccatttgaaatcctaggatgtgcttgttctggaaggatgacatgggcccagactgaacaagtcagcttgatgatcttaaatgatggaagtataggacgttgcttattttaaaacaagggaaggacacaaaatggaatgactgcttagtcctttctcagatactcttaaaacaattttttattgttaaatttgtggtaatacatggtcacaaccgtggatcaaacaaggtcagtctaaagtggcaggtcctaggtgtgacctgataccaccaccctttgtggcagcaccgggctggactgccctgatccctgggacgtgagacttagcttccagccagtgtgaatcattgtatctgtctcataatcacagcacagctgcagacacaacaacgtgcagcattttttacataaaaatatggtagaattaatttatgacatggaaatgccttacgtggtatcacacttagtcttgaaaaaaacaccaaggtgacgtttaaaatttttagtacatatcctcaaattggagctaagttatacttcttttataaccttttgggcatctggtcgagagaagacaagattttctctatttacagtgaggcaataaatatgtttgccacctttg

SEQ ID NO: 69281 - DNA, 1550 bp, Homo sapiens
ttgtcttttggtttttatgaggtgggatatccctatgctgcctaggctgaccttgaactcctgggctcaagcagtctacccacctcagcctcccgagtagctgggattacaggcatgagccactgtgcccagctgggatatagaatctaagagttgattgtggaaaacacgtgaatctattgcgcgcatttgtcatttagcaagatggcagcagtccagctgttctttgcagctggagatgaacttttaaaaatccccttcacacttaatgtactgaccgagacagaagtacctgaaaacagctgtgcatggcaggcccggcaatagcttctgacccacagcacccgcgcctcagaagctacggtcacaactaaaggagtccagggacttgctgcaggctggggggcactgggtggttctcaccagcaggctgcggggcactgtgttctcattggccaaaaacatccttttgctctgtctcgttctttacacagagttcactgacttgaagtatactcagttaaaatcggggctggaggtgcagacggtgtctgaccggaggatgtggccgtgcccgccgagcactcttgatctgagctgacctgtgtgtgtgtgtgggggggggtggggccttcacctaagacctctgcagcagacctggacagacaggcccctcccgcctgtccatcgctctagctgctaatacagccctggctgtggaatccttcaccgtctcagctggtatcagccccagcctgccttgtgccatatctcagcttggatctctgctagagtccccccaaccatatatcatagagttgaatcacaatgagaccgttggctttgaatttgagtcgttggttcccatggtgagatgcttgttaagactttatacttgggtcaatctctcactttattttgtagaaccatttgaaatcctaggatgtgcttgttctggaaggatgacatgggcccagactgaacaagtcagcttgatgatcttaaatgatggaagtataggacgttgcttattttaaaacaagggaaggacacaaaatggaatgactgcttagtcctttctcagatactcttaaaacaattttttattgttaaatttgtggtaatacatggtcacaaccgtggatcaaacaaggtcagtctaaagtggcaggtcctaggtgtgacctgataccaccaccctttgtggcagcaccgggctggactgccctgatccctgggacgtgagacttagcttccagccagtgtgaatcattgtatctgtctcataatcacagcacagctgcagacacaacaacgtgcagcattttttacataaaaatatggtagaattaatttatgacatggaaatgccttacgtggtatcacacttagtcttgaaaaaaacaccaaggtgacgtttaaaatttttagtacatatcctcaaattggagctaagttatacttcttttataaccttttgggcatctggtcgagagaagacaagattttctctatttacagtgaggcaataaatatgtttgccacctttg

SEQ ID NO: 69282 - DNA, 2028 bp, Homo sapiens
cgtcctgccgcttggccgcggggcgcctggctcagtggcttctgcgggcttcgaggagcgggatgttgcgggctgggtggctccggggcgcggcggcgctggcgctgctgctggcggcccgagtggtggcggcgttcgagcccatcaccgtgggcctagccatcggggccgcgtcggccatcaccggctacctgtcctacaatgacatctactgccgcttcgccgagtgctgccgcgaggagcggccgctcaacgcttcggctctcaagctggatttggaggagaagctgtttggacagcatctagccacggaagtgattttcaaggcgctgactggcttcaggaacaacaaaaatcccaagaaaccactgaccctttccttacacggctgggctggcacaggcaagaattttgtcagtcaaattgtggctgaaaatcttcacccaaaaggtctgaagagtaactttgtccacctgtttgtatcgactctgcacttccctcatgagcagaagataaaactgtaccaggcaagagaacccgctattatctcgtctgcaggccagtcggactggtccgggtgacctgctcactaactctggcctctgcttctctttcctttgtgttgctgtagcccccggctccactgagttaaggcacacttagtccaggaccagttacagaagtggatccgcggtaatgtgagtgcatgtgcgaactctgttttcatatttgacgagatggataaattgcaccccgggatcattgacgcaatcaagccgtttctagactactacgagcaggttgacggagtgtcttaccgcaaagccatcttcatctttctcagcaatgcaggcggggaccttataactaagacggctcttgacttttggcgggccggaagaaagagggaagacattcagctgaaggacctggaacctgtactgtctgtcggagtcttcaataataaacacaagttcactgacttgaagtatactcagttaaaatcggggctggaggtgcagacggtgtctgaccggaggatgtggccgtgcccgccgagcactcttgatctgagctgacctgtgtgtgtgtgtgggggggggtggggccttcacctaagacctctgcagcagacctggacagacaggcccctcccgcctgtccatcgctctagctgctaatacagccctggctgtggaatccttcaccgtctcagctggtatcagccccagcctgccttgtgccatatctcagcttggatctctgctagagtccccccaaccatatatcatagagttgaatcacaatgagaccgttggctttgaatttgagtcgttggttcccatggtgagatgcttgttaagactttatacttgggtcaatctctcactttattttgtagaaccatttgaaatcctaggatgtgcttgttctggaaggatgacatgggcccagactgaacaagtcagcttgatgatcttaaatgatggaagtataggacgttgcttattttaaaacaagggaaggacacaaaatggaatgactgcttagtcctttctcagatactcttaaaacaattttttattgttaaatttgtggtaatacatggtcacaaccgtggatcaaacaaggtcagtctaaagtggcaggtcctaggtgtgacctgataccaccaccctttgtggcagcaccgggctggactgccctgatccctgggacgtgagacttagcttccagccagtgtgaatcattgtatctgtctcataatcacagcacagctgcagacacaacaacgtgcagcattttttacataaaaatatggtagaattaatttatgacatggaaatgccttacgtggtatcacacttagtcttgaaaaaaacaccaaggtgacgtttaaaatttttagtacatatcctcaaattggagctaagttatacttcttttataaccttttgggcatctggtcgagagaagacaagattttctctatttacagtgaggcaataaatatgtttgccacctttg

SEQ ID NO: 69283 - DNA, 1759 bp, Homo sapiens
cgtcctgccgcttggccgcggggcgcctggctcagtggcttctgcgggcttcgaggagcgggatgttgcgggctgggtggctccggggcgcggcggcgctggcgctgctgctggcggcccgagtggtggcggcgttcgagcccatcaccgtgggcctagccatcggggccgcgtcggccatcaccggctacctgtcctacaatgacatctactgccgcttcgccgagtgctgccgcgaggagcggccgctcaacgcttcggctctcaagctggatttggaggagaagctgtttggacagcatctagccacggaagtgattttcaaggcgctgactggcttcaggaacaacaaaaatcccaagaaaccactgaccctttccttacacggctgggctggcacaggcaagaattttgtcagtcaaattgtggctgaaaatcttcacccaaaaggtctgaagagtaactttgtccacctgtttgtatcgactctgcacttccctcatgagcagaagataaaactgtaccaggaccagttacagaagtggatccgcggtaatgtgagtgcatgtgcgaactctgttttcatatttgacgagatggataaattgcaccccgggatcattgacgcaatcaagccgtttctagactactacgagcaggttgacggagtgtcttaccgcaaagccatcttcatctttctcagagttcactgacttgaagtatactcagttaaaatcggggctggaggtgcagacggtgtctgaccggaggatgtggccgtgcccgccgagcactcttgatctgagctgacctgtgtgtgtgtgtgggggggggtggggccttcacctaagacctctgcagcagacctggacagacaggcccctcccgcctgtccatcgctctagctgctaatacagccctggctgtggaatccttcaccgtctcagctggtatcagccccagcctgccttgtgccatatctcagcttggatctctgctagagtccccccaaccatatatcatagagttgaatcacaatgagaccgttggctttgaatttgagtcgttggttcccatggtgagatgcttgttaagactttatacttgggtcaatctctcactttattttgtagaaccatttgaaatcctaggatgtgcttgttctggaaggatgacatgggcccagactgaacaagtcagcttgatgatcttaaatgatggaagtataggacgttgcttattttaaaacaagggaaggacacaaaatggaatgactgcttagtcctttctcagatactcttaaaacaattttttattgttaaatttgtggtaatacatggtcacaaccgtggatcaaacaaggtcagtctaaagtggcaggtcctaggtgtgacctgataccaccaccctttgtggcagcaccgggctggactgccctgatccctgggacgtgagacttagcttccagccagtgtgaatcattgtatctgtctcataatcacagcacagctgcagacacaacaacgtgcagcattttttacataaaaatatggtagaattaatttatgacatggaaatgccttacgtggtatcacacttagtcttgaaaaaaacaccaaggtgacgtttaaaatttttagtacatatcctcaaattggagctaagttatacttcttttataaccttttgggcatctggtcgagagaagacaagattttctctatttacagtgaggcaataaatatgtttgccacctttg

SEQ ID NO: 69284 - DNA, 1813 bp, Homo sapiens
cgtcctgccgcttggccgcggggcgcctggctcagtggcttctgcgggcttcgaggagcgggatgttgcgggctgggtggctccggggcgcggcggcgctggcgctgctgctggcggcccgagtggtggcggcgttcgagcccatcaccgtgggcctagccatcggggccgcgtcggccatcaccggctacctgtcctacaatgacatctactgccgcttcgccgagtgctgccgcgaggagcggccgctcaacgcttcggctctcaagctggatttggaggagaagctgtttggacagcatctagccacggaagtgattttcaaggcgctgactggcttcaggaacaacaaaaatcccaagaaaccactgaccctttccttacacggctgggctggcacaggcaagaattttgtcagtcaaattgtggctgaaaatcttcacccaaaaggtctgaagagtaactttgtccacctgtttgtatcgactctgcacttccctcatgagcagaagataaaactgtaccaggaccagttacagaagtggatccgcggtaatgtgagtgcatgtgcgaactctgttttcatatttgacgagatggataaattgcaccccgggatcattgacgcaatcaagccgtttctagactactacgagcaggttgacggagtgtcttaccgcaaagccatcttcatctttctcagcaatgcaggcggggaccttataactaagacggctcttgacttttggcgggccggaagaaagagggaagacattcagctgaaggacctggaacctgtactgtctgtcggagtcttcaataataaacacagtggcctgtggcacagtggactgatcgacaaaaacctcattgattactttatccccttcctgcctttggagtacagacatgtgaaaatgtgtgtgagggccgagatgagggcccgtggttctgccatagatgaagacattgtcacaagagtggcagaggaaatgacgtttttccccagagacgagaaaatctactcagacaagggctgcaagactgtgcagtcgcggctggatttccactgagctcctatccagatggggtaggagacagctgggaggctccgcacgccagaggccttgcctttcagaagaaccctgaagaccgctttggggttttgcctgtttgcaccttagacttttgggtatagaatcttttttttgagaagaggtctcactccgtcatccaagctggagtgcagtggtgcaatcctcaactcactgcaacctccgctcccggtttgagtgattctcatgcctcagcctcccgagtagctgggattacaggcatgagccactgtgcccagctgggatatagaatctaagagttgattgtggaaaacacgtgaatctattgcgcgcatttgtcatttagcaagatggcagcagtccagctgttctttgcagctggagatgaacttttaaaaatccccttcacacttaatgtactgaccgagacagaagtacctgaaaacagctgtgcatggcaggcccggcaatagcttctgacccacagcacccgcgcctcagaagctacggtcacaactaaaggagtccagggacttgctgcaggctggggggcactgggtggttctcaccagcagcataggggcactgggggtcttatacgtctttaaaataattataactgtgacttgtatgtacactatatttaccctcctttgatttatacttaagttaaaatacggggctcgaagtgccatactggagtcagtacttgtaggatgttgctcgtggccggcctg

SEQ ID NO: 69285 - DNA, 1542 bp, Homo sapiens
cgtcctgccgcttggccgcggggcgcctggctcagtggcttctgcgggcttcgaggagcgggatgttgcgggctgggtggctccggggcgcggcggcgctggcgctgctgctggcggcccgagtggtggcggcgttcgagcccatcaccgtgggcctagccatcggggccgcgtcggccatcaccggctacctgtcctacaatgacatctactgccgcttcgccgagtgctgccgcgaggagcggccgctcaacgcttcggctctcaagctggatttggaggagaagctgtttggacagcatctagccacggaagtgattttcaaggcgctgactggcttcaggaacaacaaaaatcccaagaaaccactgaccctttccttacacggctgggctggcacaggcaagaattttgtcagtcaaattgtggctgaaaatcttcacccaaaaggtctgaagagtaactttgtccacctgtttgtatcgactctgcacttccctcatgagcagaagataaaactgtaccaggcaagagaacccgctattatctcgtctgcaggccagtcggactggtccgggtgacctgctcactaactctggcctctgcttctctttcctttgtgttgctgtagcccccggctccactgagttaaggcacacttagtccaggaccagttacagaagtggatccgcggtaatgtgagtgcatgtgcgaactctgttttcatatttgacgagatggataaattgcaccccgggatcattgacgcaatcaagccgtttctagactactacgagcaggttgacggagtgtcttaccgcaaagccatcttcatctttctcaggtcagcgggaggcggttttttggggcacacaagcccttcattctctcaatgataaaatgaggtcctgaggaccatcagcactttgtttaccaggacgaaagtgcctgcttggcacaaggcacttacctactgctttacttttcctttgccagtctcagcatggcacacagtgtgggttgtggaaatgaactaaagaaataatcactgggccaggcgcggtggctcacacctgtaatcccagcactttgggaggccatggcgggcggatcaccaggagatcgagaccatcctggctaacatggtgaaaccctgtctctactaaaaatacaaaaattagccgggcgtggtggcgggcgcctgtagtcccatctactcgggagactgaggcaagagaatggcgtgaacccgggaggcggagcttgcagtgagccgggatcacaccactgcactccagcctgggtgacagagtgagactctgtctcaaaaaaaaaaaaaagaaataatcactgatggaagcaaaatgcgccagtcttgctcccatcaggtcagagccaagaattatggcaggattatcccttagattttaacactaatttttcttaaaagttatccaagatgctgatgggacgaaaacacatttggcgtcccatcagagattggacagtcaatttcctgaatggctatgtgtctgggttcat

SEQ ID NO: 69286 - DNA, 314 bp, Homo sapiens
aaagccacaggatcccactggatttcctcactttgctaaagtcaggaattttcttagggcatactgtgctagaaaccagtgagtgagtgtccagctgagtcctgcatgggcttgttgcacactgacaagagactctctcaaggggtacggacatgaggaatgtgctgagggtcgggactggagcttggccaggtggcggtggtggcaggaaacccagctgtgtcttgttctgcaggtggcctgtggcacagtggactgatcgacaaaaacctcattgattactttatccccttcctgcctttggagtacagaca

SEQ ID NO: 69287 - DNA, 2913 bp, Homo sapiens
cgtcctgccgcttggccgcggggcgcctggctcagtggcttctgcgggcttcgaggagcgggatgttgcgggctgggtggctccggggcgcggcggcgctggcgctgctgctggcggcccgagtggtggcggcgttcgagcccatcaccgtgggcctagccatcggggccgcgtcggccatcaccggctacctgtcctacaatgacatctactgccgcttcgccgagtgctgccgcgaggagcggccgctcaacgcttcggctctcaagctggatttggaggagaagctgtttggacagcatctagccacggaagtgattttcaaggcgctgactggcttcaggaacaacaaaaatcccaagaaaccactgaccctttccttacacggctgggctggcacaggcaagaattttgtcagtcaaattgtggctgaaaatcttcacccaaaaggtctgaagagtaactttgtccacctgtttgtatcgactctgcacttccctcatgagcagaagataaaactgtaccaggcaagagaacccgctattatctcgtctgcaggccagtcggactggtccgggtgacctgctcactaactctggcctctgcttctctttcctttgtgttgctgtagcccccggctccactgagttaaggcacacttagtccaggaccagttacagaagtggatccgcggtaatgtgagtgcatgtgcgaactctgttttcatatttgacgagatggataaattgcaccccgggatcattgacgcaatcaagccgtttctagactactacgagcaggttgacggagtgtcttaccgcaaagccatcttcatctttctcagcaatgcaggcggggaccttataactaagacggctcttgacttttggcgggccggaagaaagagggaagacattcagctgaaggacctggaacctgtactgtctgtcggagtcttcaataataaacacagtggcctgtggcacagtggactgatcgacaaaaacctcattgattactttatccccttcctgcctttggagtacagacatgtgaaaatgtgtgtgagggccgagatgagggcccgtggttctgccatagatgaagacattgtcacaagagtggcagaggaaatgacgtttttccccagagacgagaaaatctactcagacaagggctgcaagactgtgcagtcgcggctggatttccactgagctcctatccagatggggtaggagacagctgggaggctccgcacgccagaggccttgcctttcagaagaaccctgaagaccgctttggggttttgcctgtttgcaccttagacttttgggtatagaatcttttttttgagaagaggtctcactccgtcatccaagctggagtgcagtggtgcaatcctcaactcactgcaacctccgctcccggtttgagtgattctcatgcctcagcctcccgagtagctgggattacaggcatgagccactgtgcccagctgggatatagaatctaagagttgattgtggaaaacacgtgaatctattgcgcgcatttgtcatttagcaagatggcagcagtccagctgttctttgcagctggagatgaacttttaaaaatccccttcacacttaatgtactgaccgagacagaagtacctgaaaacagctgtgcatggcaggcccggcaatagcttctgacccacagcacccgcgcctcagaagctacggtcacaactaaaggagtccagggacttgctgcaggctggggggcactgggtggttctcaccagcaggctgcggggcactgtgttctcattggccaaaaacatccttttgctctgtctcgttctttacacagagttcactgacttgaagtatactcagttaaaatcggggctggaggtgcagacggtgtctgaccggaggatgtggccgtgcccgccgagcactcttgatctgagctgacctgtgtgtgtgtgtgggggggggtggggccttcacctaagacctctgcagcagacctggacagacaggcccctcccgcctgtccatcgctctagctgctaatacagccctggctgtggaatccttcaccgtctcagctggtatcagccccagcctgccttgtgccatatctcagcttggatctctgctagagtccccccaaccatatatcatagagttgaatcacaatgagaccgttggctttgaatttgagtcgttggttcccatggtgagatgcttgttaagactttatacttgggtcaatctctcactttattttgtagaaccatttgaaatcctaggatgtgcttgttctggaaggatgacatgggcccagactgaacaagtcagcttgatgatcttaaatgatggaagtataggacgttgcttattttaaaacaagggaaggacacaaaatggaatgactgcttagtcctttctcagatactcttaaaacaattttttattgttaaatttgtggtaatacatggtcacaaccgtggatcaaacaaggtcagtctaaagtggcaggtcctaggtgtgacctgataccaccaccctttgtggcagcaccgggctggactgccctgatccctgggacgtgagacttagcttccagccagtgtgaatcattgtatctgtctcataatcacagcacagctgcagacacaacaacgtgcagcattttttacataaaaatatggtagaattaatttatgacatggaaatgccttacgtggtatcacacttagtcttgaaaaaaacaccaaggtgacgtttaaaatttttagtacatatcctcaaattggagctaagttatacttcttttataaccttttgggcatctggtcgagagaagacaagattttctctatttacagtgaggcaataaatatgtttgccacctttg

SEQ ID NO: 69288 - DNA, 2681 bp, Homo sapiens
ctggttttcctgcaggtcagcaagggtggctgggattagcaagcgctcagtcaagcgatggttcatctctgaatgaatgaacatttagcttccttatcagaccccgaagcgttaaggacctccacataatcttgaaagtggcatcgtttgactgcctcggccctagggtgtggcagacaccctgctgtgtccctggataatctgtgcttcttgctttggccagctaagaaagtgctgcgttgctgatgcatttttaaggtctgtttctctctttgttctggggctgttcttgcagctctcaagctggatttggaggagaagctgtttggacagcatctagccacggaagtgattttcaaggcgctgactggcttcaggaacaacaaaaatcccaagaaaccactgaccctttccttacacggctgggctggcacaggaccagttacagaagtggatccgcggtaatgtgagtgcatgtgcgaactctgttttcatatttgacgagatggataaattgcaccccgggatcattgacgcaatcaagccgtttctagactactacgagcaggttgacggagtgtcttaccgcaaagccatcttcatctttctcagcaatgcaggcggggaccttataactaagacggctcttgacttttggcgggccggaagaaagagggaagacattcagctgaaggacctggaacctgtactgtctgtcggagtcttcaataataaacacagtggcctgtggcacagtggactgatcgacaaaaacctcattgattactttatccccttcctgcctttggagtacagacatgtgaaaatgtgtgtgagggccgagatgagggcccgtggttctgccatagatgaagacattgtcacaagagtggcagaggaaatgacgtttttccccagagacgagaaaatctactcagacaagggctgcaagactgtgcagtcgcggctggatttccactgagctcctatccagatggggtaggagacagctgggaggctccgcacgccagaggccttgcctttcagaagaaccctgaagaccgctttggggttttgcctgtttgcaccttagacttttgggtatagaatcttttttttgagaagaggtctcactccgtcatccaagctggagtgcagtggtgcaatcctcaactcactgcaacctccgctcccggtttgagtgattctcatgcctcagcctcccgagtagctgggattacaggcatgagccactgtgcccagctgggatatagaatctaagagttgattgtggaaaacacgtgaatctattgcgcgcatttgtcatttagcaagatggcagcagtccagctgttctttgcagctggagatgaacttttaaaaatccccttcacacttaatgtactgaccgagacagaagtacctgaaaacagctgtgcatggcaggcccggcaatagcttctgacccacagcacccgcgcctcagaagctacggtcacaactaaaggagtccagggacttgctgcaggctggggggcactgggtggttctcaccagcaggctgcggggcactgtgttctcattggccaaaaacatccttttgctctgtctcgttctttacacagagttcactgacttgaagtatactcagttaaaatcggggctggaggtgcagacggtgtctgaccggaggatgtggccgtgcccgccgagcactcttgatctgagctgacctgtgtgtgtgtgtgggggggggtggggccttcacctaagacctctgcagcagacctggacagacaggcccctcccgcctgtccatcgctctagctgctaatacagccctggctgtggaatccttcaccgtctcagctggtatcagccccagcctgccttgtgccatatctcagcttggatctctgctagagtccccccaaccatatatcatagagttgaatcacaatgagaccgttggctttgaatttgagtcgttggttcccatggtgagatgcttgttaagactttatacttgggtcaatctctcactttattttgtagaaccatttgaaatcctaggatgtgcttgttctggaaggatgacatgggcccagactgaacaagtcagcttgatgatcttaaatgatggaagtataggacgttgcttattttaaaacaagggaaggacacaaaatggaatgactgcttagtcctttctcagatactcttaaaacaattttttattgttaaatttgtggtaatacatggtcacaaccgtggatcaaacaaggtcagtctaaagtggcaggtcctaggtgtgacctgataccaccaccctttgtggcagcaccgggctggactgccctgatccctgggacgtgagacttagcttccagccagtgtgaatcattgtatctgtctcataatcacagcacagctgcagacacaacaacgtgcagcattttttacataaaaatatggtagaattaatttatgacatggaaatgccttacgtggtatcacacttagtcttgaaaaaaacaccaaggtgacgtttaaaatttttagtacatatcctcaaattggagctaagttatacttcttttataaccttttgggcatctggtcgagagaagacaagattttctctatttacagtgaggcaataaatatgtttgccacctttg

SEQ ID NO: 69289 - DNA, 2465 bp, Homo sapiens
cgtcctgccgcttggccgcggggcgcctggctcagtggcttctgcgggcttcgaggagcgggatgttgcgggctgggtggctccggggcgcggcggcgctggcgctgctgctggcggcccgagtggtggcggcgttcgagcccatcaccgtgggcctagccatcggggccgcgtcggccatcaccggctacctgtcctacaatgacatctactgccgcttcgccgagtgctgccgcgaggagcggccgctcaacgcttcggctctcaagctggatttggaggagaagctgtttggacagcatctagccacggaagtgattttcaaggcgctgactggcttcaggaacaacaaaaatcccaagaaaccactgaccctttccttacacggctgggctggcacaggcaagaattttgtcagtcaaattgtggctgaaaatcttcacccaaaaggtctgaagagtaactttgtccacctgtttgtatcgactctgcacttccctcatgagcagaagataaaactgtaccaggaccagttacagaagtggatccgcggtaatgtgagtgcatgtgcgaactctgttttcatatttgacgagatggataaattgcaccccgggatcattgacgcaatcaagccgtttctagactactacgagcaggttgacggagtgtcttaccgcaaagccatcttcatctttctcagcaatgcaggcggggaccttataactaagacggctcttgacttttggcgggccggaagaaagagggaagacattcagctgaaggacctggaacctgtactgtctgtcggagtcttcaataataaacacagtggcctgtggcacagtggactgatcgacaaaaacctcattgattactttatccccttcctgcctttggagtacagacatgtgaaaatgtgtgtgagggccgagatgagggcccgtggttctgccatagatgaagacattgtcacaagagtggcagaggaaatgacgtttttccccagagacgagaaaatctactcagacaagggctgcaagactgtgcagtcgcggctggatttccactgagctcctatccagatggggtaggagacagctgggaggctccgcacgccagaggccttgcctttcagaagaaccctgaagaccgctttggggttttgcctgtttgcaccttagacttttgggtatagaatcttttttttgagaagaggtctcactccgtcatccaagctggagtgcagtggtgcaatcctcaactcactgcaacctccgctcccggtttgagtgattctcatgcctcagcctcccgagtagctgggattacaggcatgagccactgtgcccagctgggatatagaatctaagagttgattgtggaaaacacgtgaatctattgcgcgcatttgtcatttagcaagatggcagcagtccagctgttctttgcagctggagatgaacttttaaaaatccccttcacacttaatgtactgaccgagacagaagtacctgaaaacagctgtgcatggcaggcccggcaatagcttctgacccacagcacccgcgcctcagaagctacggtcacaactaaaggagtccagggactttgctaatacagccctggctgtggaatccttcaccgtctcagctggtatcagccccagcctgccttgtgccatatctcagcttggatctctgctagagtccccccaaccatatatcatagagttgaatcacaatgagaccgttggctttgaatttgagtcgttggttcccatggtgagatgcttgttaagactttatacttgggtcaatctctcactttattttgtagaaccatttgaaatcctaggatgtgcttgttctggaaggatgacatgggcccagactgaacaagtcagcttgatgatcttaaatgatggaagtataggacgttgcttattttaaaacaagggaaggacacaaaatggaatgactgcttagtcctttctcagatactcttaaaacaattttttattgttaaatttgtggtaatacatggtcacaaccgtggatcaaacaaggtcagtctaaagtggcaggtcctaggtgtgacctgataccaccaccctttgtggcagcaccgggctggactgccctgatccctgggacgtgagacttagcttccagccagtgtgaatcattgtatctgtctcataatcacagcacagctgcagacacaacaacgtgcagcattttttacataaaaatatggtagaattaatttatgacatggaaatgccttacgtggtatcacacttagtcttgaaaaaaacaccaaggtgacgtttaaaatttttagtacatatcctcaaattggagctaagttatacttcttttataaccttttgggcatctggtcgagagaagacaagattttctctatttacagtgaggcaataaatatgtttgccacctttg

SEQ ID NO: 69290 - DNA, 1583 bp, Homo sapiens
cgtcctgccgcttggccgcggggcgcctggctcagtggcttctgcgggcttcgaggagcgggatgttgcgggctgggtggctccggggcgcggcggcgctggcgctgctgctggcggcccgagtggtggcggcgttcgagcccatcaccgtgggcctagccatcggggccgcgtcggccatcaccggctacctgtcctacaatgacatctactgccgcttcgccgagtgctgccgcgaggagcggccgctcaacgcttcggctctcaagctggatttggaggagaagctgtttggacagcatctagccacggaagtgattttcaaggcgctgactggcttcaggaacaacaaaaatcccaagaaaccactgaccctttccttacacggctgggctggcacaggcaagaattttgtcagtcaaattgtggctgaaaatcttcacccaaaaggtctgaagagtaactttgtccacctgtttgtatcgactctgcacttccctcatgagcagaagataaaactgtaccagagttcactgacttgaagtatactcagttaaaatcggggctggaggtgcagacggtgtctgaccggaggatgtggccgtgcccgccgagcactcttgatctgagctgacctgtgtgtgtgtgtgggggggggtggggccttcacctaagacctctgcagcagacctggacagacaggcccctcccgcctgtccatcgctctagctgctaatacagccctggctgtggaatccttcaccgtctcagctggtatcagccccagcctgccttgtgccatatctcagcttggatctctgctagagtccccccaaccatatatcatagagttgaatcacaatgagaccgttggctttgaatttgagtcgttggttcccatggtgagatgcttgttaagactttatacttgggtcaatctctcactttattttgtagaaccatttgaaatcctaggatgtgcttgttctggaaggatgacatgggcccagactgaacaagtcagcttgatgatcttaaatgatggaagtataggacgttgcttattttaaaacaagggaaggacacaaaatggaatgactgcttagtcctttctcagatactcttaaaacaattttttattgttaaatttgtggtaatacatggtcacaaccgtggatcaaacaaggtcagtctaaagtggcaggtcctaggtgtgacctgataccaccaccctttgtggcagcaccgggctggactgccctgatccctgggacgtgagacttagcttccagccagtgtgaatcattgtatctgtctcataatcacagcacagctgcagacacaacaacgtgcagcattttttacataaaaatatggtagaattaatttatgacatggaaatgccttacgtggtatcacacttagtcttgaaaaaaacaccaaggtgacgtttaaaatttttagtacatatcctcaaattggagctaagttatacttcttttataaccttttgggcatctggtcgagagaagacaagattttctctatttacagtgaggcaataaatatgtttgccacctttg

SEQ ID NO: 69291 - DNA, 3254 bp, Homo sapiens
cgtcctgccgcttggccgcggggcgcctggctcagtggcttctgcgggcttcgaggagcgggatgttgcgggctgggtggctccggggcgcggcggcgctggcgctgctgctggcggcccgagtggtggcggcgttcgagcccatcaccgtgggcctagccatcggggccgcgtcggccatcaccggctacctgtcctacaatgacatctactgccgcttcgccgagtgctgccgcgaggagcggccgctcaacgcttcggctctcaagctggatttggaggagaagctgtttggacagcatctagccacggaagtgattttcaaggcgctgactggcttcaggaacaacaaaaatcccaagaaaccactgaccctttccttacacggctgggctggcacaggcaagaattttgtcagtcaaattgtggctgaaaatcttcacccaaaaggtctgaagagtaactttgtccacctgtttgtatcgactctgcacttccctcatgagcagaagataaaactgtaccaggaccagttacagaagtggatccgcggtaatgtgagtgcatgtgcgaactctgttttcatatttgacgagatggataaattgcaccccgggatcattgacgcaatcaagccgtttctagactactacgagcaggttgacggagtgtcttaccgcaaagccatcttcatctttctcagcaatgcaggcggggaccttataactaagacggctcttgacttttggcgggccggaagaaagagggaagacattcagctgaaggacctggaacctgtactgtctgtcggagtcttcaataataaacacagtggcctgtggcacagtggactgatcgacaaaaacctcattgattactttatccccttcctgcctttggagtacagacatgtgaaaatgtgtgtgagggccgagatgagggcccgtggttctgccatagatgaagacattgtcacaagagtggcagaggaaatgacgtttttccccagagacgagaaaatctactcagacaagggctgcaagactgtgcagtcgcggctggatttccactgagctcctatccagatggggtaggagacagctgggaggctccgcacgccagaggccttgcctttcagaagaaccctgaagaccgctttggggttttgcctgtttgcaccttagacttttgggtatagaatcttttttttgagaagaggtctcactccgtcatccaagctggagtgcagtggtgcaatcctcaactcactgcaacctccgctcccggtttgagtgattctcatgcctcagcctcccgagtagctgggattacaggcatgagccactgtgcccagctgggatatagaatctaagagttgattgtggaaaacacgtgaatctattgcgcgcatttgtcatttagcaagatggcagcagtccagctgttctttgcagctggagatgaacttttaaaaatccccttcacacttaatgtactgaccgagacagaagtacctgaaaacagctgtgcatggcaggcccggcaatagcttctgacccacagcacccgcgcctcagaagctacggtcacaactaaaggagtccagggacttgctgcaggctggggggcactgggtggttctcaccagcaggctgcggggcactgtgttctcattggccaaaaacatccttttgctctgtctcgttctttacacagagttcactgacttgaagtatactcagttaaaatcggggctggaggtgcagacggtgtctgaccggaggatgtggccgtgcccgccgagcactcttgatctgagctgacctgtgtgtgtgtgtgggggggggtggggccttcacctaagacctctgcagcagacctggacagacaggcccctcccgcctgtccatcgctctagctgctaatacagccctggctgtggaatccttcaccgtctcagctggtatcagccccagcctgccttgtgccatatctcagcttggatctctgctagagtccccccaaccatatatcatagagttgaatcacaatgagaccgttggctttgaatttgagtcgttggttcccatggtgagatgcttgttaagactttatacttgggtcaatctctcactttattttgtagaaccatttgaaatcctaggatgtgcttgttctggaaggatgacatgggcccagactgaacaagtcagcttgatgatcttaaatgatggaagtataggacgttgcttattttaaaacaagggaaggacacaaaatggaatgactgcttagtcctttctcagatactcttaaaacaattttttattgttaaatttgtggtaatacatggtcacaaccgtggatcaaacaaggtcagtctaaagtggcaggtcctaggtgtgacctgataccaccaccctttgtggcagcaccgggctggactgccctgatccctgggacgtgagacttagcttccagccagtgtgaatcattgtatctgtctcataatcacagcacagctgcagacacaacaacgtgcagcattttttacataaaaatatggtagaattaatttatgacatggaaatgccttacgtggtatcacacttagtcttgaaaaaaacaccaaggtgacgtttaaaatttttagtacatatcctcaaattggagctaagttatacttcttttataaccttttgggcatctggtcgagagaagacaagattttctctatttacagtgaggcaataaatatgtttgccacctttggactgccgttactgatttgtaacttgaaaaggctatggttgatcatgaccccgcctcccccacctcccttataagatgtggacgagagctttattgacctactgactataaaatagtaaattctagattttatcatgtgaaatgccacttgctaactttttctagtttatttggttccaaagttcagaatgaatttcagcagcacagctgtgagactcaccatatccgggacaggcgggtgggcagtcagcgcgatacagaagcaatatttaccttaaaggctcttccccagacaaatagaagttaaattagctgatggatatttcatcaaagagatggactttctcccaaaattaacgtgggaggaaattgaggtactggtaaagtaaaactcacctctgacagcctgaacctgagctcaggtgaggaaacctaaccattgaaactggtaaataaatcctggccgggtgcggtggctcaca

SEQ ID NO: 69292 - DNA, 2956 bp, Homo sapiens
  misc_feature (2895)..(2895): n is a, c, g, or t
  misc_feature (2917)..(2917): n is a, c, g, or t
  misc_feature (2940)..(2940): n is a, c, g, or t
cgtcctgccgcttggccgcggggcgcctggctcagtggcttctgcgggcttcgaggagcgggatgttgcgggctgggtggctccggggcgcggcggcgctggcgctgctgctggcggcccgagtggtggcggcgttcgagcccatcaccgtgggcctagccatcggggccgcgtcggccatcaccggctacctgtcctacaatgacatctactgccgcttcgccgagtgctgccgcgaggagcggccgctcaacgcttcggctctcaagctggatttggaggagaagctgtttggacagcatctagccacggaagtgattttcaaggcgctgactggcttcaggaacaacaaaaatcccaagaaaccactgaccctttccttacacggctgggctggcacaggcaagaattttgtcagtcaaattgtggctgaaaatcttcacccaaaaggtctgaagagtaactttgtccacctgtttgtatcgactctgcacttccctcatgagcagaagataaaactgtaccaggaccagttacagaagtggatccgcggtaatgtgagtgcatgtgcgaactctgttttcatatttgacgagatggataaattgcaccccgggatcattgacgcaatcaagccgtttctagactactacgagcaggttgacggagtgtcttaccgcaaagccatcttcatctttctcagcaatgcaggcggggaccttataactaagacggctcttgacttttggcgggccggaagaaagagggaagacattcagctgaaggacctggaacctgtactgtctgtcggagtcttcaataataaacacagtggcctgtggcacagtggactgatcgacaaaaacctcattgattactttatccccttcctgcctttggagtacagacatgtgaaaatgtgtgtgagggccgagatgagggcccgtggttctgccatagatgaagacattgtcacaagagtggcagaggaaatgacgtttttccccagagacgagaaaatctactcagacaagggctgcaagactgtgcagtcgcggctggatttccactgagctcctatccagatggggtaggagacagctgggaggctccgcacgccagaggccttgcctttcagaagaaccctgaagaccgctttggggttttgcctgtttgcaccttagacttttgggtatagaatcttttttttgagaagaggtctcactccgtcatccaagctggagtgcagtggtgcaatcctcaactcactgcaacctccgctcccggtttgagtgattctcatgcctcagcctcccgagtagctgggattacaggcatgagccactgtgcccagctgggatatagaatctaagagttgattgtggaaaacacgtgaatctattgcgcgcatttgtcatttagcaagatggcagcagtccagctgttctttgcagctggagatgaacttttaaaaatccccttcacacttaatgtactgaccgagacagaagtacctgaaaacagctgtgcatggcaggcccggcaatagcttctgacccacagcacccgcgcctcagaagctacggtcacaactaaaggagtccagggacttgctgcaggctggggggcactgggtggttctcaccagcaggctgcggggcactgtgttctcattggccaaaaacatccttttgctctgtctcgttctttacacagagttcactgacttgaagtatactcagttaaaatcggggctggaggtgcagacggtgtctgaccggaggatgtggccgtgcccgccgagcactcttgatctgagctgacctgtgtgtgtgtgtgggggggggtggggccttcacctaagacctctgcagcagacctggacagacaggcccctcccgcctgtccatcgctctagctgctaatacagccctggctgtggaatccttcaccgtctcagctggtatcagccccagcctgccttgtgccatatctcagcttggatctctgctagagtccccccaaccatatatcatagagttgaatcacaatgagaccgttggctttgaatttgagtcgttggttcccatggtgagatgcttgttaagactttatacttgggtcaatctctcactttattttgtagaaccatttgaaatcctaggatgtgcttgttctggaaggatgacatgggcccagactgaacaagtcagcttgatgatcttaaatgatggaagtataggacgttgcttattttaaaacaagggaaggacacaaaatggaatgactgcttagtcctttctcagatactcttaaaacaattttttattgttaaatttgtggtaatacatggtcacaaccgtggatcaaacaaggtcagtctaaagtggcaggtcctaggtgtgacctgataccaccaccctttgtggcagcaccgggctggactgccctgatccctgggacgtgagacttagcttccagccagtgtgaatcattgtatctgtctcataatcacagcacagctgcagacacaacaacgtgcagcattttttacataaaaatatggtagaattaatttatgacatggaaatgccttacgtggtatcacacttagtcttgaaaaaaacaccaaggtgacgtttaaaatttttagtacatatcctcaaattggagctaagttatacttcttttataaccttttgggcatctggtcgagagaagacaagattttctctatttacagtgaggcaataaatatgtttgccacctttgctcgtgcgaaatccgcacgaggaactagtctcgagttttttttttttttttttggtcaattataatttatttaagagcttgggcccagttttataatcttacaagaatgaagcagggaccaanggtaagtgcaacccttcctgcncactggggttcctgcgcttcaancctgggtggcaatttt

SEQ ID NO: 69293 - DNA, 2067 bp, Homo sapiens
cgtcctgccgcttggccgcggggcgcctggctcagtggcttctgcgggcttcgaggagcgggatgttgcgggctgggtggctccggggcgcggcggcgctggcgctgctgctggcggcccgagtggtggcggcgttcgagcccatcaccgtgggcctagccatcggggccgcgtcggccatcaccggctacctgtcctacaatgacatctactgccgcttcgccgagtgctgccgcgaggagcggccgctcaacgcttcggctctcaagctggatttggaggagaagctgtttggacagcatctagccacggaagtgattttcaaggcgctgactggcttcaggaacaacaaaaatcccaagaaaccactgaccctttccttacacggctgggctggcacaggcaagaattttgtcagtcaaattgtggctgaaaatcttcacccaaaaggtctgaagagtaactttgtccacctgtttgtatcgactctgcacttccctcatgagcagaagataaaactgtaccaggaccagttacagaagtggatccgcggtaatgtgagtgcatgtgcgaactctgttttcatatttgacgagatggataaattgcaccccgggatcattgacgcaatcaagccgtttctagactactacgagcaggttgacggagtgtcttaccgcaaagccatcttcatctttctcagcaatgcaggcggggaccttataactaagacggctcttgacttttggcgggccggaagaaagagggaagacattcagctgaaggacctggaacctgtactgtctgtcggagtcttcaataataaacacagtggcctgtggcacagtggactgatcgacaaaaacctcattgattactttatccccttcctgcctttggagtacagacatgtgaaaatgtgtgtgagggccgagatgagggcccgtggttctgccatagatgaagacattgtcacaagagtggcagaggaaatgacgtttttccccagagacgagaaaatctactcagacaagggctgcaagactgtgcagtcgcggctggatttccactgagctcctatccagatggggtaggagacagctgggaggctccgcacgccagaggccttgcctttcagaagaaccctgaagaccgctttggggttttgcctgtttgcaccttagacttttgggtatagaatcttttttttgagaagaggtctcactccgtcatccaagctggagtgcagtggtgcaatcctcaactcactgcaacctccgctcccggtttgagtgattctcatgcctcagcctcccgagtagctgggattacaggcatgagccactgtgcccagctgggatatagaatctaagagttgattgtggaaaacacgtgaatctattgcgcgcatttgtcatttagcaagatggcagcagtccagctgttctttgcagctggagatgaacttttaaaaatccccttcacacttaatgtactgaccgagacagaagtacctgaaaacagctgtgcatggcaggcccggcaatagcttctgacccacagcacccgcgcctcagaagctacggtcacaactaaaggagtccagggacttgctgcaggctggggggcactgggtggttctcaccagcaggctgcggggcactgtgttctcattggccaaaaacatccttttgctctgtctcgttctttacacagagttcactgacttgaagtatactcagttaaaatcggggctggaggtgcagacggtgtctgaccggaggatgtggccgtgcccgccgagcactcttgatctgagctgacctgtgtgtgtgtgtgggggggggtggggccttcacctaagacctctgcagcagacctggacagacaggcccctcccgcctgtccatcgctctagctgctaatacagccctggctgtggaatccttcaccgtctcagctggtatcagccccagcctgccttgtgccatatctcagcttggatctctgctagagtccccccaaccatatatcatagagttggggggactctagcagagatccagg

SEQ ID NO: 69294 - DNA, 427 bp, Homo sapiens
caggaagggtctggcttctcagagtcactcagcatttatagttcttaaacagtttcagtggaatgggggagttggaatgaagcccgttggcaagtcctgctgtaagggggagaatctctctttcataataactttgccaggacccctcccccacgaagggaccctttgtgctagtgcctcgcttccaactggaggcttgatgtgttgcgtgctgaacctgcaaacatctccacttcaggcattagctcatcaccttctgccttccccttcaggtcaagcaagggatgagagcctcgcttacgaacagacaaatatagaggaaaacgagggagtgctttctcatcttttcattcaggttgcagagtctcattcttctcagtcccagaattccagaagttttattgttaggaagaaagaagatgatatc

SEQ ID NO: 69295 - DNA, 1064 bp, Homo sapiens
tctcttttcctccttgctaagtacagttattaagtctggaaataatgtaagaggcaatcaagtgagaactacaaaaaatagaaagaggaaggcagactggctagggaccctagtacaggaaaaacaacacagtgacagagtctcttatgacccacacccaacagcaaacctggtctaggcccccactctcaacctagcaacataaggtgacacaggtaggcttattctttccccagattaaacaagagccctgccaacactaggcaagtctggtggctctagcaagggggaattgatttggaaccactggcaatcagtgaccagggagaagcattctccttccctcctgggcatgagactccccttccccactgacagacactgggtggccagtgtgcctggcaagggggatgtcctcacaaatgcctagcccagaaagtgatctttgttcctgtcacctggagactcctttctctcccctaaaggtaccagatgacccaacctgaggaagctctctttccccctactgtaaggcaccagtgtggactgtggactagtgggaacccaacgggcaccaaatgctagatgacgagttagtgggtgcagcgcaccagcatggcacatgtatacatatgtaactaacctgcacaatgtgcacatgtaccctaaaacttaaagtataattaaaaaataataataataatagtaataataaaaaaaaaagaaaaaaaaattcagacacacctaaatgattgtgaatgctttgaaaattgtcatccaaaccacagcccacaaaagtaggccaggacctgtgtgataaacctaaatggggatatgccttctaatggcaaagatttctgtaggacccagagtcttgtaagttatagtgaaaatattgaggataaaataaaaaatcacccatcataccaaaaccaagaaaatcacaacttgaataagaaaaaggaatgacaacactaagatgaatcagatttggaattatctggcaaggatttttaaagcaaacatcataaaaatgctctaacaaataattacaaagtatcttg

SEQ ID NO: 69296 - DNA, 645 bp, Homo sapiens
gtggtagctatttttaaatgtcttgatttttcctcaagatagtcccagcatttacaaccttatgtatcccccttaaagaaacacgcacaaaaaatgaaaagcttaggatacagtctacaccttgcttttttcagtgtcttggagatggctttctattagcctgtaagatctacctcatttttttcactgctttgtgatatccattgtatgaatgtaccataattcatacagtccccctgttgatgggcctctaggttcttttctgccttttgctattacaaacagtactgtgccaaatatccccgcacactgtccctggataaattgatgaaattaaatcgtaggtgcatttgttattttgatagaaattggaaatgtagttcccagtgtgtgtatgaaaatgttcattcccctgaatcctctgaaactattgtgttgtttctgatctcataaatgaaaaatgctctcatattttaatttgcattcaactatgagtgaaactgggtaccacagcccatgtttaaaagtcatttgtatttattttctgtgactggcttatttgcgttctttagcagtttttctgttcatccttttaataatcaatttgtacaaactataaagaaattatccttatctgctatatgt

SEQ ID NO: 69297 - DNA, 5611 bp, Homo sapiens
tcacaagagtaatgcaactccagtaccagaagtggcttctaaaagtacctctctagcttcgatacctggtgaagagatccagcagagcaaggaacccgaggactccacatctaatcaacagactcccgacagcattgacaaagatggtcctgaagaaccttgtgctgaaagtaaggcaatgccaaagtccgaaatcccttcaccacaaagccaactgttagaagatgctgaagctaatttggttggaagggaggcagcaaagcaacagaggaaagaacttgcaggtggtgatttcacctctcctgatgcttctgcatccagttgtggaaaagaagtacctgaagattcaaataattttgatggttcccatgtgtacatgcacagtgactataatgtgtatagggtgagatccaggtataattcagactggggagagacaggcactgagcaggatgaggaggaagatagtgatgagaacagttactatcagcctgatatggagtactcggaaattgttggattgccagaagaagaagaaatcccagcaaataggaaaattaagtttagtagtgctcctattaaggttttcaacacatactccaatgaagactatgacaggagaaatgacgaagttgaccctgtggctgcttcagctgagtatgaacttgaaaaacgtgtagaaaagctggaacttttcccagtggagctagagaaagatgaggatggtcttggtataagtattattggaatgggtgttggagcagatgctggacttgaaaagctgggaatattcgtcaagacagtaacagaaggtggtgctgctcaacgggatggcagaatacaagtcaatgaccagattgtggaagtggatggaatcagcttggtgggtgtgacacagaattttgcagcaacagttctcagaaacaccaagggcaacgtcagatttgttattgggcgggaaaaaccaggacaagtgagcgaggttgcccagttgataagccagacactggaacaggagaggcgccagagagagctgctggaacagcactatgcccagtatgatgccgacgatgacgagacaggagaatatgccacagatgaagaagaagatgaggtaggacctgtccttcctggcagcgacatggccattgaagtctttgagctgcctgagaatgaggacatgttttccccatcagaactggacacaagcaagctcagtcacaagttcaaagagttgcaaatcaaacatgcagttacagaagcagagattcaaaaattgaagaccaagctgcaggcagcagaaaatgagaaagtgaggtgggaactagaaaaaacccaactccaacaaaacatagaagagaataaggaaagaatgttgaagttggaaagctactggattgaggcccaaacattatgccacacagtgaatgagcatctcaaagagactcaaagccagtatcaggccttggaaaagaaatacaacaaggcaaagaagttgatcaaggattttcaacaaaaagagcttgatttcatcaaaagacaggaagcagaaagaaagaaaatagaagatttggaaaaagctcatcttgtggaagtgcaaggcctccaagtgcggattagagatttggaagctgaggtattcaggctactgaagcaaaatgggactcaagttaacaataataacaacatctttgagagaagaacatctcttggtgaagtctctaaaggggataccatggagaacttggatggcaagcagacatcttgccaagatggcctaagtcaagacttgaatgaagcagtcccagagacagagcgcctggattcaaaagcactgaaaactcgagcccagctctctgtgaagaacagacgccagagaccctctaggacaagactgtatgatagtgttagttccacagatggggaggacagtctagagagaaagaattttaccttcaatgatgacttcagtcccagcagtaccagttcagcagacctcagcggcttaggagcagaacctaaaacaccagggctctctcagtccttagcactgtcatcagatgagagcctggatatgatagatgacgagatccttgatgatggacagtctcccaaacacagtcagtgtcagaatcgggccgttcaggaatggagtgtgcagcaggtttctcactggttaatgagcctaaatctggagcagtatgtatctgaattcagtgcccaaaacatcactggagaacagctcctgcagttggatggaaataaacttaaggctcttggaatgacagcatcccaggaccgagcagtggtcaaaaagaaactcaaggaaatgaagatgtctctagagaaggctcggaaggcccaagagaaaatggaaaaacaaagagaaaagctaaggagaaaggagcaagagcaaatgcagaggaagtccaaaaagacagaaaagatgacgtcaactacagccgagggtgctggtgagcagtaacacataccctcttacagatgatggagatgctccaagagaagtccccacctcttcctgccctgctctcctccagaggatgaaaaagaaactaaatgataagggtaatgcggctctaggccggctgaggaactgtgtgttgaataactgcattttctgcaatagaatgcactcttaattttaactactaaaataatcccaagccacctttggttcattaacaaaccagagatttcatttaagtagctgtgttttgctcttctctaacttaccaacatcttgtgttgtgttgggtgtgttttgtcacttggagaactagtgtgaccccacccaagagcatgacacaccctggtgttgttaatggagcgccgtgaattttcagtgtgggatcctgaaatggcaattgcacatgtctgcatggcagagagcaccctgccatgagatctgagaccagtacttaacttctaggactgcaacacctactccaatgtgtgggaaagatttgctcttaattctcagtctggacagtgagaccaccccgctgtggaaacatgggtgctctgctctgtagttacctactaagggaaaaggcaagcaagtcattctgcttgctaggcatcaaaaagaaagaaaataaattatagctatttgttaaccactgaaaaaagcaaaagccttaagaatgtggatgtgggtattaccttggggttctgagggtaatatttatcctctagatacggctgaacaagaaagaaaaaaatcagacattaatgcagccatgggatattgggatctgttgaccttgctactgctgtgtgttcagcatttcagcaacactggcaaacacaacacagttcctcttccccctacctaacccaagaaattgaacaggaaattgatttttaaggaaaccaccattttcaggtttcctctcctggggaacattctggctggtcttcagcctgcctatgtcacaatcaggaactcatcacatattttctactcaagatttcccaggtgggctcagttagtattttaacaaatgtacttttaagaaaaatagaaataccagttagaggaaactgtcagttaacattttagagagattttgaatggtttttccgaaccattcctttccatacttcaaagattctcaattttacagaaaaagtttgtttaaggcagtgcataggtatactttagtagtggaggaacttatactaattttaagccagcattaaggatttccatgtttcaccaaactaagtcaagtgcaggagactggggcagaagaaggagaaaataaactcgttttgagaaatttcatgtgatgagggttttttgttttttatgctcatgtatctggttctctttgctgcgttgactctaaaaatgaggttatccactttccaaaggacaagtttcagaataagacttgaggccacatgaattcttggacagtattttacttcttttactttatgggaatctctgctctgttcccagcatctcgtatcttccactagaagtattccatatttagagcctcggcaaggcttttgagtgtaacagattaagggaactcccttgtagccccatcttgtattttaataacagtgtgatttttttttatctgaaaatctgaattcagaaattatctaaactggacatttttaattctgttttacccccaaggcctgttttcttttcattgccagagtattgtcggttatgcgtcagctcttttgtcattaggtacagacccttcattcaatcctcagaaacgttgacatgaagtaacattgtgttttacagttatcaaagtcaccattatgtttttctgtctgtcttcattaggggtatgataatgaaactgccgtattggatactctattaatgtcttgagatgtctggtgctttgttattttttcacatcatgagaaataagaagccactattaatgagtgatacaatttggcaaaacttttcaaatactaaaacactaaattagtaaaaatctggtaatattagtgcttgctattgtaaatttttgccatttttgcttatctttgggaaaaaagtgacctggatcacactggaagtttcactgtattcaagagtagaaatagaaggatgattatcttaagttatgtttacactttggtaatatttgaaaatggatgtatatactggaaatgtctgtaagtgtcttgtttttgcacctaatttatgatctattatattgcattttcttaaatatcttagaagtatttttctttataactttgtatattgaatgtttagataaatgtccaactgacaatgttataaatcaaattcttattcctaaaatcatttagtattataagtattttgattttttaagttaaattatagtaattttaggccgaagtgagttattttaacattaccacttaaaacggatgaaattgtaaaagtcatttggtttgattgccccacaaagcataagatgtaaactgattaagggtatgaaagcaaagtgaaagacctcagatcttgtgcacattttgttttcctattatttcttttattgactgtagtgcatgatacctaatcaaggctccaatgtcttgcacaattcctactttaatgctagtggttttcagtgtccttacaatttaacacagaattgttatttcatcaaccttaaaaactgcagtttttattatcagaaaatgaacaaaaagggaatatctggttgctatgaactgattccctaaaggagagctcagtatgattctaacaatagccaaaagtgttttggggtataggttatgctttgttgggagggaatgtgtggtgaggaggccaagctgcagacagaaagcattgtatgagctgtatctgggtcagggtttcccattaaaggatgttagttttataacagattactttgtttaagaccatctcccttcaagtaactcacagtttatgtaatactaatctcattctttttttacctgaatcaggaattttctgcagaatgttaagttagggaagaaacctcatttcatccattctaacactcctgatgaagtccccctttagtttcatgacaataaagctgttctgtggctatcatccttt

SEQ ID NO: 69298 - DNA, 2871 bp, Homo sapiens
agtataagaaaaccacatgtacgagtagtgaaaggagtatgaaataacttgaaaattgagtcatgtaacaacccaagagcatgacacaccctggtgttgttaatggagcgccgtgaattttcagtgtgggatcctgaaatggcaattgcacatgtctgcatggcagagagcaccctgccatgagatctgagaccagtacttaacttctaggactgcaacacctactccaatgtgtgggaaagatttgctcttaattctcagtctggacagtgagaccaccccgctgtggaaacatgggtgctctgctctgtagttacctactaagggaaaaggcaagcaagtcattctgcttgctaggcatcaaaaagaaagaaaataaattatagctatttgttaaccactgaaaaaagcaaaagccttaagaatgtggatgtgggtattaccttggggttctgagggtaatatttatcctctagatacggctgaacaagaaagaaaaaaatcagacattaatgcagccatgggatattgggatctgttgaccttgctactgctgtgtgttcagcatttcagcaacactggcaaacacaacacagttcctcttccccctacctaacccaagaaattgaacaggaaattgatttttaaggaaaccaccattttcaggtttcctctcctggggaacattctggctggtcttcagcctgcctatgtcacaatcaggaactcatcacatattttctactcaagatttcccaggtgggctcagttagtattttaacaaatgtacttttaagaaaaatagaaataccagttagaggaaactgtcagttaacattttagagagattttgaatggtttttccgaaccattcctttccatacttcaaagattctcaattttacagaaaaagtttgtttaaggcagtgcataggtatactttagtagtggaggaacttatactaattttaagccagcattaaggatttccatgtttcaccaaactaagtcaagtgcaggagactggggcagaagaaggagaaaataaactcgttttgagaaatttcatgtgatgagggttttttgttttttatgctcatgtatctggttctctttgctgcgttgactctaaaaatgaggttatccactttccaaaggacaagtttcagaataagacttgaggccacatgaattcttggacagtattttacttcttttactttatgggaatctctgctctgttcccagcatctcgtatcttccactagaagtattccatatttagagcctcggcaaggcttttgagtgtaacagattaagggaactcccttgtagccccatcttgtattttaataacagtgtgatttttttttatctgaaaatctgaattcagaaattatctaaactggacatttttaattctgttttacccccaaggcctgttttcttttcattgccagagtattgtcggttatgcgtcagctcttttgtcattaggtacagacccttcattcaatcctcagaaacgttgacatgaagtaacattgtgttttacagttatcaaagtcaccattatgtttttctgtctgtcttcattaggggtatgataatgaaactgccgtattggatactctattaatgtcttgagatgtctggtgctttgttattttttcacatcatgagaaataagaagccactattaatgagtgatacaatttggcaaaacttttcaaatactaaaacactaaattagtaaaaatctggtaatattagtgcttgctattgtaaatttttgccatttttgcttatctttgggaaaaaagtgacctggatcacactggaagtttcactgtattcaagagtagaaatagaaggatgattatcttaagttatgtttacactttggtaatatttgaaaatggatgtatatactggaaatgtctgtaagtgtcttgtttttgcacctaatttatgatctattatattgcattttcttaaatatcttagaagtatttttctttataactttgtatattgaatgtttagataaatgtccaactgacaatgttataaatcaaattcttattcctaaaatcatttagtattataagtattttgattttttaagttaaattatagtaattttaggccgaagtgagttattttaacattaccacttaaaacggatgaaattgtaaaagtcatttggtttgattgccccacaaagcataagatgtaaactgattaagggtatgaaagcaaagtgaaagacctcagatcttgtgcacattttgttttcctattatttcttttattgactgtagtgcatgatacctaatcaaggctccaatgtcttgcacaattcctactttaatgctagtggttttcagtgtccttacaatttaacacagaattgttatttcatcaaccttaaaaactgcagtttttattatcagaaaatgaacaaaaagggaatatctggttgctatgaactgattccctaaaggagagctcagtatgattctaacaatagccaaaagtgttttggggtataggttatgctttgttgggagggaatgtgtggtgaggaggccaagctgcagacagaaagcattgtatgagctgtatctgggtcagggtttcccattaaaggatgttagttttataacagattactttgtttaagaccatctcccttcaagtaactcacagtttatgtaatactaatctcattctttttttacctgaatcaggaattttctgcagaatgttaagttagggaagaaacctcatttcatccattctaacactcctgatgaagtccccctttagtttcatgacaataaagctgttctgtggctatcatccttt

SEQ ID NO: 69299 - DNA, 6259 bp, Homo sapiens
tcacaagagtaatgcaactccagtaccagaagtggcttctaaaagtacctctctagcttcgatacctggtgaagagatccagcagagcaaggaacccgaggactccacatctaatcaacagactcccgacagcattgacaaagatggtcctgaagaaccttgtgctgaaagtaaggcaatgccaaagtccgaaatcccttcaccacaaagccaactgttagaagatgctgaagctaatttggttggaagggaggcagcaaagcaacagaggaaagaacttgcaggtggtgatttcacctctcctgatgcttctgcatccagttgtggaaaagaagtacctgaagattcaaataattttgatggttcccatgtgtacatgcacagtgactataatgtgtatagggtgagatccaggtataattcagactggggagagacaggcactgagcaggatgaggaggaagatagtgatgagaacagttactatcagcctgatatggagtactcggaaattgttggattgccagaagaagaagaaatcccagcaaataggaaaattaagtttagtagtgctcctattaaggttttcaacacatactccaatgaagactatgacaggagaaatgacgaagttgaccctgtggctgcttcagctgagtatgaacttgaaaaacgtgtagaaaagctggaacttttcccagtggagctagagaaagatgaggatggtcttggtataagtattattggaatgggtgttggagcagatgctggacttgaaaagctgggaatattcgtcaagacagtaacagaaggtggtgctgctcaacgggatggcagaatacaagtcaatgaccagattgtggaagtggatggaatcagcttggtgggtgtgacacagaattttgcagcaacagttctcagaaacaccaagggcaacgtcagatttgttattgggcgggaaaaaccaggacaagtgagcgaggttgcccagttgataagccagacactggaacaggagaggcgccagagagagctgctggaacagcactatgcccagtatgatgccgacgatgacgagacaggagaatatgccacagatgaagaagaagatgaggtaggacctgtccttcctggcagcgacatggccattgaagtctttgagctgcctgagaatgaggacatgttttccccatcagaactggacacaagcaagctcagtcacaagttcaaagagttgcaaatcaaacatgcagttacagaagcagagattcaaaaattgaagaccaagctgcaggcagcagaaaatgagaaagtgaggtgggaactagaaaaaacccaactccaacaaaacatagaagagaataaggaaagaatgttgaagttggaaagctactggattgaggcccaaacattatgccacacagtgaatgagcatctcaaagagactcaaagccagtatcaggccttggaaaagaaatacaacaaggcaaagaagttgatcaaggattttcaacaaaaagagcttgatttcatcaaaagacaggaagcagaaagaaagaaaatagaagatttggaaaaagctcatcttgtggaagtgcaaggcctccaagtgcggattagagatttggaagctgaggtattcaggctactgaagcaaaatgggactcaagttaacaataataacaacatctttgagagaagaacatctcttggtgaagtctctaaaggggataccatggagaacttggatggcaagcagacatcttgccaagatggcctaagtcaagacttgaatgaagcagtcccagagacagagcgcctggattcaaaagcactgaaaactcgagcccagctctctgtgaagaacagacgccagagaccctctaggacaagactgtatgatagtgttagttccacagatggggaggacagtctagagagaaagccatcaaacagtttctataaccacatgcatattaccaaattacttccacctaagggtttgagaacgtcttctccagaatcagattctggtgttccacccctcaccccggtggatagcaatgtgcccttctcgtctgaccacatagctgaatttcaagaagaaccactggacccagaaatggggcctctctcctctatgtggggagacacttcactgttttctacttcaaagtctgatcatgatgtggaagaatctccttgccatcaccaaaccaccaacaagaaaatattacgagaaaaagatgatgccaaagatcccaaatcactaagggcatccagttcattggcggtgcaaggaggaaaaattaagcggaagtttgtggatctgggggcgcctttgcgaaggaattccaacaagggaaagaagtggaaagaaaaagaaaaagaagccagtaggttttctgcaggtagcaggatcttcagaggcagactggaaaactggacacccaagccatgttcaacagctcagacctccactcgttccccttgcatgcctttctcatggtttaatgacagccggaaaggatcctattccttcaggaacctgcctgcgcctacaagttcccttcagccttctcctgagactctaatttcagataaaaaggggtccaagaattttaccttcaatgatgacttcagtcccagcagtaccagttcagcagacctcagcggcttaggagcagaacctaaaacaccagggctctctcagtccttagcactgtcatcagatgagatccttgatgatggacagtctcccaaacacagtcagtgtcagaatcgggccgttcaggaatggagtgtgcagcaggtttctcactggttaatgagcctaaatctggagcagtatgtatctgaattcagtgcccaaaacatcactggagaacagctcctgcagttggatggaaataaacttaaggctcttggaatgacagcatcccaggaccgagcagtggtcaaaaagaaactcaaggaaatgaagatgtctctagagaaggctcggaaggcccaagagaaaatggaaaaacaaagagaaaagctaaggagaaaggagcaagagcaaatgcagaggaagtccaaaaagacagaaaagatgacgtcaactacagccgagggtgctggtgagcagtaacacataccctcttacagatgatggagatgctccaagagaagtccccacctcttcctgccctgctctcctccagaggatgaaaaagaaactaaatgataagggtaatgcggctctaggccggctgaggaactgtgtgttgaataactgcattttctgcaatagaatgcactcttaattttaactactaaaataatcccaagccacctttggttcattaacaaaccagagatttcatttaagtagctgtgttttgctcttctctaacttaccaacatcttgtgttgtgttgggtgtgttttgtcacttggagaactagtgtgaccccacccaagagcatgacacaccctggtgttgttaatggagcgccgtgaattttcagtgtgggatcctgaaatggcaattgcacatgtctgcatggcagagagcaccctgccatgagatctgagaccagtacttaacttctaggactgcaacacctactccaatgtgtgggaaagatttgctcttaattctcagtctggacagtgagaccaccccgctgtggaaacatgggtgctctgctctgtagttacctactaagggaaaaggcaagcaagtcattctgcttgctaggcatcaaaaagaaagaaaataaattatagctatttgttaaccactgaaaaaagcaaaagccttaagaatgtggatgtgggtattaccttggggttctgagggtaatatttatcctctagatacggctgaacaagaaagaaaaaaatcagacattaatgcagccatgggatattgggatctgttgaccttgctactgctgtgtgttcagcatttcagcaacactggcaaacacaacacagttcctcttccccctacctaacccaagaaattgaacaggaaattgatttttaaggaaaccaccattttcaggtttcctctcctggggaacattctggctggtcttcagcctgcctatgtcacaatcaggaactcatcacatattttctactcaagatttcccaggtgggctcagttagtattttaacaaatgtacttttaagaaaaatagaaataccagttagaggaaactgtcagttaacattttagagagattttgaatggtttttccgaaccattcctttccatacttcaaagattctcaattttacagaaaaagtttgtttaaggcagtgcataggtatactttagtagtggaggaacttatactaattttaagccagcattaaggatttccatgtttcaccaaactaagtcaagtgcaggagactggggcagaagaaggagaaaataaactcgttttgagaaatttcatgtgatgagggttttttgttttttatgctcatgtatctggttctctttgctgcgttgactctaaaaatgaggttatccactttccaaaggacaagtttcagaataagacttgaggccacatgaattcttggacagtattttacttcttttactttatgggaatctctgctctgttcccagcatctcgtatcttccactagaagtattccatatttagagcctcggcaaggcttttgagtgtaacagattaagggaactcccttgtagccccatcttgtattttaataacagtgtgatttttttttatctgaaaatctgaattcagaaattatctaaactggacatttttaattctgttttacccccaaggcctgttttcttttcattgccagagtattgtcggttatgcgtcagctcttttgtcattaggtacagacccttcattcaatcctcagaaacgttgacatgaagtaacattgtgttttacagttatcaaagtcaccattatgtttttctgtctgtcttcattaggggtatgataatgaaactgccgtattggatactctattaatgtcttgagatgtctggtgctttgttattttttcacatcatgagaaataagaagccactattaatgagtgatacaatttggcaaaacttttcaaatactaaaacactaaattagtaaaaatctggtaatattagtgcttgctattgtaaatttttgccatttttgcttatctttgggaaaaaagtgacctggatcacactggaagtttcactgtattcaagagtagaaatagaaggatgattatcttaagttatgtttacactttggtaatatttgaaaatggatgtatatactggaaatgtctgtaagtgtcttgtttttgcacctaatttatgatctattatattgcattttcttaaatatcttagaagtatttttctttataactttgtatattgaatgtttagataaatgtccaactgacaatgttataaatcaaattcttattcctaaaatcatttagtattataagtattttgattttttaagttaaattatagtaattttaggccgaagtgagttattttaacattaccacttaaaacggatgaaattgtaaaagtcatttggtttgattgccccacaaagcataagatgtaaactgattaagggtatgaaagcaaagtgaaagacctcagatcttgtgcacattttgttttcctattatttcttttattgactgtagtgcatgatacctaatcaaggctccaatgtcttgcacaattcctactttaatgctagtggttttcagtgtccttacaatttaacacagaattgttatttcatcaaccttaaaaactgcagtttttattatcagaaaatgaacaaaaagggaatatctggttgctatgaactgattccctaaaggagagctcagtatgattctaacaatagccaaaagtgttttggggtataggttatgctttgttgggagggaatgtgtggtgaggaggccaagctgcagacagaaagcattgtatgagctgtatctgggtcagggtttcccattaaaggatgttagttttataacagattactttgtttaagaccatctcccttcaagtaactcacagtttatgtaatactaatctcattctttttttacctgaatcaggaattttctgcagaatgttaagttagggaagaaacctcatttcatccattctaacactcctgatgaagtccccctttagtttcatgacaataaagctgttctgtggctatcatccttt

SEQ ID NO: 69300 - DNA, 6373 bp, Homo sapiens
tcacaagagtaatgcaactccagtaccagaagtggcttctaaaagtacctctctagcttcgatacctggtgaagagatccagcagagcaaggaacccgaggactccacatctaatcaacagactcccgacagcattgacaaagatggtcctgaagaaccttgtgctgaaagtaaggcaatgccaaagtccgaaatcccttcaccacaaagccaactgttagaagatgctgaagctaatttggttggaagggaggcagcaaagcaacagaggaaagaacttgcaggtggtgatttcacctctcctgatgcttctgcatccagttgtggaaaagaagtacctgaagattcaaataattttgatggttcccatgtgtacatgcacagtgactataatgtgtatagggtgagatccaggtataattcagactggggagagacaggcactgagcaggatgaggaggaagatagtgatgagaacagttactatcagcctgatatggagtactcggaaattgttggattgccagaagaagaagaaatcccagcaaataggaaaattaagtttagtagtgctcctattaaggttttcaacacatactccaatgaagactatgacaggagaaatgacgaagttgaccctgtggctgcttcagctgagtatgaacttgaaaaacgtgtagaaaagctggaacttttcccagtggagctagagaaagatgaggatggtcttggtataagtattattggaatgggtgttggagcagatgctggacttgaaaagctgggaatattcgtcaagacagtaacagaaggtggtgctgctcaacgggatggcagaatacaagtcaatgaccagattgtggaagtggatggaatcagcttggtgggtgtgacacagaattttgcagcaacagttctcagaaacaccaagggcaacgtcagatttgttattgggcgggaaaaaccaggacaagtgagcgaggttgcccagttgataagccagacactggaacaggagaggcgccagagagagctgctggaacagcactatgcccagtatgatgccgacgatgacgagacaggagaatatgccacagatgaagaagaagatgaggtaggacctgtccttcctggcagcgacatggccattgaagtctttgagctgcctgagaatgaggacatgttttccccatcagaactggacacaagcaagctcagtcacaagttcaaagagttgcaaatcaaacatgcagttacagaagcagagattcaaaaattgaagaccaagctgcaggcagcagaaaatgagaaagtgaggtgggaactagaaaaaacccaactccaacaaaacatagaagagaataaggaaagaatgttgaagttggaaagctactggattgaggcccaaacattatgccacacagtgaatgagcatctcaaagagactcaaagccagtatcaggccttggaaaagaaatacaacaaggcaaagaagttgatcaaggattttcaacaaaaagagcttgatttcatcaaaagacaggaagcagaaagaaagaaaatagaagatttggaaaaagctcatcttgtggaagtgcaaggcctccaagtgcggattagagatttggaagctgaggtattcaggctactgaagcaaaatgggactcaagttaacaataataacaacatctttgagagaagaacatctcttggtgaagtctctaaaggggataccatggagaacttggatggcaagcagacatcttgccaagatggcctaagtcaagacttgaatgaagcagtcccagagacagagcgcctggattcaaaagcactgaaaactcgagcccagctctctgtgaagaacagacgccagagaccctctaggacaagactgtatgatagtgttagttccacagatggggaggacagtctagagagaaagccatcaaacagtttctataaccacatgcatattaccaaattacttccacctaagggtttgagaacgtcttctccagaatcagattctggtgttccacccctcaccccggtggatagcaatgtgcccttctcgtctgaccacatagctgaatttcaagaagaaccactggacccagaaatggggcctctctcctctatgtggggagacacttcactgttttctacttcaaagtctgatcatgatgtggaagaatctccttgccatcaccaaaccaccaacaagaaaatattacgagaaaaagatgatgccaaagatcccaaatcactaagggcatccagttcattggcggtgcaaggaggaaaaattaagcggaagtttgtggatctgggggcgcctttgcgaaggaattccaacaagggaaagaagtggaaagaaaaagaaaaagaagccagtaggttttctgcaggtagcaggatcttcagaggcagactggaaaactggacacccaagccatgttcaacagctcagacctccactcgttccccttgcatgcctttctcatggtttaatgacagccggaaaggatcctattccttcaggaacctgcctgcgcctacaagttcccttcagccttctcctgagactctaatttcagataaaaaggggtccaaggtagaaaacacatggattacaaaagcaaacaagagaaacccaaatccctcctcttcttcaatctttggaaggcattctcaacttatgtctgtagtctggatccaagaaaccaataattttaccttcaatgatgacttcagtcccagcagtaccagttcagcagacctcagcggcttaggagcagaacctaaaacaccagggctctctcagtccttagcactgtcatcagatgagatccttgatgatggacagtctcccaaacacagtcagtgtcagaatcgggccgttcaggaatggagtgtgcagcaggtttctcactggttaatgagcctaaatctggagcagtatgtatctgaattcagtgcccaaaacatcactggagaacagctcctgcagttggatggaaataaacttaaggctcttggaatgacagcatcccaggaccgagcagtggtcaaaaagaaactcaaggaaatgaagatgtctctagagaaggctcggaaggcccaagagaaaatggaaaaacaaagagaaaagctaaggagaaaggagcaagagcaaatgcagaggaagtccaaaaagacagaaaagatgacgtcaactacagccgagggtgctggtgagcagtaacacataccctcttacagatgatggagatgctccaagagaagtccccacctcttcctgccctgctctcctccagaggatgaaaaagaaactaaatgataagggtaatgcggctctaggccggctgaggaactgtgtgttgaataactgcattttctgcaatagaatgcactcttaattttaactactaaaataatcccaagccacctttggttcattaacaaaccagagatttcatttaagtagctgtgttttgctcttctctaacttaccaacatcttgtgttgtgttgggtgtgttttgtcacttggagaactagtgtgaccccacccaagagcatgacacaccctggtgttgttaatggagcgccgtgaattttcagtgtgggatcctgaaatggcaattgcacatgtctgcatggcagagagcaccctgccatgagatctgagaccagtacttaacttctaggactgcaacacctactccaatgtgtgggaaagatttgctcttaattctcagtctggacagtgagaccaccccgctgtggaaacatgggtgctctgctctgtagttacctactaagggaaaaggcaagcaagtcattctgcttgctaggcatcaaaaagaaagaaaataaattatagctatttgttaaccactgaaaaaagcaaaagccttaagaatgtggatgtgggtattaccttggggttctgagggtaatatttatcctctagatacggctgaacaagaaagaaaaaaatcagacattaatgcagccatgggatattgggatctgttgaccttgctactgctgtgtgttcagcatttcagcaacactggcaaacacaacacagttcctcttccccctacctaacccaagaaattgaacaggaaattgatttttaaggaaaccaccattttcaggtttcctctcctggggaacattctggctggtcttcagcctgcctatgtcacaatcaggaactcatcacatattttctactcaagatttcccaggtgggctcagttagtattttaacaaatgtacttttaagaaaaatagaaataccagttagaggaaactgtcagttaacattttagagagattttgaatggtttttccgaaccattcctttccatacttcaaagattctcaattttacagaaaaagtttgtttaaggcagtgcataggtatactttagtagtggaggaacttatactaattttaagccagcattaaggatttccatgtttcaccaaactaagtcaagtgcaggagactggggcagaagaaggagaaaataaactcgttttgagaaatttcatgtgatgagggttttttgttttttatgctcatgtatctggttctctttgctgcgttgactctaaaaatgaggttatccactttccaaaggacaagtttcagaataagacttgaggccacatgaattcttggacagtattttacttcttttactttatgggaatctctgctctgttcccagcatctcgtatcttccactagaagtattccatatttagagcctcggcaaggcttttgagtgtaacagattaagggaactcccttgtagccccatcttgtattttaataacagtgtgatttttttttatctgaaaatctgaattcagaaattatctaaactggacatttttaattctgttttacccccaaggcctgttttcttttcattgccagagtattgtcggttatgcgtcagctcttttgtcattaggtacagacccttcattcaatcctcagaaacgttgacatgaagtaacattgtgttttacagttatcaaagtcaccattatgtttttctgtctgtcttcattaggggtatgataatgaaactgccgtattggatactctattaatgtcttgagatgtctggtgctttgttattttttcacatcatgagaaataagaagccactattaatgagtgatacaatttggcaaaacttttcaaatactaaaacactaaattagtaaaaatctggtaatattagtgcttgctattgtaaatttttgccatttttgcttatctttgggaaaaaagtgacctggatcacactggaagtttcactgtattcaagagtagaaatagaaggatgattatcttaagttatgtttacactttggtaatatttgaaaatggatgtatatactggaaatgtctgtaagtgtcttgtttttgcacctaatttatgatctattatattgcattttcttaaatatcttagaagtatttttctttataactttgtatattgaatgtttagataaatgtccaactgacaatgttataaatcaaattcttattcctaaaatcatttagtattataagtattttgattttttaagttaaattatagtaattttaggccgaagtgagttattttaacattaccacttaaaacggatgaaattgtaaaagtcatttggtttgattgccccacaaagcataagatgtaaactgattaagggtatgaaagcaaagtgaaagacctcagatcttgtgcacattttgttttcctattatttcttttattgactgtagtgcatgatacctaatcaaggctccaatgtcttgcacaattcctactttaatgctagtggttttcagtgtccttacaatttaacacagaattgttatttcatcaaccttaaaaactgcagtttttattatcagaaaatgaacaaaaagggaatatctggttgctatgaactgattccctaaaggagagctcagtatgattctaacaatagccaaaagtgttttggggtataggttatgctttgttgggagggaatgtgtggtgaggaggccaagctgcagacagaaagcattgtatgagctgtatctgggtcagggtttcccattaaaggatgttagttttataacagattactttgtttaagaccatctcccttcaagtaactcacagtttatgtaatactaatctcattctttttttacctgaatcaggaattttctgcagaatgttaagttagggaagaaacctcatttcatccattctaacactcctgatgaagtccccctttagtttcatgacaataaagctgttctgtggctatcatccttt

SEQ ID NO: 69301 - DNA, 6319 bp, Homo sapiens
tcacaagagtaatgcaactccagtaccagaagtggcttctaaaagtacctctctagcttcgatacctggtgaagagatccagcagagcaaggaacccgaggactccacatctaatcaacagactcccgacagcattgacaaagatggtcctgaagaaccttgtgctgaaagtaaggcaatgccaaagtccgaaatcccttcaccacaaagccaactgttagaagatgctgaagctaatttggttggaagggaggcagcaaagcaacagaggaaagaacttgcaggtggtgatttcacctctcctgatgcttctgcatccagttgtggaaaagaagtacctgaagattcaaataattttgatggttcccatgtgtacatgcacagtgactataatgtgtatagggtgagatccaggtataattcagactggggagagacaggcactgagcaggatgaggaggaagatagtgatgagaacagttactatcagcctgatatggagtactcggaaattgttggattgccagaagaagaagaaatcccagcaaataggaaaattaagtttagtagtgctcctattaaggttttcaacacatactccaatgaagactatgacaggagaaatgacgaagttgaccctgtggctgcttcagctgagtatgaacttgaaaaacgtgtagaaaagctggaacttttcccagtggagctagagaaagatgaggatggtcttggtataagtattattggaatgggtgttggagcagatgctggacttgaaaagctgggaatattcgtcaagacagtaacagaaggtggtgctgctcaacgggatggcagaatacaagtcaatgaccagattgtggaagtggatggaatcagcttggtgggtgtgacacagaattttgcagcaacagttctcagaaacaccaagggcaacgtcagatttgttattgggcgggaaaaaccaggacaagtgagcgaggttgcccagttgataagccagacactggaacaggagaggcgccagagagagctgctggaacagcactatgcccagtatgatgccgacgatgacgagacaggagaatatgccacagatgaagaagaagatgaggtaggacctgtccttcctggcagcgacatggccattgaagtctttgagctgcctgagaatgaggacatgttttccccatcagaactggacacaagcaagctcagtcacaagttcaaagagttgcaaatcaaacatgcagttacagaagcagagattcaaaaattgaagaccaagctgcaggcagcagaaaatgagaaagtgaggtgggaactagaaaaaacccaactccaacaaaacatagaagagaataaggaaagaatgttgaagttggaaagctactggattgaggcccaaacattatgccacacagtgaatgagcatctcaaagagactcaaagccagtatcaggccttggaaaagaaatacaacaaggcaaagaagttgatcaaggattttcaacaaaaagagcttgatttcatcaaaagacaggaagcagaaagaaagaaaatagaagatttggaaaaagctcatcttgtggaagtgcaaggcctccaagtgcggattagagatttggaagctgaggtattcaggctactgaagcaaaatgggactcaagttaacaataataacaacatctttgagagaagaacatctcttggtgaagtctctaaaggggataccatggagaacttggatggcaagcagacatcttgccaagatggcctaagtcaagacttgaatgaagcagtcccagagacagagcgcctggattcaaaagcactgaaaactcgagcccagctctctgtgaagaacagacgccagagaccctctaggacaagactgtatgatagtgttagttccacagatggggaggacagtctagagagaaagccatcaaacagtttctataaccacatgcatattaccaaattacttccacctaagggtttgagaacgtcttctccagaatcagattctggtgttccacccctcaccccggtggatagcaatgtgcccttctcgtctgaccacatagctgaatttcaagaagaaccactggacccagaaatggggcctctctcctctatgtggggagacacttcactgttttctacttcaaagtctgatcatgatgtggaagaatctccttgccatcaccaaaccaccaacaagaaaatattacgagaaaaagatgatgccaaagatcccaaatcactaagggcatccagttcattggcggtgcaaggaggaaaaattaagcggaagtttgtggatctgggggcgcctttgcgaaggaattccaacaagggaaagaagtggaaagaaaaagaaaaagaagccagtaggttttctgcaggtagcaggatcttcagaggcagactggaaaactggacacccaagccatgttcaacagctcagacctccactcgttccccttgcatgcctttctcatggtttaatgacagccggaaaggatcctattccttcaggaacctgcctgcgcctacaagttcccttcagccttctcctgagactctaatttcagataaaaaggggtccaaggtagaaaacacatggattacaaaagcaaacaagagaaacccaaatccctcctcttcttcaatctttggaaggcattctcaacttatgtctgtagtctggatccaagaaaccaataattttaccttcaatgatgacttcagtcccagcagtaccagttcagcagacctcagcggcttaggagcagaacctaaaacaccagggctctctcagtccttagcactgtcatcagatgagatccttgatgatggacagtctcccaaacacagtcagtgtcagaatcgggccgttcaggaatggagtgtgcagcaggtttctcactggttaatgagcctaaatctggagcagtatgtatctgaattcagtgcccaaaacatcactggagaacagctcctgcagttggatggaaataaacttaaggctcttggaatgacagcatcccaggaccgagcagtggtcaaaaagaaactcaaggaaatgaagatgtctctagagaaggctcggaaggcccaagagaaaatggaaaaacaaagagaaaagctaaggagaaaggagcaagagcaaatgcagaggaagtccaaaaagacagaaaagatgacgtcaactacagccgagggtgctggtgagcagtaacacataccctcttacagatgatggagatgctccaagagaagtccccacctcttcctgccctgctctcctccagaggatgaaaaagaaactaaatgataagggtaatgcggctctaggccggctgaggaactgtgtgttgaataactgcattttctgcaatagaatgcactcttaattttaactacttagctgtgttttgctcttctctaacttaccaacatcttgtgttgtgttgggtgtgttttgtcacttggagaactagtgtgaccccacccaagagcatgacacaccctggtgttgttaatggagcgccgtgaattttcagtgtgggatcctgaaatggcaattgcacatgtctgcatggcagagagcaccctgccatgagatctgagaccagtacttaacttctaggactgcaacacctactccaatgtgtgggaaagatttgctcttaattctcagtctggacagtgagaccaccccgctgtggaaacatgggtgctctgctctgtagttacctactaagggaaaaggcaagcaagtcattctgcttgctaggcatcaaaaagaaagaaaataaattatagctatttgttaaccactgaaaaaagcaaaagccttaagaatgtggatgtgggtattaccttggggttctgagggtaatatttatcctctagatacggctgaacaagaaagaaaaaaatcagacattaatgcagccatgggatattgggatctgttgaccttgctactgctgtgtgttcagcatttcagcaacactggcaaacacaacacagttcctcttccccctacctaacccaagaaattgaacaggaaattgatttttaaggaaaccaccattttcaggtttcctctcctggggaacattctggctggtcttcagcctgcctatgtcacaatcaggaactcatcacatattttctactcaagatttcccaggtgggctcagttagtattttaacaaatgtacttttaagaaaaatagaaataccagttagaggaaactgtcagttaacattttagagagattttgaatggtttttccgaaccattcctttccatacttcaaagattctcaattttacagaaaaagtttgtttaaggcagtgcataggtatactttagtagtggaggaacttatactaattttaagccagcattaaggatttccatgtttcaccaaactaagtcaagtgcaggagactggggcagaagaaggagaaaataaactcgttttgagaaatttcatgtgatgagggttttttgttttttatgctcatgtatctggttctctttgctgcgttgactctaaaaatgaggttatccactttccaaaggacaagtttcagaataagacttgaggccacatgaattcttggacagtattttacttcttttactttatgggaatctctgctctgttcccagcatctcgtatcttccactagaagtattccatatttagagcctcggcaaggcttttgagtgtaacagattaagggaactcccttgtagccccatcttgtattttaataacagtgtgatttttttttatctgaaaatctgaattcagaaattatctaaactggacatttttaattctgttttacccccaaggcctgttttcttttcattgccagagtattgtcggttatgcgtcagctcttttgtcattaggtacagacccttcattcaatcctcagaaacgttgacatgaagtaacattgtgttttacagttatcaaagtcaccattatgtttttctgtctgtcttcattaggggtatgataatgaaactgccgtattggatactctattaatgtcttgagatgtctggtgctttgttattttttcacatcatgagaaataagaagccactattaatgagtgatacaatttggcaaaacttttcaaatactaaaacactaaattagtaaaaatctggtaatattagtgcttgctattgtaaatttttgccatttttgcttatctttgggaaaaaagtgacctggatcacactggaagtttcactgtattcaagagtagaaatagaaggatgattatcttaagttatgtttacactttggtaatatttgaaaatggatgtatatactggaaatgtctgtaagtgtcttgtttttgcacctaatttatgatctattatattgcattttcttaaatatcttagaagtatttttctttataactttgtatattgaatgtttagataaatgtccaactgacaatgttataaatcaaattcttattcctaaaatcatttagtattataagtattttgattttttaagttaaattatagtaattttaggccgaagtgagttattttaacattaccacttaaaacggatgaaattgtaaaagtcatttggtttgattgccccacaaagcataagatgtaaactgattaagggtatgaaagcaaagtgaaagacctcagatcttgtgcacattttgttttcctattatttcttttattgactgtagtgcatgatacctaatcaaggctccaatgtcttgcacaattcctactttaatgctagtggttttcagtgtccttacaatttaacacagaattgttatttcatcaaccttaaaaactgcagtttttattatcagaaaatgaacaaaaagggaatatctggttgctatgaactgattccctaaaggagagctcagtatgattctaacaatagccaaaagtgttttggggtataggttatgctttgttgggagggaatgtgtggtgaggaggccaagctgcagacagaaagcattgtatgagctgtatctgggtcagggtttcccattaaaggatgttagttttataacagattactttgtttaagaccatctcccttcaagtaactcacagtttatgtaatactaatctcattctttttttacctgaatcaggaattttctgcagaatgttaagttagggaagaaacctcatttcatccattctaacactcctgatgaagtccccctttagtttcatgacaataaagctgttctgtggctatcatccttt

SEQ ID NO: 69302 - DNA, 393 bp, Homo sapiens
aagtagaattgtgccctttttccattcattcacccattaattactcatttggaaagcatttaattaatgagctttagggtatactttgcaagggacttcaaagaacaaaagaaaaaataaagggtagcccccagtgtgttggtttttagcaaatgtaactagttcttcctctgttcttacctcttcaatgtttgaattagtttacgaacttggatatatggtatgttaacaccatcagagggctcattggttttcaaattcagtttgtgtgtgtgtttctttcttaggctcttggaatgacagcatcccaggaccgagcagtggtcaaaaagaaactcaaggaaatgaagatgtctctagagaaggctcggaaggcccaagagaaaatggaaa

SEQ ID NO: 69303 - DNA, 350 bp, Homo sapiens
gatcttcagaggcagactggaaaactggacacccaagccatgttcaacagctcagacctccactcgttccccttgcatgcctttctcatggtttaatgacagccggaaaggatcctattccttcaggaacctgcctgcgcctacaagttcccttcagccttctcctgagactctaatttcagataaaaaggggtccaaggtagaaaacacatggattacaaaagcaaacaagagaaacccaaatccctcctcttcttcaatctttggaaggcattctcaacttatgtctgtagtctggatccaagaaaccaatgtaataacactgcaataaacaatgcatggtatttctt

SEQ ID NO: 69304 - DNA, 3250 bp, Homo sapiens
  misc_feature (907)..(907): n is a, c, g, or t
  misc_feature (1462)..(1462): n is a, c, g, or t
gtaagaatagacaaccatagaatcaaaagtgtaatttacttcattcttttactgctccgttcatgctgagtattttgttttgtatattccttctcatgacaacaatgccaaaagaaaaactatgcttggaatgaacttgttaccatggtaatctcaaaattaaagtttcaaagtgttcaaatgttgccctcaaaaaaaaatcacaaataaaaatctactcagttttgtaaggtggatggcataacccttgttgcagcatgtacataatgacattcacctatcttgaactttagagagagtccaaatgtttctggtgtactgaaattctgtttagttcagttgaaataaatgggttataactatgcaattgctacagtatttgctgaaatgaaataccatgtcaatatataaagagaagctcattttcatcaagcaaagtagacatcaaaaaaactattttatatagcattgcttagacaaccaaattaaacaagtaatttttgtagatttaattatgtatgtcataactagagtatgccaactttctgtctcaataatcacattttaaaaatatattgattaaggaaaaaaagaagtctcatttgccagtgaacctttggatatttattaagataatttatggctttaatccaatttttaaaaatctttcatctatcttaaagtggcttcaagattttaaactctttcctgtggcttttatctttaattttatcctgtagtgaattgtaaaagtaatgaacaagggcaattggatgactcctcttacatatacactcaggaaagctctcagtcatctatatatccaaatttgtgtaaaatatatttgttattatattcattattataatattattatatttattttataaagtcacatatattaagntagaagcatttctgtttaaaaattatcaggcagtgacagtaggaaaacttgtaggcaagctaattaacaactagatccttcctatcattcaaggttttcacggatgctctcagtatttaaattatacattaatattgttaggcactgaataatcatctattctgaagttggaatttttgtttgtatcgtagattccattaaactttagtttttaatttttttttattattatactttaagttttagggtacatgtgcacattgtgcaggttagttacatatgtatacatgtgccatgctggtgtgctgcacccactaacttgtcatctagcattaggtgtatctcccaatgctatccctcccccctcccccgaccccacaacagtccccagagtgtgatgttccccttcctgtgtccatgtgatctcattgttcaattcccacctatgagtgagaatatgcggtgtttggttttttgttcttgcgatagtttactgagaatgatggtttccaatttcatccatgtccctacaaaggacatgaactcatcgttttntatggctgcatagtattccatggtgtatatgtgccacattttcttaatccagtctattattgttggacatttgggttggttccaagtctttgctattgtgaataatgccgcaatggttcaggatagagcttaacttctgcttgtgaaattttagtttagaatttttgttttattagattttttcaacattttaataaaaatgtataggcaaatgaaatcatgtaaagaatatgttgctcttttctataatatagtatgggaagctgtcacttctaaccaactacttttgtggtaagaaaacaaagagtaacactgaaaacacaatatgtgtttcagtaaaaattttcctatttgctcaataattcaatatttattatcatatttcatggtaatacatttctggaagtttatttaaaaatttatatttaaacaattaatttgtagtctgctccaaggaagtttcaaaaacatatgtgtattatgttttactgtttcattatcatctgttcattttcatccaaaagatatttttcttgtgattgggagacaccggatatcataatcaacatacaagttttatgcttttgataatatttgaaaagtgttttaacattgtagtttatagcaaatgacttaataattgatcctcaagtaagtgaagtggaaggttactcaatactaatggtagtaggcaatatagaatggatgtttggtagatacaacttgtgctccacaaactctcaattgcaagaaatgtttcatcattcatttttcttaaaatcaaatttcatctgattctggacgcttatcctagtgagttccctggaaattccatctaccattattgtaccacccttccctttctcccacctttccctcctgcccatttcagcctctaaaatttccagggatctaatgaagacacttgaggacttccactggtactgacttcactttggctgccatggatgagtagcagtgcttctgctgctattttgccctcctcctgggcatggaaatttttctcagaacttgattcagacacattcgtgtaccatgcagctatttccctatttcctgccctctcctactgtcagtgtgagttcctcaggcctacatcgccctctgcctccttccttttgaaaagtcttgccagctgtctagtccaagctcataatttatctctttctcttacctctccccaaactcccagccccgtttctgccagggctagtattgcttctcaatactattgcttcaggcttttataaaagaaaaaacatttaatatcccaaaaatcatataatgcagttactagttttatctctcttttatgaatgaggaaattgagggcagggcagatggagtagcatgcccaaggctacaaagctagaaagtgtcagaacccagatgtgaacacagcctagcaccagggagatccagttaccttgttgaatgggggaaaacaaatattagaataacatgcggtggctcatacctgtaatcccagcattttgggaggccaaggcgggtgggtcacctgaggtcaggagtttgagaccagcctcgccaacatggtgaaagcttatctctagtaaaaatccaaaaattagccaggacatggtggctcgtgcctgtaatctgagctactcgggaggctgaggcatgggagtctaagacagaagaatagaagaattgcttaaacccgggaggcagaggctgcaatgagctgagatcgtgccactgcactccagcctgggcaacaggctttttctgtgagactgcgtt

SEQ ID NO: 69305 - DNA, 243 bp, Homo sapiens
ttttttgagatggagtctcggtctgtcacccaggctggagtgcagtggcgcaatctcggctcactgcaagctctgcctgccgggttcactccattctcccacctcagcctcccgactacttgtgaggctgaggttggaggatcttatgagcctgggaagccaaggcctcagtgagcggtgattgcactaccgcactccagcctgggcaactgagcaagaccctgcctcaaaaatacaaaagac

SEQ ID NO: 69306 - DNA, 176 bp, Homo sapiens
ctattccagtggtctatatgctgcccttaggcctgtaccacactattttgattactgtggcttcgtagtaagttttgaaatcaaaaaggctgagtcctccagctttgctcttttttatgattgttttgactatttggagccccttgcaattccatttgaatttgaggattaacttt

SEQ ID NO: 69307 - DNA, 387 bp, Homo sapiens
cccagcccctaccccaaagacttaatataatcaacctttcttactcacctccccttccccaccacggtgatctgtttaggaatggacacatgacccatctgtgaccaatgagagtgaatttcaggatttattctctctttctctataaggatgtgaggtctggaacagctgcagccattttgccaccatgggaaacctgggacatctgaactgactccatgaagcctgaagagaaagctaataagaaggcagagagaagaggaagagtcttggtctttggaaatatcttttggagctgctggatcaagtatcacttgaaggtagaactaaatctgcactttaaatttacatatccaataaaaagttctttatgttgtaaaaaaaaat

SEQ ID NO: 69308 - DNA, 537 bp, Homo sapiens
gggaatcaggtcgagttctacactctccttcttggtacacatcctcagaatgcaggaagtgcctgtgcttgctgtgagtctttgtggacagaggcaggatcatgctggctagaatctagtggacaagggcagcacattccccctgttcccaggtgggtccagagatgtcgcctgggagccagggcctggagttctgttactgtggctgagcttgcacccaagctacaagatgacatcctactcttccctcacctttctacaagtagaggagtctcttctcatggccaccattgtcccaggatgtgaggtctggaacagctgcagccattttgccaccatgggaaacctgggacatctgaactgactccatgaagcctgaagagaaagctaataagaaggcagagagaagaggaagagtcttggtctttggaaatatcttttggagctgctggatcaagtatcacttgaaggtagaactaaatctgcactttaaatttacatatccaataaaaagttctttatgttgtaaaaaaaaat

SEQ ID NO: 69309 - DNA, 2794 bp, Homo sapiens
  misc_feature (1416)..(1416): n is a, c, g, or t
  misc_feature (1421)..(1421): n is a, c, g, or t
  misc_feature (1423)..(1424): n is a, c, g, or t
  misc_feature (2794)..(2794): n is a, c, g, or t
gctgggatatttaaaaagcatgatccttgcccatattcaaaacctactaggggagcccaaaaaataaagagactgtgaagatacagtatgaaattgctgcagtagagatagccacactcttgtggaagcatagtggagggtacctaagccagagagaggaagggcaggaggaactttctgcaggaagcaatgttgtatagggaaagggaaatgagactgagctgaccaggccatgctttctagcacgaggagggttgcaatgggtagcaaaagagataggtgttttatgaggaggaagcagtgtcccaaaggtgaagggtccagagggaacttggtgcatttagagaatcttatgtacagacctctggataagcgtcaaggatgggcgaggtgatattgtgatattgcagcagtgggctggagccaggtgggagagggctaagccctcccaatgtgcacatgtcagcctgtgggcagtggggagccatggaagaattctgatgaggtgacatctgtgtttttgaaaggtcattctagctcggtgtgggaagtaggtgggcatgcagcaagaccagatataagaaaaccacttaggaaatcagtatattaatttaggtgagaaggcccagagcctagattgaggtagtagcagtgagatggacagttggagattcacaggagtgctgtaactgaagattcgcagaagtgctgtgactgctcgagcaacatgccagggacactcttgctttagggcctacttcgctcaaaaaggccctctttagggccttgctttagatatgaacgtttgtgtctccccagaatttatatattgaaatcctaactcctaaagtgatggtattaggaggtggggcctttgggaggggcttagtaccttaacaagaacaacaacaacctagagacaccctcaggctcccccaacttttctaacacttgcacgtgaggttacagtgagaagacggccatctattaggaagcatgccctcaccagataccgaatctgccagcatcttgatcttggacttcccagcctccagaactgtgagaaataaatttttgttgttttgaagctacccagccaatggcattttgttatagcagcccaaatggattaagacaggccctctataccagctattgccttgacccaaagtgatttgtccccagatatctgtgtgagtccctccctcacctcaagtcttggctccagtgccatcttctcattgaagcatatcctgaccaccatgtttaacactgcacactccacctccccaccaacacacacgtcgattcttatcacccttttcatgctctatttttccctgtctcgtttattcactttctaatatactctgtaaatttaattattcttatgttcatgatccttctcccctgctngaatntnngctccatgagggcaggagtgtttttgttttactttgtccactcttatatcccaagctctagaataatgccaggaacataatagccactcagctaacgcttgttaaataactggatgggtgatggaattgaagatgaaagaagaggcatggatgatgccaaattttcttccagcttgggcagatgaatggggaggggagggacataatttatcacaacagggactaagcaagaggaacaagaagtggggaaggtgatgagttctgcttgaaacatttgtcaggcaataagatcgagagtctgaagatagaaatgggagaccagaggaatagcaagaaagatttggggtggtagagagtaggggctgactaaggaccatgaaaaggtgttctgagcggtctgagggcccagccacatacagtcaaccattatgaatatgtactggctggtggcagggcttctctccagcagaaaacaacagtgaggttagagaaggcacatgatttgattagatgttgaagatttacaaggcgagcagaggaaagacaaaggaggtagtatgctgaagatgaaaacagtatcttcaagtttatcctgcctaaggaaggagggatatcataaatgggataaatggcagggatgtaacagagaaactgagggaatggagattaggatgaggccaaacagcgtgtgttctgagagtcagggtgagtgttgaagggatggaaagaggcaggcaattatctttccttcatcagacaacagatttttactggacacagtattagggttctccagagaaacagaaccactaggatgtaagtatacatacatagaaaggtatgttttaaggaattggcccatgcagttatggaggctggcaagtccagaatctgcagtttgatcccaaaggctgcctgctggcagagttccctcctgcttgcgggaggtcagtcctttgttctactcaggccttcacctgattggatgaggcccacccacattaggaagagtaatctacttcactcaaaatctaccagtgtgaacagcagtctcatccaaaaacatcctcacagaaacatctggaataatgtttgatcacatatctgggcactgtgatctagctgagtagacacattaaccatcccttagcccagtagggtgactactgtgtagttaacaacagtatattgtatatttcaaaatagctagaggagaagacttgaaatgttctcaacacagagaaatgataaatgtttgaggtgatggatattctaaacttgattgttacaaattctatacatgtatcaaaatatcacacgtaccataagtatgcacaaatattatgtatcaataaacaaaatggacattn

SEQ ID NO: 69310 - DNA, 358 bp, Homo sapiens
catcactaaaataataataccttcctcacacgatgggcgtaagtaccaaatgagagaacgaatttactgtgtcgcaactagcaatcatctggtaaacactctttccctcccctgccttccctagtctctcaccacctcgctgttcccaccttcagcacttgcccaggcttcagcacttcccttgtgcaatggtaatacaagtcaagaattctagaatgccagagtcagaaaggtcttccgaggccaagcatggtggctcatgcccataatctcagcactttgggaggccaaggcaggaggaccccttcaggccaggagtttgagaccagcctggtgaacatagtaagaccatatctct

SEQ ID NO: 69311 - DNA, 270 bp, Homo sapiens
aaatgttggggtaataatacctacctcttagggctagtagaaccttcaggtgaaaaacaatttgagtacctacaaaatgccagtgtcaggcattggtaatagcaaatgactaagacccagccctattctcaaggaacaaaattctagaactaggatattctagttattctgaaattttcttaagcaaactttgataatggctgcctaggtcaaaattcaggggcttcagttaggacacagtgggggaaaagtgctgggattgattagtga

SEQ ID NO: 69312 - DNA, 2317 bp, Homo sapiens
  misc_feature (1)..(2): n is a, c, g, or t
  misc_feature (7)..(8): n is a, c, g, or t
nncaganngcctccacagatatcaaaagaaacctgaagagcctacaaaaaaaaaaagagataaagacaaaattcaagaaaacacacacatacataattgtggtcacctggagcctgggggccggcccagctctctcaggattcagcagacattggaggtggcagtgaaggatacagtggtagtcaatgttatttgagcagggtcagcaggccctggagcttcctgagtgcacaatgcagaaggctgcttactatgaaaacccaggactgtttggaggctatggctacagcaaaactacggacacttacggctacagcaccccccaccagccctacccaccccctgctgctgccagctccctggacactgactatccaggttctgcctgctccatccagagctctgcccctctgagagccccagcccacaaaggagctgaactcaatggcagctgcatgcggccgggcactgggaacagccagggtgggggtggtggcagccagcctcctggtctgaactcagagcagcagccaccacaaccccctcctccaccaccgaccctgcccccatcttcacccaccaatcctggaggtggagtgcctgccaagaagcccaaaggtgggcccaatgcttctagctcctcagccaccatcagcaagcagatcttcccctggatgaaagagtctcgacagaactccaagcagaagaacagctgtgccactgcaggagagagctgcgaggacaagagcccgccaggcccagcatccaagcgggtacgcacggcatacacgagcgcgcagctggtggaattggaaaaggaattccacttcaaccgctacttgtgccggccgcgccgcgtggagatggccaacctgctgaatctcacggaacgccagatcaagatctggttccagaaccggcgcatgaagtacaagaaggaccagaaggccaagggcatcctgcactcgccggctagccagtcccctgagcgcagcccaccgctcggcggcgccgctggccacgtggcctactccggccagctgccgccagtgcccggcctggcctacgacgcgccctcgccgcctgctttcgccaaatcacagcccaatatgtacggcctggccgcctacacggcgccactcagcagctgcctgccacaacagaagcgctacgcagcgccggagttcgagccccatcccatggcgagcaacggcggcggcttcgccagcgccaacctgcagggcagcccggtgtacgtgggcggcaacttcgtcgagtccatggcgcccgcgtccgggcctgtcttcaacctgggccacctctcgcacccgtcgtcggccagcgtggactacagttgcgccgcgcagattccaggcaaccaccaccatggaccttgcgaccctcatcccacctacacagatctctcggcccaccactcgtctcagggacgactgccggaggctcccaaactgacgcatctgtagcggccgccgccagcccgaactcgcggcaaaattacctctcttgctgtagtggtggggtagagggtggggcccgcggggcagttcgggaacccccttccccgctcttgccctgccgccgcctcccgggtctcaggcctccagcggcggaggcgcaggcgaccgggcctcccctccatgggcgtcctttgggtgactcgccataaatcagccgcaaggatccttccctgtaaatttgacagtgccacatactgcggaccaagggactccaatctggtaatggtgtcccaaaggtaagtctgagacccatcggcggcgcgccctgcagagggaccagagcttggagagtcttgggcctggcccgcgtctagcttagtttcagagaccttaatttatattctccttcctgtgccgtaaggattgcatcggactaaactatctgtatttattatttgaagcgagtcatttcgttccctgattatttatccttgtctgaatgtatttatgtgtatatttgtagatttatccagccgagcttaggaattcgcttccaggccgtgggggccacatttcacctccttagtccccctggtctgaactagttgagagagtagttttgaacagtcgtaaccgtggctggtgtttgtagttgacataaaggattaagaccgcaaattgtccttcatgggtagagtcaggaagcccggtggcgtggcacaacacactttggtcatttctcaaaaaccacagtcctcaccacagtttattgatttcaaattgtctggtactattggaacaaatatttagaataaaaaaatttcccagtcagaactgta

SEQ ID NO: 69313 - DNA, 2248 bp, Homo sapiens
ggcacgaggcacacacaattatgtatgtgtgtgtcacctggagcctgggggccggcccagctctctcaggattcagcagacattggaggtggcagtgaaggatacagtggtagtcaatgttatttgagcagggtcagcaggccctggagcttcctgagtgcacaatgcagaaggctgcttactatgaaaacccaggactgtttggaggctatggctacagcaaaactacggacacttacggctacagcaccccccaccagccctacccaccccctgctgctgccagctccctggacactgactatccaggttctgcctgctccatccagagctctgcccctctgagagccccagcccacaaaggagctgaactcaatggcagctgcatgcggccgggcactgggaacagccagggtgggggtggtggcagccagcctcctggtctgaactcagagcagcagccaccacaaccccctcctccaccaccgaccctgcccccatcttcacccaccaatcctggaggtggagtgcctgccaagaagcccaaaggtgggcccaatgcttctagctcctcagccaccatcagcaagcagatcttcccctggatgaaagagtctcgacagaactccaagcagaagaacagctgtgccactgcaggagagagctgcgaggacaagagcccgccaggcccagcatccaagcgggtacgcacggcatacacgagcgcgcagctggtggaattggaaaaggaattccacttcaaccgctacttgtgccggccgcgccgcgtggagatggccaacctgctgaatctcacggaacgccagatcaagatctggttccagaaccggcgcatgaagtacaagaaggaccagaaggccaagggcatcctgcactcgccggctagccagtcccctgagcgcagcccaccgctcggcggcgccgctggccacgtggcctactccggccagctgccgccagtgcccggcctggcctacgacgcgccctcgccgcctgctttcgccaaatcacagcccaatatgtacggcctggccgcctacacggcgccactcagcagctgcctgccacaacagaagcgctacgcagcgccggagttcgagccccatcccatggcgagcaacggcggcggcttcgccagcgccaacctgcagggcagcccggtgtacgtgggcggcaacttcgtcgagtccatggcgcccgcgtccgggcctgtcttcaacctgggccacctctcgcacccgtcgtcggccagcgtggactacagttgcgccgcgcagattccaggcaaccaccaccatggaccttgcgaccctcatcccacctacacagatctctcggcccaccactcgtctcagggacgactgccggaggctcccaaactgacgcatctgtagcggccgccgccagcccgaactcgcggcaaaattacctctcttgctgtagtggtggggtagagggtggggcccgcggggcagttcgggaacccccttccccgctcttgccctgccgccgcctcccgggtctcaggcctccagcggcggaggcgcaggcgaccgggcctcccctccatgggcgtcctttgggtgactcgccataaatcagccgcaaggatccttccctgtaaatttgacagtgccacatactgcggaccaagggactccaatctggtaatggtgtcccaaaggtaagtctgagacccatcggcggcgcgccctgcagagggaccagagcttggagagtcttgggcctggcccgcgtctagcttagtttcagagaccttaatttatattctccttcctgtgccgtaaggattgcatcggactaaactatctgtatttattatttgaagcgagtcatttcgttccctgattatttatccttgtctgaatgtatttatgtgtatatttgtagatttatccagccgagcttaggaattcgcttccaggccgtgggggccacatttcacctccttagtccccctggtctgaactagttgagagagtagttttgaacagtcgtaaccgtggctggtgtttgtagttgacataaaggattaagaccgcaaattgtccttcatgggtagagtcaggaagcccggtggcgtggcacaacacactttggtcatttctcaaaaaccacagtcctcaccacagtttattgatttcaaattgtctggtactattggaacaaatatttagaataaaaaaatttcccagtcagaactgta

SEQ ID NO: 69314 - DNA, 506 bp, Homo sapiens
agtttgaggctgcaatgagctgtgattgtgccactgcacaccagcttgggtgacagagcgagaccctgtcttgaaaaaagaaatcaaatgggtcaaagtcccaaatctttaatattgcatgatattactcatataaaatatttggaataggaaaattcacagagacaagaaagtaggttagagtttactgaggatgggatggggggcagtggggagtaattgcttactgtgcacattttctgtttaaggggacataaaactttggaaatgatagtagacatgggtacacattgtgaatgtcattaatgccactgaattttacatctgaaatggttaaaagtggtgtatgttatgttacatatattttaccacaataaaaaaataaaaatttggctgggcgcagtggcttacaccttaatcccagcactttgggaggctgagacaggcagatcatttgaggtcaggagcttgagaccagcctggccaacatggtgaaatgccatctc

SEQ ID NO: 69315 - DNA, 1298 bp, Homo sapiens
  misc_feature (44)..(44): n is a, c, g, or t
  misc_feature (47)..(47): n is a, c, g, or t
  misc_feature (51)..(51): n is a, c, g, or t
  misc_feature (54)..(54): n is a, c, g, or t
  misc_feature (57)..(57): n is a, c, g, or t
  misc_feature (62)..(62): n is a, c, g, or t
  misc_feature (88)..(88): n is a, c, g, or t
  misc_feature (97)..(99): n is a, c, g, or t
  misc_feature (115)..(115): n is a, c, g, or t
tgcggacacccgatcggcatagcgcactacagcccagaactccnggnccangcnatnctccngcctcagcctcccgagtagctgggantacaggcgnnngccaccgcgcccggcnagtattttcccttttgccatgtaatgcaacctactcgtgggtgcccaggattgagattggatgtctttgggaaccattactcggcccatcacatctgagtatgttgaagtcaccgaggatcaaggagacagcactgctggagagggcgatagtgaaccaggaactacaagagtcaggactgagaggaacggcctggggcccacagggaatggctgcaatgaggggagtggggcctgaatctgatgacagctttgggggcttaggaaggaaggaggcagaaaggtctgagaaccacagtgaggagtgaggatgccaccccacctctgggccaagggtacaaggtccctgtgcaaactcccccatgtgggaggactttggaagggaccacatcctctggcagacacagacatcgctggagctgtgaggtccaggaacatcctgagacaggatgtggaggttttgctgatcatgggctgagaattccaaggggcacagcgggaagacttctggatttgggaatggggtatggggagacaaaataggggtgtgcagagccttgtggggatgtgaatgcagggtgtttgggggacccagtgtgactgacacaaacagggaaaaggcatgatgagctcagtcctggtggactcaaggcagatgatggtgctgaggctgtgggagacgagggaggaggctcaggggtggctttcacctgggctctgtccatggaggtgaggacagtgagatagttgggcctcagtgctgtgtggaccctttcttgtctccctgatgactggatggagggcctggaggaagaggggtcttagaggattcactcatgtccctgggggagggggactcactccaggtctcaggtctgcactgacacatttgtttgtggcttggggctgcctgctataaactattgggggttcgtccattttggagttataacctaaggcagaaactcagatggttcaaatgtcctcttcatgaagcaatgttatcagcgtataatttagattgtcttgcaagagtctcatttgttgtttttctaaatgcctgccaatattgtttgaaaatctacaaatgtgataaatgtatcttcaaagttaactggttgcaggttgtttaaccttatatgtacagtttcacatatgtataaaaacagtagtttgggcctctt

SEQ ID NO: 69316 - DNA, 1434 bp, Homo sapiens
  misc_feature (44)..(44): n is a, c, g, or t
  misc_feature (47)..(47): n is a, c, g, or t
  misc_feature (51)..(51): n is a, c, g, or t
  misc_feature (54)..(54): n is a, c, g, or t
  misc_feature (57)..(57): n is a, c, g, or t
  misc_feature (62)..(62): n is a, c, g, or t
  misc_feature (88)..(88): n is a, c, g, or t
  misc_feature (97)..(99): n is a, c, g, or t
  misc_feature (115)..(115): n is a, c, g, or t
tgcggacacccgatcggcatagcgcactacagcccagaactccnggnccangcnatnctccngcctcagcctcccgagtagctgggantacaggcgnnngccaccgcgcccggcnagttttttttgtatttttagtagagacggggtttcaccgtgttagccaggatggtctcggtctcctgacctcgtgatccgcccgcctcggcctcccaaagtgctgggattacaggcgtgagccaccgcgcccggccagtattttcccttttgccatgtaatgcaacctactcgtgggtgcccaggattgagattggatgtctttgggaaccattactcggcccatcacatctgagtatgttgaagtcaccgaggatcaaggagacagcactgctggagagggcgatagtgaaccaggaactacaagagtcaggactgagaggaacggcctggggcccacagggaatggctgcaatgaggggagtggggcctgaatctgatgacagctttgggggcttaggaaggaaggaggcagaaaggtctgagaaccacagtgaggagtgaggatgccaccccacctctgggccaagggtacaaggtccctgtgcaaactcccccatgtgggaggactttggaagggaccacatcctctggcagacacagacatcgctggagctgtgaggtccaggaacatcctgagacaggatgtggaggttttgctgatcatgggctgagaattccaaggggcacagcgggaagacttctggatttgggaatggggtatggggagacaaaataggggtgtgcagagccttgtggggatgtgaatgcagggtgtttgggggacccagtgtgactgacacaaacagggaaaaggcatgatgagctcagtcctggtggactcaaggcagatgatggtgctgaggctgtgggagacgagggaggaggctcaggggtggctttcacctgggctctgtccatggaggtgaggacagtgagatagttgggcctcagtgctgtgtggaccctttcttgtctccctgatgactggatggagggcctggaggaagaggggtcttagaggattcactcatgtccctgggggagggggactcactccaggtctcaggtctgcactgacacatttgtttgtggcttggggctgcctgctataaactattgggggttcgtccattttggagttataacctaaggcagaaactcagatggttcaaatgtcctcttcatgaagcaatgttatcagcgtataatttagattgtcttgcaagagtctcatttgttgtttttctaaatgcctgccaatattgtttgaaaatctacaaatgtgataaatgtatcttcaaagttaactggttgcaggttgtttaaccttatatgtacagtttcacatatgtataaaaacagtagtttgggcctctt

SEQ ID NO: 69317 - DNA, 420 bp, Homo sapiens
ctcaggggtggctttcacctgggctctgtccatggaggtgaggacagtgagatagttgggcctcagtgctgtgtggaccctttcttgtctccctgatgactggatggagggcctggaggaagaggggtcttagaggattcactcatgtccctgggggagggggactcactccaggtctcaggtctgcactgacacatttgtttgtggcttggggctgcctgctataaactattgggggttcgtccattttggagttataacctaaggcagaaactcagatggttcaaatgtcctcttcatgaagcaatgttatcagcgtataatttagattgtcttgcaagagtctcatttgttgtttttctaaatgcctgccaatattgtttgaaaatctacaaatgtgataaatgtatcttcaaagtt

SEQ ID NO: 69318 - DNA, 388 bp, Homo sapiens
tgcttggaacctctgacctcccccttctgcggtgtctcctctgccttcctcctctgcagcatctgactccagccagagcagcttctctgcttttaatggcttgtgagatttgatcgggcccacacagatagtccaaaataatcttgcaattttaaggtccttaatcttcatcacatcagtattttcccttttgccatgtaatgcaacctactcgtgggtgcccaggattgagattggatgtctttgggaaccattactcggcccatcacatctgagtatgttgaagtcaccgaggatcaaggagacagcactgctggagagggcgatagtgaaccaggaactacaagagtcaggactgagaggaacggcctggggcccacagggaatg

SEQ ID NO: 69319 - DNA, 394 bp, Homo sapiens
gctcaccatctgggcttctgggaggatgggaaatcatttgtgtcagagtggctccaagattgttcagaactggcatacagaggattatcagagagagaaattttgcagtctcttggggctgtctttgaagaaggtgtttataacacattttgctgactgcttccataaatcccaagagcactgataatttttcatcagaaaacaagaagtgaaaatgaagcaatttggctgtgagaacatccttgaatttctactggtcgcttctaattgtaacttggctataactacatttttatcctttgcgttagagtatgaagaaaaacacatccttaagctttagaacagagcaatgtctaaaaacatcctgaagttcagagggcaaggagaattctct

SEQ ID NO: 69320 - DNA, 920 bp, Homo sapiens
gtcgaccactgtaacctctgctgcctgggttcaagccattctcctgcctcagcctcccaagtagctgggattacaggtgcctgccgtcgcgtctggctaagtttagtatttttagtagagacgaggtttcaccatgttggccaggctgatctcgaactcctgacctcatgatccacccaccttggcctcccaaaatgctgggattataggcgtgacatctgtgcccggacatatacatgacttttaaaatttgaatttatttctccataaataggatgcttatactattatttatctagtattgatttgtatttttatatcttataccttatggcttatcacttgctttagtacctctgttatattcttgaaagtatcaactttactcaaaatagtataatttaaagccatttctcaaggaaaatattaaatataattaaatttaattataatatttaataattacatattatatttaaagtattataattaagagtttcatataaaacgtccttttatatcacataaaaatggatgtcctattgaaaggagaaaaattctcttgtcccccttgtagggcatgcgatggggtgtggcttggactcgcttcttcggtgccctgctcctcaaaacccctaggggtggctgggctccgtagcttatgcctgtaatcccagcactttgggaggctgagctgggcagatcgcttgaggtcaggagctcgagaccagcctggccaagatggtgaaaccctgtctctactataaataccagaattagctgggcgtggtggcacacgcctgtatcccagctactcaggaagctgatgcaggagaattgcctgaacctgggaggtggaggttgcagtgagctgagatcacaccactgcactccagccttggtcgacgcggccgcgaatg

SEQ ID NO: 69321 - DNA, 412 bp, Homo sapiens
aacttattaaatatttgttaaatgaatgaattaaatcccatttgactgctaaggaaattgaaactcaaagagatcaagtgattgatttaaggctccactttccagtagggactcacatctgatttttcccattccagactgactctgatataatatcttacatactatttgttactctttctccaagatcttagaaaggtcttttgattctctaagaaaagataataggacaatgcaaatgcgtggatacaccatcaaaggggtggctgagggctgtctacctctttgtatagttctttcctaggttcctgactccgctaaaaactcatatccttaaagatatgactatttagatacattccttgttggagataagaacacaagttcattgctgaatcatggtgtatatata

SEQ ID NO: 69322 - DNA, 347 bp, Homo sapiens
aaaaaagtagaggggaaggcaaaaaaacgtgaaattcacagctcgcggttaaatgccaagttctctaccgagagcatttcttgtctcgtttcttctaacgttcattgtggatgtgcgagaggtggttcgcgccctagcaggctcttgggtccacagggcagtggcagtcaagacgtgtaaggcgcactcagaaagtagtacttcatattgctcgtgctcttcgttttttcttttttctcttttttttttttttttgagacagagtttcgctcttgtcgcccagtctggagtgcaatggcgcgatctcggctcactgcaacttctgcctccttctgcctccgggttca

SEQ ID NO: 69323 - DNA, 558 bp, Homo sapiens
aattttggaggttggggtgcaatctttagaatatgcctttttaactttaaacatgttttagaattcacctaaagatcaaaatatcatggattgaacctcatcaattgatagcagtgagtgactgaagcttccaaatcaagaaaagccggcaccaagaacttccattctaatctagagctgaccagtttgagctgattctctctttgaagagtccttcttgattgcagtgcagtactggcatttctgaatggatgtaagtggagtattttagtctaaaggcttttcaaattacttgaatttttttaaaaattgaggagctttatttctatttacccttccatttttgtatatcaaatttccattgtcattaaaaactgtatcttgaaactttgtgaactgacttgctgtatttgcactttgagctcttgaaataaatgtgatttttgtgtgattatctggtttccagttttaaacattaactgtcaccttttattcttaaacttgaaagtacagaaatcattaaattattaagttgtacaataaagggattggtttctt

SEQ ID NO: 69324 - DNA, 843 bp, Homo sapiens
ccggctccacccccaagccaggcgaggcaggttccgaggttggaacacctggcgagtcctcggtgtcggtggccggcagtcatctcgcggccgttcagaattataaggctgtctgcagagatttgaaaaatggcaacaaatgaaagtgtcagcatctttagttcagcatccttggctgtggaatatgtagattcacttttacctgagaatcctctgcaagaaccatttaaaaatgcttggaactatatgttgaataattatacaaagttccagattgcaacatggggatcccttatagttcatgaagccctttatttcttattctgtttacctggatttttatttcaatttataccttatatgaaaaaatacaaaattcaaaaggtgagtataagggactagaaatagaatattatcattaatgttgctgaatattttaaaagtacatagggctttgttttgtgaggctaaagcagtgatatccaatagaaatatgaagccacgtatgtaattttaaattttctagtagaatacatagaaaaggtaaaaagaaataaggcaaattaatttcataatgtgtgtcatttagctcaataaatgtaaactatcgctgggtgcagggtccatgcctgtaattccagcactttgggaggccaaggcaggaggattgcttgaggccaggagttcaagaccatcctgggaaacatagcaagaccctgtctctacaaaaaagatacaaaaatacccaggcatggtgatgtaagtcctagctacttatgaggctgaagcagaaagattgcagcactatactctagcataggcgacagagtgagaccttgtctc

SEQ ID NO: 69325 - DNA, 773 bp, Homo sapiens
tggatgaagcccaccctcattatgaagggtaatcacctttactcagtctactgatttaaatgttaacaacatctaaaaaataccttcacaacaacatctagactggtatttaatcaaacagttggatatcatagcctagccaagttgacacataaaattgaccatcacaatagctaagaaattaagaatttcttatctgtttgtcttaggctccatttggaatggaagctgaatatgcacatcctttggagactctaattcttggaactggatttttcattggaatcgtgcttttgtgtgatcatgtaattcttctttgggcatgggtgaccattcgtttattagaaactattgatgtccataggtgagtattaatttctgttcaggtataaagcataatgaaatatatttattttcatggccataagattatcatatttctaaggagactaataggagaagttaatcttcttaatgttatattaagaaaacataactgttggataaaagtttaaataatagatgtttttacattctagcctatgctgttataatttttatagtgataatgtgttattagggcaagtatatattcaggaccagcaatttccttatccttctgtaataaacctaaacctaactcatatttgaaaaaaatatcaaagcattcagccttccttgaataagactttctaatctctactgttcagcactgataaaggcacttgcaagatgaaactactacttgtaacacatacatatttcaaatgcat

SEQ ID NO: 69326 - DNA, 434 bp, Homo sapiens
ccaaacaaaagcacgattccaatgaaaaatccagttccaagaattagagtctccaaaggatgtgcatattcagctgcctttgatttgtggaacctattattttacagagtatttcaatattccttatgattgggaaagaatgccaagatggtattttcttttggcaagatgctttggttgtgcagtcattgaagatacttggcactattttctgcatagactcttacaccacaaaagaatatacaagtatattcataaagttcatcatgagtttcaggctccatttggaattacaaccccacgatcacaagaagattcccacccctgcctcccatgcctggtcccaagacagtgagacagtctggaaagtgatgtcagaatagcttccaataaagcagcctcattctgaggcctgagtgatcgtggggtagtaa

SEQ ID NO: 69327 - DNA, 2242 bp, Homo sapiens
ccggctccacccccaagccaggcgaggcaggttccgaggttggaacacctggcgagtcctcggtgtcggtggccggcagtcatctcgcggccgttcagaattataaggctgtctgcagagatttgaaaaatggcaacaaatgaaagtgtcagcatctttagttcagcatccttggctgtggaatatgtagattcacttttacctgagaatcctctgcaagaaccatttaaaaatgcttggaactatatgttgaataattatacaaagttccagattgcaacatggggatcccttatagttcatgaagccctttatttcttattctgtttacctggatttttatttcaatttataccttatatgaaaaaatacaaaattcaaaaggataagccagagacatgggaaaaccaatggaagtgtttcaaagttcttctctttaatcacttctgtatccagctgcctttgatttgtggaacctattattttacagagtatttcaatattccttatgattgggaaagaatgccaagatggtattttcttttggcaagatgctttggttgtgcagtcattgaagatacttggcactattttctgcatagactcttacaccacaaaagaatatacaagtatattcataaagttcatcatgagtttcaggctccatttggaatggaagctgaatatgcacatcctttggagactctaattcttggaactggatttttcattggaatcgtgcttttgtgtgatcatgtaattcttctttgggcatgggtgaccattcgtttattagaaactattgatgtccatagtggttatgatattcctctcaaccctttaaatctgatccctttctatgctggttctcggcatcatgatttccaccacatgaacttcattggaaactatgcttcaacatttacatggtgggatcgaatttttggaacagactctcagtataatgcctataatgaaaagaggaagaagtttgagaaaaagactgaataaatatctcacgtaaaccttcctgaaagataaacgttttcctgaattcagaaactagtagctaacattgcttctggagagcagaaataagcatgtcttctggctactaagtgataaaaagaacattaacaacctttaattaccttcctagtgggaactttttctactttacctacaagttctatatatgtagaaatgaataaatatatatttaagtacagttttcatgaggaagttttaaaagaccatgttcctaagcttccaagaaggttttggatactagaagtattaatctatggcttttctcccagtaaaaccataggcctgaagttcacattgggtctttaaatcttttagatatatactggtcatttcagaaaattcttcatagtggtattggccttatatttaactttttttttattttttttttgagacaaagccacactctgtctccttggctggagtgtggtggcacagtctcagctcactgcaacctctgcctcccagttcaagcaattcttctgcctcagcctcccaagtagctgggattacaggcacccgccaccacgcccagctaatttttgtatttttgtagagatggggtttcacgatgttggccaggctggtctcaaacttctgacctcaagtgatctgcccaccttggcctcccaaagtgctgggattacaggtgtaagccactgcgcccggcctttttaactttaaacatgttttagaattcacctaaagatcaaaatatcatggattgaacctcatcaattgatagcagtgagtgactgaagcttccaaatcaagaaaagccggcaccaagaacttccattctaatctagagctgaccagtttgagctgattctctctttgaagagtccttcttgattgcagtgcagtactggcatttctgaatggatgtaagtggagtattttagtctaaaggcttttcaaattacttgaatttttttaaaaattgaggagctttatttctatttacccttccatttttgtatatcaaatttccattgtcattaaaaactgtatcttgaaactttgtgaactgacttgctgtatttgcactttgagctcttgaaataaatgtgatttttgtgtgattatctggtttccagttttaaacattaactgtcaccttttattcttaaacttgaaagtacagaaatcattaaattattaagttgtacaataaagggattggtttctt

SEQ ID NO: 69328 - DNA, 2138 bp, Homo sapiens
ccggctccacccccaagccaggcgaggcaggttccgaggttggaacacctggcgagtcctcggtgtcggtggccggcagtcatctcgcggccgttcagaattataaggctgtctgcagagatttgaaaaatggcaacaaatgaaagtgtcagcatctttagttcagcatccttggctgtggaatatgtagattcacttttacctgagaatcctctgcaagaaccatttaaaaatgcttggaactatatgttgaataattatacaaagttccagattgcaacatggggatcccttatagttcatgaagccctttatttcttattctgtttacctggatttttatttcaatttataccttatatgaaaaaatacaaaattcaaaaggataagccagagacatgggaaaaccaatggaagtgtttcaaagttcttctctttaatcacttctgtatccagctgcctttgatttgtggaacctattattttacagagtatttcaatattccttatgattgggaaagaatgccaagatggtattttcttttggcaagatgctttggttgtgcagtcattgaagatacttggcactattttctgcatagactcttacaccacaaaagaatatacaagtatattcataaagttcatcatgagtttcaggctccatttggaatggaagctgaatatgcacatcctttggagactctaattcttggaactggatttttcattggaatcgtgcttttgtgtgatcatgtaattcttctttgggcatgggtgaccattcgtttattagaaactattgatgtccatagtggttatgatattcctctcaaccctttaaatctgatccctttctatgctggttctcggcatcatgatttccaccacatgaacttcattggaaactatgcttcaacatttacatggtgggatcgaatttttggaacagactctcagtataatgcctataatgaaaagaggaagaagtttgagaaaaagactgaataaatatctcacgtaaaccttcctgaaagataaacgttttcctgaattcagaaactagtagctaacattgcttctggagagcagaaataagcatgtcttctggctactaagtgataaaaagaacattaacaacctttaattaccttcctagtgggaactttttctactttacctacaagttctatatatgtagaaatgaataaatatatatttaagtacagttttcatgaggaagttttaaaagaccatgttcctaagcttccaagaaggttttggatactagaagtattaatctatggcttttctcccagtaaaaccataggcctgaagttcacattgggtctttaaatcttttagatatatactggtcatttcagaaaattcttcatagtggtattggccttatatttaactttttttttattttttttttgagacaaagccacactctgtctccttggctggagtgtggtggcacagtctcagctcactgcaacctctgcctcccagttcaagcaattcttctgcctcagcctcccaagtagctgggattacaggcacccgccaccacgcccagctaatttttgtatttttgtagagatggggtttcacgatgttggccaggctggtctcaaacttctgacctcaagtgatctgcccaccttggcctcccaaagtgctgggattacaggtgtaagccactgcgcccggcctttttaactttaaacatgttttagaattcacctaaagatcaaaatatcatggattgaacctcatcaattgatagcagtgagtgactgaagcttccaaatcaagaaaagccggcaccaagaacttccattctaatctagagctgaccagtttgagctgattctctctttgaagagtccttcttgattgcagtgcagtactggcatttctgaatggatgtaagtggagtattttagtctaaaggcttttcaaattacttgaatttttttaaaaattgaggagctttatttctatttacccttccatttttgtatatcaaatttccattgtcattaaaaactgtatcttgaaactttgtgaactgacttgctgtatttgcactttgagctcttgaaataaatgtgatttttgtgtgatta

SEQ ID NO: 69329 - DNA, 1125 bp, Homo sapiens
ccggctccacccccaagccaggcgaggcaggttccgaggttggaacacctggcgagtcctcggtgtcggtggccggcagtcatctcgcggccgttcagaattataaggctgtctgcagagatttgaaaaatggcaacaaatgaaagtgtcagcatctttagttcagcatccttggctgtggaatatgtagattcacttttacctgagaatcctctgcaagaaccatttaaaaatgcttggaactatatgttgaataattatacaaagttccagattgcaacatggggatcccttatagttcatgaagccctttatttcttattctgtttacctggatttttatttcaatttataccttatatgaaaaaatacaaaattcaaaaggataagccagagacatgggaaaaccaatggaagtgtttcaaagttcttctctttaatcacttctgtatccagctgcctttgatttgtggaacctattattttacagagtatttcaatattccttatgattgggaaagaatgccaagatggtattttcttttggcaagatgctttggttgtgcagtcattgaagatacttggcactattttctgcatagactcttacaccacaaaagaatatacaagtatattcataaagttcatcatgagtttcaggctccatttggaatggaagctgaatatgcacatcctttggagactctaattcttggaactggatttttcattggaatcgtgcttttgtgtgatcatgtaattcttctttgggcatgggtgaccattcgtttattagaaactattgatgtccatagtggttatgatattcctctcaaccctttaaatctgatccctttctatgctggttctcggcatcatgatttccaccacatgaacttcattggaaactatgcttcaacatttacatggtgggatcgaatttttggaacagactctcagtataatgcctataatgaaaagaggaagaagtttgagaaaaagactgaataaatatctcacgtaaaccttcctcttttcagtataatgcctataatgaaaagaggaagaagtttgagaaaaagactgaataaatatctcacgtttatctttcaggaaggtttacgt

SEQ ID NO: 69330 - DNA, 826 bp, Homo sapiens
ccggctccacccccaagccaggcgaggcaggttccgaggttggaacacctggcgagtcctcggtgtcggtggccggcagtcatctcgcggccgttcagaattataaggctgtctgcagagatttgaaaaatggcaacaaatgaaagtgtcagcatctttagttcagcatccttggctgtggaatatgtagattcacttttacctgagaatcctctgcaagaaccatttaaaaatgcttggaactatatgttgaataattatacaaagttccagattgcaacatggggatcccttatagttcatgaagccctttatttcttattctgtttacctggatttttatttcaatttataccttatatgaaaaaatacaaaattcaaaaggataagccagagacatgggaaaaccaatggaagtgtttcaaagttcttctctttaatcacttctgtatccagctgcctttgatttgtggaacctattattttacagagtatttcaatattccttatgattgggaaagaatgccaagatggtattttcttttggcaagatgctttggttgtgcagtcattgaagatacttggcactattttctgcatagactcttacaccacaaaagaatatacaagtatattcataaagttcatcatgagtttcaggtatgtgagagttatatttaattctttctgttagaggcaaaatgtctattttaattgcctgagcatttttctaaaattgttggtgacgtttttattttcttttcctttggcatgattattaagaacaatacacacacatacaaacaagccatttctacacattgtt

SEQ ID NO: 69331 - DNA, 2373 bp, Homo sapiens
  misc_feature (2354)..(2354): n is a, c, g, or t
ccggctccacccccaagccaggcgaggcaggttccgaggttggaacacctggcgagtcctcggtgtcggtggccggcagtcatctcgcggccgttcagaattataaggctgtctgcagagatttgaaaaatggcaacaaatgaaagtgtcagcatctttagttcagcatccttggctgtggaatatgtagattcacttttacctgagaatcctctgcaagaaccatttaaaaatgcttggaactatatgttgaataattatacaaagttccagattgcaacatggggatcccttatagttcatgaagccctttatttcttattctgtttacctggatttttatttcaatttataccttatatgaaaaaatacaaaattcaaaaggataagccagagacatgggaaaaccaatggaagtgtttcaaagttcttctctttaatcacttctgtatccagctgcctttgatttgtggaacctattattttacagagtatttcaatattccttatgattgggaaagaatgccaagatggtattttcttttggcaagatgctttggttgtgcagtcattgaagatacttggcactattttctgcatagactcttacaccacaaaagaatatacaagtatattcataaagttcatcatgagtttcaggctccatttggaatggaagctgaatatgcacatcctttggagactctaattcttggaactggatttttcattggaatcgtgcttttgtgtgatcatgtaattcttctttgggcatgggtgaccattcgtttattagaaactattgatgtccatagtggttatgatattcctctcaaccctttaaatctgatccctttctatgctggttctcggcatcatgatttccaccacatgaacttcattggaaactatgcttcaacatttacatggtgggatcgaatttttggaacagactctcagtataatgcctataatgaaaagaggaagaagtttgagaaaaagactgaataaatatctcacgtaaaccttcctgaaagataaacgttttcctgaattcagaaactagtagctaacattgcttctggagagcagaaataagcatgtcttctggctactaagtgataaaaagaacattaacaacctttaattaccttcctagtgggaactttttctactttacctacaagttctatatatgtagaaatgaataaatatatatttaagtacagttttcatgaggaagttttaaaagaccatgttcctaagcttccaagaaggttttggatactagaagtattaatctatggcttttctcccagtaaaaccataggcctgaagttcacattgggtctttaaatcttttagatatatactggtcatttcagaaaattcttcatagtggtattggccttatatttaactttttttttattttttttttgagacaaagccacactctgtctccttggctggagtgtggtggcacagtctcagctcactgcaacctctgcctcccagttcaagcaattcttctgcctcagcctcccaagtagctgggattacaggcacccgccaccacgcccagctaatttttgtatttttgtagagatggggtttcacgatgttggccaggctggtctcaaacttctgacctcaagtgatctgcccaccttggcctcccaaagtgctgggattacaggtgtaagccactgcgcccggcctttttaactttaaacatgttttagaattcacctaaagatcaaaatatcatggattgaacctcatcaattgatagcagtgagtgactgaagcttccaaatcaagaaaagccggcaccaagaacttccattctaatctagagctgaccagtttgagctgattctctctttgaagagtccttcttgattgcagtgcagtactggcatttctgaatggatgtaagtggagtattttagtctaaaggcttttcaaattacttgaatttttttaaaaattgaggagctttatttctatttacccttccatttttgtatatcaaatttccattgtcattaaaaactgtatcttgaaactttgtgaactgacttgctgtatttgcactttgagctcttgaaataaatgtgatttttgtgtgattaaaacaaaaaaaaaaaaaaaaaaaaaaaaaaaaaaaaaaaaaaaaaaaaaaaaaaaaaaaaaaaaaaaaaaaaaaactcgctcgggccgaattgggcacgagccacccaccacctttggcacagcccctttgtttttacaccaataccaagaattaagggggaagccttggcagttttcacgtttaaaccagactcctttgccggaacccaacccgncaccctgctggcctccgtc

SEQ ID NO: 69332 - DNA, 2424 bp, Homo sapiens
ccggctccacccccaagccaggcgaggcaggttccgaggttggaacacctggcgagtcctcggtgtcggtggccggcagtcatctcgcggccgttcaggtgagggggttggaggagtggctcatgagcgaggaagggggagcaggcgggctcccacccggtgctccgtgagatcgaggggagcgggttctgggtgcggatgcacgcgctgggcgggacgctggcagtggtacccgagacggggcggaaggagactggagtgaaggtgggcctaggctaagaattataaggctgtctgcagagatttgaaaaatggcaacaaatgaaagtgtcagcatctttagttcagcatccttggctgtggaatatgtagattcacttttacctgagaatcctctgcaagaaccatttaaaaatgcttggaactatatgttgaataattatacaaagttccagattgcaacatggggatcccttatagttcatgaagccctttatttcttattctgtttacctggatttttatttcaatttataccttatatgaaaaaatacaaaattcaaaaggataagccagagacatgggaaaaccaatggaagtgtttcaaagttcttctctttaatcacttctgtatccagctgcctttgatttgtggaacctattattttacagagtatttcaatattccttatgattgggaaagaatgccaagatggtattttcttttggcaagatgctttggttgtgcagtcattgaagatacttggcactattttctgcatagactcttacaccacaaaagaatatacaagtatattcataaagttcatcatgagtttcaggctccatttggaatggaagctgaatatgcacatcctttggagactctaattcttggaactggatttttcattggaatcgtgcttttgtgtgatcatgtaattcttctttgggcatgggtgaccattcgtttattagaaactattgatgtccatagtggttatgatattcctctcaaccctttaaatctgatccctttctatgctggttctcggcatcatgatttccaccacatgaacttcattggaaactatgcttcaacatttacatggtgggatcgaatttttggaacagactctcagtataatgcctataatgaaaagaggaagaagtttgagaaaaagactgaataaatatctcacgtaaaccttcctgaaagataaacgttttcctgaattcagaaactagtagctaacattgcttctggagagcagaaataagcatgtcttctggctactaagtgataaaaagaacattaacaacctttaattaccttcctagtgggaactttttctactttacctacaagttctatatatgtagaaatgaataaatatatatttaagtacagttttcatgaggaagttttaaaagaccatgttcctaagcttccaagaaggttttggatactagaagtattaatctatggcttttctcccagtaaaaccataggcctgaagttcacattgggtctttaaatcttttagatatatactggtcatttcagaaaattcttcatagtggtattggccttatatttaactttttttttattttttttttgagacaaagccacactctgtctccttggctggagtgtggtggcacagtctcagctcactgcaacctctgcctcccagttcaagcaattcttctgcctcagcctcccaagtagctgggattacaggcacccgccaccacgcccagctaatttttgtatttttgtagagatggggtttcacgatgttggccaggctggtctcaaacttctgacctcaagtgatctgcccaccttggcctcccaaagtgctgggattacaggtgtaagccactgcgcccggcctttttaactttaaacatgttttagaattcacctaaagatcaaaatatcatggattgaacctcatcaattgatagcagtgagtgactgaagcttccaaatcaagaaaagccggcaccaagaacttccattctaatctagagctgaccagtttgagctgattctctctttgaagagtccttcttgattgcagtgcagtactggcatttctgaatggatgtaagtggagtattttagtctaaaggcttttcaaattacttgaatttttttaaaaattgaggagctttatttctatttacccttccatttttgtatatcaaatttccattgtcattaaaaactgtatcttgaaactttgtgaactgacttgctgtatttgcactttgagctcttgaaataaatgtgatttttgtgtgattatctggtttccagttttaaacattaactgtcaccttttattcttaaacttgaaagtacagaaatcattaaattattaagttgtacaataaagggattggtttctt

SEQ ID NO: 69333 - DNA, 1956 bp, Homo sapiens
ccggctccacccccaagccaggcgaggcaggttccgaggttggaacacctggcgagtcctcggtgtcggtggccggcagtcatctcgcggccgttcaggataagccagagacatgggaaaaccaatggaagtgtttcaaagttcttctctttaatcacttctgtatccagctgcctttgatttgtggaacctattattttacagagtatttcaatattccttatgattgggaaagaatgccaagatggtattttcttttggcaagatgctttggttgtgcagtcattgaagatacttggcactattttctgcatagactcttacaccacaaaagaatatacaagtatattcataaagttcatcatgagtttcaggctccatttggaatggaagctgaatatgcacatcctttggagactctaattcttggaactggatttttcattggaatcgtgcttttgtgtgatcatgtaattcttctttgggcatgggtgaccattcgtttattagaaactattgatgtccatagtggttatgatattcctctcaaccctttaaatctgatccctttctatgctggttctcggcatcatgatttccaccacatgaacttcattggaaactatgcttcaacatttacatggtgggatcgaatttttggaacagactctcagtataatgcctataatgaaaagaggaagaagtttgagaaaaagactgaataaatatctcacgtaaaccttcctgaaagataaacgttttcctgaattcagaaactagtagctaacattgcttctggagagcagaaataagcatgtcttctggctactaagtgataaaaagaacattaacaacctttaattaccttcctagtgggaactttttctactttacctacaagttctatatatgtagaaatgaataaatatatatttaagtacagttttcatgaggaagttttaaaagaccatgttcctaagcttccaagaaggttttggatactagaagtattaatctatggcttttctcccagtaaaaccataggcctgaagttcacattgggtctttaaatcttttagatatatactggtcatttcagaaaattcttcatagtggtattggccttatatttaactttttttttattttttttttgagacaaagccacactctgtctccttggctggagtgtggtggcacagtctcagctcactgcaacctctgcctcccagttcaagcaattcttctgcctcagcctcccaagtagctgggattacaggcacccgccaccacgcccagctaatttttgtatttttgtagagatggggtttcacgatgttggccaggctggtctcaaacttctgacctcaagtgatctgcccaccttggcctcccaaagtgctgggattacaggtgtaagccactgcgcccggcctttttaactttaaacatgttttagaattcacctaaagatcaaaatatcatggattgaacctcatcaattgatagcagtgagtgactgaagcttccaaatcaagaaaagccggcaccaagaacttccattctaatctagagctgaccagtttgagctgattctctctttgaagagtccttcttgattgcagtgcagtactggcatttctgaatggatgtaagtggagtattttagtctaaaggcttttcaaattacttgaatttttttaaaaattgaggagctttatttctatttacccttccatttttgtatatcaaatttccattgtcattaaaaactgtatcttgaaactttgtgaactgacttgctgtatttgcactttgagctcttgaaataaatgtgatttttgtgtgattatctggtttccagttttaaacattaactgtcaccttttattcttaaacttgaaagtacagaaatcattaaattattaagttgtacaataaagggattggtttctt

SEQ ID NO: 69334 - DNA, 1074 bp, Homo sapiens
ccggctccacccccaagccaggcgaggcaggttccgaggttggaacacctggcgagtcctcggtgtcggtggccggcagtcatctcgcggccgttcagaattataaggctgtctgcagagatttgaaaaatggcaacaaatgaaagtgtcagcatctttagttcagcatccttggctgtggaatatgtagattcacttttacctgagaatcctctgcaagaaccatttaaaaatgcttggaactatatgttgaataattatacaaagttccagattgcaacatggggatcccttatagttcatgaagccctttatttcttattctgtttacctggatttttatttcaatttataccttatatgaaaaaatacaaaattcaaaaggataagccagagacatgggaaaaccaatggaagtgtttcaaagttcttctctttaatcacttctgtatccagctgcctttgatttgtggaacctattattttacagagtatttcaatattccttatgattgggaaagaatgccaagatggtattttcttttggcaagatgctttggttgtgcagtcattgaagatacttggcactattttctgcatagactcttacaccacaaaagaatatacaagtatattcataaagttcatcatgagtttcaggctccatttggaatggaagctgaatatgcacatcctttggagactctaattcttggaactggatttttcattggaatcgtgcttttgtgtgatcatgtaattcttctttgggcatgggtgaccattcgtttattagaaactattgatgtccatagtggttatgatattcctctcaaccctttaaatctgatccctttctatgctggttctcggcatcatgatttccaccacatgaacttcattggaaactatgcttcaacatttacatggtgggatcgaatttttggaacagactctcagtataatgcctataatgaaaagaggaagaagtttgagaaaaagactgaataaccactatggacatcaatagtttctaataaacgaatggtcacccatgcccaaagaagaattaca

SEQ ID NO: 69335 - DNA, 1791 bp, Homo sapiens
tggatgaagcccaccctcattatgaagggtaatcacctttactcagtctactgatttaaatgttaacaacatctaaaaaataccttcacaacaacatctagactggtatttaatcaaacagttggatatcatagcctagccaagttgacacataaaattgaccatcacaatagctaagaaattaagaatttcttatctgtttgtcttaggctccatttggaatggaagctgaatatgcacatcctttggagactctaattcttggaactggatttttcattggaatcgtgcttttgtgtgatcatgtaattcttctttgggcatgggtgaccattcgtttattagaaactattgatgtccatagtggttatgatattcctctcaaccctttaaatctgatccctttctatgctggttctcggcatcatgatttccaccacatgaacttcattggaaactatgcttcaacatttacatggtgggatcgaatttttggaacagactctcagtataatgcctataatgaaaagaggaagaagtttgagaaaaagactgaataaatatctcacgtaaaccttcctgaaagataaacgttttcctgaattcagaaactagtagctaacattgcttctggagagcagaaataagcatgtcttctggctactaagtgataaaaagaacattaacaacctttaattaccttcctagtgggaactttttctactttacctacaagttctatatatgtagaaatgaataaatatatatttaagtacagttttcatgaggaagttttaaaagaccatgttcctaagcttccaagaaggttttggatactagaagtattaatctatggcttttctcccagtaaaaccataggcctgaagttcacattgggtctttaaatcttttagatatatactggtcatttcagaaaattcttcatagtggtattggccttatatttaactttttttttattttttttttgagacaaagccacactctgtctccttggctggagtgtggtggcacagtctcagctcactgcaacctctgcctcccagttcaagcaattcttctgcctcagcctcccaagtagctgggattacaggcacccgccaccacgcccagctaatttttgtatttttgtagagatggggtttcacgatgttggccaggctggtctcaaacttctgacctcaagtgatctgcccaccttggcctcccaaagtgctgggattacaggtgtaagccactgcgcccggcctttttaactttaaacatgttttagaattcacctaaagatcaaaatatcatggattgaacctcatcaattgatagcagtgagtgactgaagcttccaaatcaagaaaagccggcaccaagaacttccattctaatctagagctgaccagtttgagctgattctctctttgaagagtccttcttgattgcagtgcagtactggcatttctgaatggatgtaagtggagtattttagtctaaaggcttttcaaattacttgaatttttttaaaaattgaggagctttatttctatttacccttccatttttgtatatcaaatttccattgtcattaaaaactgtatcttgaaactttgtgaactgacttgctgtatttgcactttgagctcttgaaataaatgtgatttttgtgtgattatctggtttccagttttaaacattaactgtcaccttttattcttaaacttgaaagtacagaaatcattaaattattaagttgtacaataaagggattggtttctt

SEQ ID NO: 69336 - DNA, 3124 bp, Homo sapiens
gtgaagtggtcggggcgagcagagggtgcgaaggtgcgggtgctggtgcctcgcagcaggagggagccccggctgcgccgcgcgactccctctttggccctcggagcgcagcacccggcggacaagcggcgggacgccaggacgcggcgagcaagatctctcgtggaagaggaagaccaacacatgaaattgtcccttggaggcagcgaaatgggcctctcatcccatttgcagtcttccaaggcaggacctacacgcatctttaccagcaatacccacagttctgtggtgttacagggctttgaccagcttcgacttgaaggattgctttgtgatgtgaccctgatgccaggtgacacagatgatgctttccctgtgcatagagtcatgatggcatctgctagtgattacttcaaggctatgttcacaggtggaatgaaagaacaagatttaatgtgcattaaacttcatggtgtgagcaaagtcggtctaaggaaaattattgatttcatttatactgcaaagctttctcttaatatggacaaccttcaagacacgctggaagctgccagtttcctacagattctgccagttttggacttctgtaaagtgtttctcatatctggggtcactttagacaactgtgttgaagttggacggattgccaacacctacaatctaaccgaagtggataaatacgttaacagtttcgtcttgaagaattttcctgcattgctgagcacaggggagttcttgaaactcccttttgagcgtcttgccttcgtgctttccagtaatagccttaagcactgtactgaacttgagctctttaaggctacctgtcgttggcttcgcctggaagagcctcggatggactttgctgcaaaattaatgaagaacatacgatttccactgatgacaccacaggagctcattaattacgtgcaaacggtggatttcatgagaactgacaatacttgtgtgaatttgcttttggaagccagcaattaccaaatgatgccatatatgcagccagttatgcagtcagacaggactgccattaggtctgacaccactcacttggttacactaggaggagtgctgaggcagcagctggttgtcagtaaggaattgcgcatgtatgatgaaaaggcccatgagtggaaatcgttagcccccatggatgccccaaggtaccagcatggcatcgccgtcattggaaattttctctatgtggttggcggacagagtaattatgatacaaaaggaaaaacggcagttgatacagtcttcagatttgatcctcgatacaataaatggatgcaagttgcatctttaaatgaaaagcgcaccttcttccacctaagtgccctcaaaggatatctgtatgcagttggtgggcgaaatgcagcaggtgaactgcccacagtagaatgttacaatccaagaacaaatgaatggacctatgttgccaaaatgagtgagccccactatggccatgctggaactgtgtatggaggagtgatgtatatttcaggaggaattactcatgatactttccaaaaggagctcatgtgctttgaccctgatactgacaaatggatccagaaggcgccaatgaccactgtcagaggtctgcattgcatgtgtacagtgggagaaaggctctatgtcattggtggcaatcacttcagaggaacaagtgattatgatgatgtcctaagctgtgaatactattcacctatccttgaccagtggaccccaattgctgccatgttaagagggcagagtgatgttggggtcgctgtcttcgaaaataaaatctatgtggttggggggtattcttggaataatcgttgtatggtagagatagtgcagaaatatgatccagataaagatgaatggcataaggtttttgatctgccagaatcccttggtggcattcgtgcttgcacactcacagtttttccaccagaagaaaccacaccatcaccttctagagagtcccctctttctgcaccttaagatcatctctacaactaagatgctgtagttctatctttgcaatgtgtcataaattctcttctttttcccccttaagtagtatatatgttaggattaccctctggtaattgatacagatattggaaaaaagacaacattgatgttatttgtgctctttgtttggcctagaatgtttataaagtggtaacacaaccattctggaaatgtatcccatagaagctgatgtttaacatatgaaaaaaaaagtattgtctataaaatgtttcttcagtactttttaaatgctgtgtattgggtgtaaggtatttgtcatcttacattagtaaacccaataagccaagttgaaggtggattatagtaaatgtacaactgtgctcactaggcttcaagtaaaaagttttcctttcatctttgactgtaagatgtcaaagggaggcagcctgcttgaacaggaaacaatacacaaaaggttgccaactcgcatgagctacctccctcttttcataaagtatttttgacatatctgtcaacccacttgactgtgtgggtgcattgagaacacaaagtttcctagacacacaggagaagtagcttaaattcactaatattaatttaaaaagcagcatgaaccctctacttataaacaagggtttggtgtttttaaagtgtgtatacatacatacacatacacacatgcacatatgtcaaatataatttttttaaaaattgagtggcacatcaaagaaatgtgaaattaaaaagaattcttccaaaaagcagcttccattaaaatgggaattcagtatgcacatactgaatgcatatatgtagaaccatacagaatttaggtggataagggctagaaattttgagcaacaaaatttgtcacttgaccagattttatcttcaaaaactgtattctactccttctcctttgctgttgaggtaacttgcatattatatgtattctgtatactcagttcataaggttatttagcacaaagtatagcagcttcacctggagagctgcttttgctcagtaaattcaacttccatgttttatctttttttgttcaataaaaacatttaatgtcaaaaa

SEQ ID NO: 69337 - DNA, 3228 bp, Homo sapiens
agcggactgattggaagcatcggtttaagggcactggcagaatcctttgcttgttctccgcggcagccactgctgtgtcagtacagtgtggaatggaagtcttagttggtagtctgttatggaaacgctctttactgttattgtagtaccgtggtgacaacatgccattgaaatggaaaacgagctctcctgctatctggaaattcccagttcctgtgcttaaaacatccaggtcaactccactttctccagcatacatatctctcgtggaagaggaagaccaacacatgaaattgtcccttggaggcagcgaaatgggcctctcatcccatttgcagtcttccaaggcaggacctacacgcatctttaccagcaatacccacagttctgtggtgttacagggctttgaccagcttcgacttgaaggattgctttgtgatgtgaccctgatgccaggtgacacagatgatgctttccctgtgcatagagtcatgatggcatctgctagtgattacttcaaggctatgttcacaggtggaatgaaagaacaagatttaatgtgcattaaacttcatggtgtgagcaaagtcggtctaaggaaaattattgatttcatttatactgcaaagctttctcttaatatggacaaccttcaagacacgctggaagctgccagtttcctacagattctgccagttttggacttctgtaaagtgtttctcatatctggggtcactttagacaactgtgttgaagttggacggattgccaacacctacaatctaaccgaagtggataaatacgttaacagtttcgtcttgaagaattttcctgcattgctgagcacaggggagttcttgaaactcccttttgagcgtcttgccttcgtgctttccagtaatagccttaagcactgtactgaacttgagctctttaaggctacctgtcgttggcttcgcctggaagagcctcggatggactttgctgcaaaattaatgaagaacatacgatttccactgatgacaccacaggagctcattaattacgtgcaaacggtggatttcatgagaactgacaatacttgtgtgaatttgcttttggaagccagcaattaccaaatgatgccatatatgcagccagttatgcagtcagacaggactgccattaggtctgacaccactcacttggttacactaggaggagtgctgaggcagcagctggttgtcagtaaggaattgcgcatgtatgatgaaaaggcccatgagtggaaatcgttagcccccatggatgccccaaggtaccagcatggcatcgccgtcattggaaattttctctatgtggttggcggacagagtaattatgatacaaaaggaaaaacggcagttgatacagtcttcagatttgatcctcgatacaataaatggatgcaagttgcatctttaaatgaaaagcgcaccttcttccacctaagtgccctcaaaggatatctgtatgcagttggtgggcgaaatgcagcaggtgaactgcccacagtagaatgttacaatccaagaacaaatgaatggacctatgttgccaaaatgagtgagccccactatggccatgctggaactgtgtatggaggagtgatgtatatttcaggaggaattactcatgatactttccaaaaggagctcatgtgctttgaccctgatactgacaaatggatccagaaggcgccaatgaccactgtcagaggtctgcattgcatgtgtacagtgggagaaaggctctatgtcattggtggcaatcacttcagaggaacaagtgattatgatgatgtcctaagctgtgaatactattcacctatccttgaccagtggaccccaattgctgccatgttaagagggcagagtgatgttggggtcgctgtcttcgaaaataaaatctatgtggttggggggtattcttggaataatcgttgtatggtagagatagtgcagaaatatgatccagataaagatgaatggcataaggtttttgatctgccagaatcccttggtggcattcgtgcttgcacactcacagtttttccaccagaagaaaccacaccatcaccttctagagagtcccctctttctgcaccttaagatcatctctacaactaagatgctgtagttctatctttgcaatgtgtcataaattctcttctttttcccccttaagtagtatatatgttaggattaccctctggtaattgatacagatattggaaaaaagacaacattgatgttatttgtgctctttgtttggcctagaatgtttataaagtggtaacacaaccattctggaaatgtatcccatagaagctgatgtttaacatatgaaaaaaaaagtattgtctataaaatgtttcttcagtactttttaaatgctgtgtattgggtgtaaggtatttgtcatcttacattagtaaacccaataagccaagttgaaggtggattatagtaaatgtacaactgtgctcactaggcttcaagtaaaaagttttcctttcatctttgactgtaagatgtcaaagggaggcagcctgcttgaacaggaaacaatacacaaaaggttgccaactcgcatgagctacctccctcttttcataaagtatttttgacatatctgtcaacccacttgactgtgtgggtgcattgagaacacaaagtttcctagacacacaggagaagtagcttaaattcactaatattaatttaaaaagcagcatgaaccctctacttataaacaagggtttggtgtttttaaagtgtgtatacatacatacacatacacacatgcacatatgtcaaatataatttttttaaaaattgagtggcacatcaaagaaatgtgaaattaaaaagaattcttccaaaaagcagcttccattaaaatgggaattcagtatgcacatactgaatgcatatatgtagaaccatacagaatttaggtggataagggctagaaattttgagcaacaaaatttgtcacttgaccagattttatcttcaaaaactgtattctactccttctcctttgctgttgaggtaacttgcatattatatgtattctgtatactcagttcataaggttatttagcacaaagtatagcagcttcacctggagagctgcttttgctcagtaaattcaacttccatgttttatctttttttgttcaataaaaacatttaatgtcaaaaa

SEQ ID NO: 69338 - DNA, 3107 bp, Homo sapiens
cattatccaacttttagaggtgatggatcatctgcatagaggggaattggttgctgcaatacttcgtaaccggagacggaggcaattgtcattaaaacaagccgatttcaaggatatattcaaaaaatcaacttcaggatctctcgtggaagaggaagaccaacacatgaaattgtcccttggaggcagcgaaatgggcctctcatcccatttgcagtcttccaaggcaggacctacacgcatctttaccagcaatacccacagttctgtggtgttacagggctttgaccagcttcgacttgaaggattgctttgtgatgtgaccctgatgccaggtgacacagatgatgctttccctgtgcatagagtcatgatggcatctgctagtgattacttcaaggctatgttcacaggtggaatgaaagaacaagatttaatgtgcattaaacttcatggtgtgagcaaagtcggtctaaggaaaattattgatttcatttatactgcaaagctttctcttaatatggacaaccttcaagacacgctggaagctgccagtttcctacagattctgccagttttggacttctgtaaagtgtttctcatatctggggtcactttagacaactgtgttgaagttggacggattgccaacacctacaatctaaccgaagtggataaatacgttaacagtttcgtcttgaagaattttcctgcattgctgagcacaggggagttcttgaaactcccttttgagcgtcttgccttcgtgctttccagtaatagccttaagcactgtactgaacttgagctctttaaggctacctgtcgttggcttcgcctggaagagcctcggatggactttgctgcaaaattaatgaagaacatacgatttccactgatgacaccacaggagctcattaattacgtgcaaacggtggatttcatgagaactgacaatacttgtgtgaatttgcttttggaagccagcaattaccaaatgatgccatatatgcagccagttatgcagtcagacaggactgccattaggtctgacaccactcacttggttacactaggaggagtgctgaggcagcagctggttgtcagtaaggaattgcgcatgtatgatgaaaaggcccatgagtggaaatcgttagcccccatggatgccccaaggtaccagcatggcatcgccgtcattggaaattttctctatgtggttggcggacagagtaattatgatacaaaaggaaaaacggcagttgatacagtcttcagatttgatcctcgatacaataaatggatgcaagttgcatctttaaatgaaaagcgcaccttcttccacctaagtgccctcaaaggatatctgtatgcagttggtgggcgaaatgcagcaggtgaactgcccacagtagaatgttacaatccaagaacaaatgaatggacctatgttgccaaaatgagtgagccccactatggccatgctggaactgtgtatggaggagtgatgtatatttcaggaggaattactcatgatactttccaaaaggagctcatgtgctttgaccctgatactgacaaatggatccagaaggcgccaatgaccactgtcagaggtctgcattgcatgtgtacagtgggagaaaggctctatgtcattggtggcaatcacttcagaggaacaagtgattatgatgatgtcctaagctgtgaatactattcacctatccttgaccagtggaccccaattgctgccatgttaagagggcagagtgatgttggggtcgctgtcttcgaaaataaaatctatgtggttggggggtattcttggaataatcgttgtatggtagagatagtgcagaaatatgatccagataaagatgaatggcataaggtttttgatctgccagaatcccttggtggcattcgtgcttgcacactcacagtttttccaccagaagaaaccacaccatcaccttctagagagtcccctctttctgcaccttaagatcatctctacaactaagatgctgtagttctatctttgcaatgtgtcataaattctcttctttttcccccttaagtagtatatatgttaggattaccctctggtaattgatacagatattggaaaaaagacaacattgatgttatttgtgctctttgtttggcctagaatgtttataaagtggtaacacaaccattctggaaatgtatcccatagaagctgatgtttaacatatgaaaaaaaaagtattgtctataaaatgtttcttcagtactttttaaatgctgtgtattgggtgtaaggtatttgtcatcttacattagtaaacccaataagccaagttgaaggtggattatagtaaatgtacaactgtgctcactaggcttcaagtaaaaagttttcctttcatctttgactgtaagatgtcaaagggaggcagcctgcttgaacaggaaacaatacacaaaaggttgccaactcgcatgagctacctccctcttttcataaagtatttttgacatatctgtcaacccacttgactgtgtgggtgcattgagaacacaaagtttcctagacacacaggagaagtagcttaaattcactaatattaatttaaaaagcagcatgaaccctctacttataaacaagggtttggtgtttttaaagtgtgtatacatacatacacatacacacatgcacatatgtcaaatataatttttttaaaaattgagtggcacatcaaagaaatgtgaaattaaaaagaattcttccaaaaagcagcttccattaaaatgggaattcagtatgcacatactgaatgcatatatgtagaaccatacagaatttaggtggataagggctagaaattttgagcaacaaaatttgtcacttgaccagattttatcttcaaaaactgtattctactccttctcctttgctgttgaggtaacttgcatattatatgtattctgtatactcagttcataaggttatttagcacaaagtatagcagcttcacctggagagctgcttttgctcagtaaattcaacttccatgttttatctttttttgttcaataaaaacatttaatgtcaaaaa

SEQ ID NO: 69339 - DNA, 5336 bp, Homo sapiens
cttggaattactcagataatcattcctttaagcatagattgatataattgtggcttggggtttgcagagaagtgttacctccttgcaatgttgaagaacagtgctcttcacattcaatcaataaacttaataaaggggagatagatgggaatattgaatctgctaagaaggttaacatggcatgtactgttaccaaagcagaaattagtagggagtgttttgaatgttaaaaagtcaaaagatactgataaaacatcatgaaaaagataattttagtccaggcttcttcagcttttgaagtaattaattaaaaaggcaagcatattatgttggcaagaaagggctgcattttcactttttgctttctgtttttaagagcaagagacaaatgacaaagtaaataagttgttacttgtagtttactcaaaaaagcaatttccgggatatgtcattgtggcaatgtgaattcagctttactcctatcccttttacatctgcagtttcataagaatgataattgatggtcatttaagcactgcataataaagaaatgtctttggaatgatctacagaaagaagattctgtattcattcagaggacatatattaagtctttcgtgctaggctctgtgcagggaatacagaaactaataaaacagtctgcttgaatatcctattaatataatctggatgaatagacattttctggttagggataacagtcaccatcaatcaatttctgacttttccaattgattctgtaattttaaacgtctgtccacaaaagttgtttaaaattgtgtgtgtgtgctatatatcataaatataacttaattctctttaaagctatctctgaaactctggtggaaggctatatccagtttcttttatgctttttaaaatcttaagttattctcttctttattaaatatctatcagaattgaattaaacatggttatatattattaattcatttttggttatactatggctctaatatcattaagaagaattgatgtcatccttaaggccagaatttttgctaattattgcaagatttaaaaccacttagttggtgtcataattcaaaaagcagaatctttagtatggtctttttcttgttaaaactgatcaacttggggttttaggtatgacaggaaaaaaaggtgaaacctttctgatattggatagctcagttagacagttagaaaagcaaataattcaaaattgaggaaattacagaaaaaatgaagagttccagcacttgaaaatctgctctccttcttttttcctaatgtctattttagcagtctttttagcagtctgtatcatgaatgcagaaccaaattcatgagccatgggctccccactcttaggcaggtgatccagagattattttagcaatgtatacctatggagaaacacaagatctcttctaaggaatgatgaaaggttattaataatggcacatttttagtataacctgagatttttaaactatcaaatgtattgtcatattctctttgcatctaagtgacctactgactaaggttctcctattcttacttatgccccttgaaaatactattgctgcaatacatgcaaatacagaattgcctgtatttatatttttagtattcatttctttgaaaagatggaaatgtgactagattgtagctattaaacaatcccaaactggtaagtgagagatactgctagaaaaagaaattatatcatgtgaaaaattttgttcagttggggttgattagaactactactaataacagaagataaagtaatgcattaatatataacaattaatcttttacttttattaatgggggtttggagtgggaatcagactagacctagattcaaaccctgggccaaccactttaataagtggtttctgacccttctttagtctgtgtataaaattattggcaagtacctgctatataatgactattcaataaatggtagctatcatttttatcttttcaaaattaggtgttccaaattaattttaactatatgcagcataatttgatggcattgctatctaaatagtaacatatcaacagtaattactgtggcctttaaaaactctgtgactataattttgaaccaccttttaagttgatttctcagttatcatctgtatattctgtacttggaaaccattttacaaatatacatttcttctaagataaagagtggtacaagcgtataatatagtgaaacaatattcaccatattgcatggtcatatgattgcaatagtgactgattatttttctaaataatctcattgtaaattgtacaagttttaatttccccttctttcttatgtaaaaaaactttcagatctctcgtggaagaggaagaccaacacatgaaattgtcccttggaggcagcgaaatgggcctctcatcccatttgcagtcttccaaggcaggacctacacgcatctttaccagcaatacccacagttctgtggtgttacagggctttgaccagcttcgacttgaaggattgctttgtgatgtgaccctgatgccaggtgacacagatgatgctttccctgtgcatagagtcatgatggcatctgctagtgattacttcaaggctatgttcacaggtggaatgaaagaacaagatttaatgtgcattaaacttcatggtgtgagcaaagtcggtctaaggaaaattattgatttcatttatactgcaaagctttctcttaatatggacaaccttcaagacacgctggaagctgccagtttcctacagattctgccagttttggacttctgtaaagtgtttctcatatctggggtcactttagacaactgtgttgaagttggacggattgccaacacctacaatctaaccgaagtggataaatacgttaacagtttcgtcttgaagaattttcctgcattgctgagcacaggggagttcttgaaactcccttttgagcgtcttgccttcgtgctttccagtaatagccttaagcactgtactgaacttgagctctttaaggctacctgtcgttggcttcgcctggaagagcctcggatggactttgctgcaaaattaatgaagaacatacgatttccactgatgacaccacaggagctcattaattacgtgcaaacggtggatttcatgagaactgacaatacttgtgtgaatttgcttttggaagccagcaattaccaaatgatgccatatatgcagccagttatgcagtcagacaggactgccattaggtctgacaccactcacttggttacactaggaggagtgctgaggcagcagctggttgtcagtaaggaattgcgcatgtatgatgaaaaggcccatgagtggaaatcgttagcccccatggatgccccaaggtaccagcatggcatcgccgtcattggaaattttctctatgtggttggcggacagagtaattatgatacaaaaggaaaaacggcagttgatacagtcttcagatttgatcctcgatacaataaatggatgcaagttgcatctttaaatgaaaagcgcaccttcttccacctaagtgccctcaaaggatatctgtatgcagttggtgggcgaaatgcagcaggtgaactgcccacagtagaatgttacaatccaagaacaaatgaatggacctatgttgccaaaatgagtgagccccactatggccatgctggaactgtgtatggaggagtgatgtatatttcaggaggaattactcatgatactttccaaaaggagctcatgtgctttgaccctgatactgacaaatggatccagaaggcgccaatgaccactgtcagaggtctgcattgcatgtgtacagtgggagaaaggctctatgtcattggtggcaatcacttcagaggaacaagtgattatgatgatgtcctaagctgtgaatactattcacctatccttgaccagtggaccccaattgctgccatgttaagagggcagagtgatgttggggtcgctgtcttcgaaaataaaatctatgtggttggggggtattcttggaataatcgttgtatggtagagatagtgcagaaatatgatccagataaagatgaatggcataaggtttttgatctgccagaatcccttggtggcattcgtgcttgcacactcacagtttttccaccagaagaaaccacaccatcaccttctagagagtcccctctttctgcaccttaagatcatctctacaactaagatgctgtagttctatctttgcaatgtgtcataaattctcttctttttcccccttaagtagtatatatgttaggattaccctctggtaattgatacagatattggaaaaaagacaacattgatgttatttgtgctctttgtttggcctagaatgtttataaagtggtaacacaaccattctggaaatgtatcccatagaagctgatgtttaacatatgaaaaaaaaagtattgtctataaaatgtttcttcagtactttttaaatgctgtgtattgggtgtaaggtatttgtcatcttacattagtaaacccaataagccaagttgaaggtggattatagtaaatgtacaactgtgctcactaggcttcaagtaaaaagttttcctttcatctttgactgtaagatgtcaaagggaggcagcctgcttgaacaggaaacaatacacaaaaggttgccaactcgcatgagctacctccctcttttcataaagtatttttgacatatctgtcaacccacttgactgtgtgggtgcattgagaacacaaagtttcctagacacacaggagaagtagcttaaattcactaatattaatttaaaaagcagcatgaaccctctacttataaacaagggtttggtgtttttaaagtgtgtatacatacatacacatacacacatgcacatatgtcaaatataatttttttaaaaattgagtggcacatcaaagaaatgtgaaattaaaaagaattcttccaaaaagcagcttccattaaaatgggaattcagtatgcacatactgaatgcatatatgtagaaccatacagaatttaggtggataagggctagaaattttgagcaacaaaatttgtcacttgaccagattttatcttcaaaaactgtattctactccttctcctttgctgttgaggtaacttgcatattatatgtattctgtatactcagttcataaggttatttagcacaaagtatagcagcttcacctggagagctgcttttgctcagtaaattcaacttccatgttttatctttttttgttcaataaaaacatttaatgtcaaaaa

SEQ ID NO: 69340 - DNA, 1655 bp, Homo sapiens
tatgaaaacattcggtaggtcgagctcgtggtaatcggcacaggatggaggagtgatgtatatttcaggaggaattactcatgatactttccaaaaggagctcatgtgctttgaccctgatactgacaaatggatccagaaggcgccaatgaccactgtcagaggtctgcattgcatgtgtacagtgggagaaaggctctatgtcattggtggcaatcacttcagaggaacaagtgattatgatgatgtcctaagctgtgaatactattcacctatccttgaccagtggaccccaattgctgccatgttaagagggcagagtgatgttggggtcgctgtcttcgaaaataaaatctatgtggttggggggtattcttggaataatcgttgtatggtagagatagtgcagaaatatgatccagataaagatgaatggcataaggtttttgatctgccagaatcccttggtggcattcgtgcttgcacactcacagtttttccaccagaagaaaccacaccatcaccttctagagagtcccctctttctgcaccttaagatcatctctacaactaagatgctgtagttctatctttgcaatgtgtcataaattctcttctttttcccccttaagtagtatatatgttaggattaccctctggtaattgatacagatattggaaaaaagacaacattgatgttatttgtgctctttgtttggcctagaatgtttataaagtggtaacacaaccattctggaaatgtatcccatagaagctgatgtttaacatatgaaaaaaaaagtattgtctataaaatgtttcttcagtactttttaaatgctgtgtattgggtgtaaggtatttgtcatcttacattagtaaacccaataagccaagttgaaggtggattatagtaaatgtacaactgtgctcactaggcttcaagtaaaaagttttcctttcatctttgactgtaagatgtcaaagggaggcagcctgcttgaacaggaaacaatacacaaaaggttgccaactcgcatgagctacctccctcttttcataaagtatttttgacatatctgtcaacccacttgactgtgtgggtgcattgagaacacaaagtttcctagacacacaggagaagtagcttaaattcactaatattaatttaaaaagcagcatgaaccctctacttataaacaagggtttggtgtttttaaagtgtgtatacatacatacacatacacacatgcacatatgtcaaatataatttttttaaaaattgagtggcacatcaaagaaatgtgaaattaaaaagaattcttccaaaaagcagcttccattaaaatgggaattcagtatgcacatactgaatgcatatatgtagaaccatacagaatttaggtggataagggctagaaattttgagcaacaaaatttgtcacttgaccagattttatcttcaaaaactgtattctactccttctcctttgctgttgaggtaacttgcatattatatgtattctgtatactcagttcataaggttatttagcacaaagtatagcagcttcacctggagagctgcttttgctcagtaaattcaacttccatgttttatctttttttgttcaataaaaacatttaatgtcaaaaa

SEQ ID NO: 69341 - DNA, 319 bp, Homo sapiens
agtgagactctgtctcaaaaaaattaaaaaaaaaaaaagagagagacaaaaattattttagaaattaaaaataaatataaagtacccaagagaaggaaagactgactgaaaataaaatatgtatcattgaacaaagccataaaaacagccaagagaacaaaacaaaatgaagtagagtagtaagcatcaggaaaatggccaggaatggtggtttatgcctgtacacccagaactttgggaggctgaggcaggaggattgctggagaataggagtttaagaccagcctgggaaacataatgagaccccatctctgccaaa

SEQ ID NO: 69342 - DNA, 324 bp, Homo sapiens
tcattccccctcccaggctgttttccatccagattagactctgggtggcatttttgacttcacgatcccaattctaactaagcaccaagtcccactaattcaaatgccagaatttttctcaagtccgttttttcctttccaccttcactccagtgaccctggttcagatttttctttctcttgttctactactggtcttccagtggatactcctgccctctcaaatctttcacctcaattccttctttatatgcatgtgatgggaacaatctctgatataagattcttcagtggttccctgataacatccaatcttttaaaata

SEQ ID NO: 69343 - DNA, 894 bp, Homo sapiens
tctgtgtgtatatatagttactgattgtgctactctgtaggagaaatacaaaggacaaaagaatgtattcctgctatcctacttttctgctgtcacactaaaattgtgtgggaggcttaagtgagttgaaagactggattatggtagttgagggaatgggttttttgttagtttaccattttttaaaatacttagctagaaagcattctgaattattgaataaattacgtcatttattttttatttgacagtttgaagataaattattttctctgttgcctctatttcaccacctacaaatggtccattatgttctggacatgtttaagagcctctgaggaatggagctgcaaacacagacacaaatgttcatctttgccacactgaactatattttaatgtttactgaagccatcaagcttttcttgaattcatgcaggagtattttaattacattaaaacatggcattattttaaaagtaatctatgtttttaatttaaaggctacttatgcttaccatggtagagagtacaactaaggaagttttcttaacttgcctccctctttcttttcctacccctacctaaatcataggctattaaaatgaaatctgggccgggcgtggtatctcacgcctgtaatctcagcactttgggaggccgaggcaggaggatcacctgaggtcaggagtttgagaccagcctgaccaatgtggagaaaccccatctctactaaaaatacaaaaattagcctggcgagttggtgcatgcctgtaatcccagctactcgggaggctgaggcaggacaatcgcttgaacctgggaggtggagattgtgctgtgcaccattgcactccagcctgggtgacaagagtaagactccgtctcaaaaaa

SEQ ID NO: 69344 - DNA, 1632 bp, Homo sapiens
ttaagtttatatttgcatttccaagcgtttctaaaaatcactaatgccatctatacttttagtatgaaacagcagactatagaaagcacagggaagaataggctaaatacattctttgaagaaccagaggcatataaccacatcattatgtcattcctaatacatggctagattttctaatgataaaattgactgtgtcccaatgcttatttgattctaagcttttttattctgtttctgagatattttaatagctttgcaaaatatgctgaccagtttttggaaaataatggtttttatagcaagcaaagactttatggcacattttcaaaatagcactcatacatacttacattttgacagaaatgtgaattctcacattgatgagatatttttttcccacctgccctaccctttaaaaaaggtcacctttctaatgtgtagtagattcatttacgcctttccctttgagtcataccatgtttggagaactgtgtgaattgtaggtagagaaattaactagggaagccagaagcttgaactaaagttttaaatttgtaggcagatgagaacttttatactatggttgctttgggcgattctaattttgtaatagcatcatgatcaccaaaattaattcaaacattttagtacatctttaatctgtcttatttaccaaagttctaatctgtttaagaacaggatgccaagagcatctttcattttatagaatgatatgctcacctttataagtgtcacctaaaagcttgagggtaaaaaagaagcagcccatatatctaaactacaggatgtcttgaacaagattcacagaaagaaagaaaaaaaagcagttctttccaggaaggtggtaaggaagagcatgcatatttcttgttttaaccaaataccttttttatgtaaatgtctctattaaaccccaggtcctacaccaggaaatagggtgataaccaggaaaataccaagctttaacccagttggcagttccttgtggcatacatttggttagacttgggtttttcttggaaccaaaggaaaataagcatgttgagttcctcgttcaacagacatgacattgaagtaatagaatattttttaagtaaaatagttttcactttcaaagcctatgacataaggacatttgtgcttattaattgttaatttttttttatggtacattgtataaactgagtagcattgaactgcattttagaagtatgtcatcagaaacaaatcacattatggaaaggatatacaaatgccaagtgatatgactcttttggcatggtggtagcatggtccattcagctttcagaatctttcggaggctctagtttggtgcctagtactagttatttttgttagaacaatctctcaaaatttagataattttccagttgtatgtctgtcacttttaactctaaagcgtaagaatcatggtaaccctctcctccccccgccgtccccgcggctccatcctccgccgccgcccgagcagctgcggggccgccaccgccgccgccgccgttgcaggctgagtcatcactagagagtaggaagggcagcagcagcagagaatccaaaccctaaagctgatatcacgaagtaccattt

SEQ ID NO: 69345 - DNA, 2531 bp, Homo sapiens
ttaagtttatatttgcatttccaagcgtttctaaaaatcactaatgccatctatacttttagtatgaaacagcagactatagaaagcacagggaagaataggctaaatacattctttgaagaaccagaggcatataaccacatcattatgtcattcctaatacatggctagattttctaatgataaaattgactgtgtcccaatgcttatttgattctaagcttttttattctgtttctgagatattttaatagctttgcaaaatatgctgaccagtttttggaaaataatggtttttatagcaagcaaagactttatggcacattttcaaaatagcactcatacatacttacattttgacagaaatgtgaattctcacattgatgagatatttttttcccacctgccctaccctttaaaaaaggtcacctttctaatgtgtagtagattcatttacgcctttccctttgagtcataccatgtttggagaactgtgtgaattgtaggtagagaaattaactagggaagccagaagcttgaactaaagttttaaatttgtaggcagatgagaacttttatactatggttgctttgggcgattctaattttgtaatagcatcatgatcaccaaaattaattcaaacattttagtacatctttaatctgtcttatttaccaaagttctaatctgtttaagaacaggatgccaagagcatctttcattttatagaatgatatgctcacctttataagtgtcacctaaaagcttgagggtaaaaaagaagcagcccatatatctaaactacaggatgtcttgaacaagattcacagaaagaaagaaaaaaaagcagttctttccaggaaggtggtaaggaagagcatgcatatttcttgttttaaccaaataccttttttatgtaaatgtctctattaaaccccaggtcctacaccaggaaatagggtgataaccaggaaaataccaagctttaacccagttggcagttccttgtggcatacatttggttagacttgggtttttcttggaaccaaaggaaaataagcatgttgagttcctcgttcaacagacatgacattgaagtaatagaatattttttaagtaaaatagttttcactttcaaagcctatgacataaggacatttgtgcttattaattgttaatttttttttatggtacattgtataaactgagtagcattgaactgcattttagaagtatgtcatcagaaacaaatcacattatggaaaggatatacaaatgccaagtgatatgactcttttggcatggtggtagcatggtccattcagctttcagaatctttcggaggctctagtttggtgcctagtactagttatttttgttagaacaatctctcaaaatttagataattttccagttgtatgtctgtcacttttaactctaaagcgtaagaatcatggtaaccctctcagaagtggtcctttcttgctcatttcagtttcgtattaatttcaaatcactgatgtattgtctttcaagctatcaattgtcatatgtaccaatttaatttagtttgtagttatctgaagtcacaaaattggttcagcattgatgtcaaacaatggctttgcttcttaccaaacagacttagtatcctgctgcttgtttcaatcttgatgcagtaagtgatgcagtatctgggtctgtatttacttagaaactgtactgtcctttctctgtgcttaacttgctaaaaatatattcccttacctgtgaaattcctgagcggtgctctgccaacttttcaaggggagggatttggatggctgtgttactgcacactggatctggaattgttcagggttatgagtgacaaatttcttaaacaccagcagcactgagatgtgcactatgggcattcgtacagttgttgtccaaatgcaaacaactttttcatcttggagaagctgagatacagagttcaatagaactacttggaatattttgagaaggttgaatgtttcatctttggctttgttgtctctggagtggggaagtatggagggcttttttttttttttaaaagagagggtgtatgtactttttctctttataagggccagggggttggtcaaattcaccatcgattaatttatatctctgtggggatttttttcaactttttaacaaggcccaactaattgcccatgggacaatctacttttccccccaatttatcgttttgagtagggaaaggttcattttttttcattccccggctttaagttaaaaaattcatttttttgcatacatttgagtcattctgggacctataaagggtttttgtaactatctaattctaagggttgcaaagcaaagcacatgactgtaaaaccaagcaaggtgttttagtaactttttccctgaatacttggtagtttccattgatactattccaaaacaaattctgctgttttaggttgtatatttactttgcttttgttctaagaaaaagccaaggactaaatcaact

SEQ ID NO: 69346 - DNA, 4042 bp, Homo sapiens
agttctggaaagtcattgacaggggattaacctagaacatcaattataaacaggcagcaggcctcaggcccagacttgggtgttacaggaacagtgtggcctctctggaactctgcagaccaactgccgtgatgctgaagttccgaacagtccatgggggcctgaggctcctgggaatccgccgaacctccaccgcccccgctgcctccccaaatgtccggcgcctggagtataagcccatcaagaaagtcatggtggccaacagaggtgagattgccatccgtgtgttccgggcctgcacggagctgggcatccgcaccgtagccatctactctgagcaggacacgggccagatgcaccggcagaaagcagatgaagcctatctcatcggccgcggcctggcccccgtgcaggcctacctgcacatcccagacatcatcaaggtggccaaggagaacaacgtagatgcagtgcaccctggctacgggttcctctctgagcgagcggacttcgcccaggcctgccaggatgcaggggtccggtttattgggccaagcccagaagtggtccgcaagatgggagacaaggtggaggcccgggccatcgccattgctgcgggtgttcccgttgtccctggcacagatgcccccatcacgtccctgcatgaggcccacgagttctccaacacctacggcttccccatcatcttcaaggcggcctatgggggtggagggcgtggcatgagggtggtgcacagctacgaggagctggaggagaattacacccgggcctactcagaggctctggccgcctttgggaatggggcgctgtttgtggagaagttcatcgagaagccacggcacatcgaggtgcagatcttgggggaccagtatgggaacatcctgcacctgtacgagcgagactgctccatccagcggcggcaccagaaggtggtcgagattgcccccgccgcccacctggacccgcagcttcggactcggctcaccagcgactctgtgaaactcgctaaacaggtgggctacgagaacgcaggcaccgtggagttcctggtggacaggcacggcaagcactacttcatcgaggtcaactcccgcctgcaggtggagcacacggtcacagaggagatcaccgacgtagacctggtccatgctcagatccacgtggctgagggcaggagcctacccgacctgggcctgcggcaggagaacatccgcatcaacgggtgtgccatccagtgccgggtcaccaccgaggaccccgcgcgcagcttccagccggacaccggccgcattgaggtgttccggagcggagagggcatgggcatccgcctggataatgcttccgccttccaaggagccgtcatctcgccccactacgactccctgctggtcaaagtcattgcccacggcaaagaccaccccacggccgccaccaagatgagcagggcccttgcggagttccgcgtccgaggtgtgaagaccaacatcgccttcctgcagaatgtgctcaacaaccagcagttcctggcaggcactgtggacacccagttcatcgacgagaacccagagctgttccagctgcggcctgcacagaaccgggcccaaaagctgttgcactacctcggccatgtcatggtaaacggtccaaccaccccgattcccgtcaaggccagccccagccccacggaccccgttgtccctgcagtgcccataggcccgcccccggctggtttcagagacatcctgctgcgagaggggcctgagggctttgctcgagctgtgcggaaccacccggggctgctgctgatggacacgaccttcagggacgcccaccagtcactgctggccactcgtgtgcgcacccacgatctcaaaaagatcgccccctatgttgcccacaacttcagcaagctcttcagcatggagaactggggaggagccacgtttgacgtcgccatgcgcttcctgtatgagtgcccctggcggcggctgcaggagctccgggagctcatccccaacatccctttccagatgctgctgcggggggccaatgctgtgggctacaccaactacccagacaacgtggtcttcaagttctgtgaagtggccaaagagaatggcatggatgtcttccgtgtgtttgactccctcaactacttgcccaacatgctgctgggcatggaggcggcaggaagtgccggaggcgtggtggaggctgccatctcatacacgggcgacgtggccgaccccagccgcaccaagtactcactgcagtactacatgggcttggccgaagagctggtgcgagctggcacccacatcctgtgcatcaaggacatggccgggctgctgaagcccacggcctgcaccatgctggtcagctccctccgggaccgcttccccgacctcccactgcacatccacacccacgacacgtcaggggcaggcgtggcagccatgctggcctgtgcccaggctggagctgatgtggtggatgtggcagctgattccatgtctgggatgacttcacagcccagcatgggggccctggtggcctgtaccagagggactcccctggacacagaggtgcccatggagcgcgtgtttgactacagtgagtactgggagggggctcggggactgtacgcggccttcgactgcacggccaccatgaagtctggcaactcggacgtgtatgaaaatgagatcccagggggccagtacaccaacctgcacttccaggcccacagcatggggcttggctccaagttcaaggaggtcaagaaggcctatgtggaggccaaccagatgctgggcgatctcatcaaggtgacgccctcctccaagatcgtgggggacctggcccagtttatggtgcagaatggattgagccgggcagaggccgaagctcaggcggaagagctgtcctttccccgctccgtggtggagttcctgcagggctacatcggtgtcccccatggggggttccccgaaccctttcgctctaaggtactgaaggacctgccaagggtggaggggcggcctggagcctccctccctcccctggatctgcaggcactggagaaggagctggtagaccggcatggggaggaggtgacgccggaagatgtgctctcagcagctatgtaccccgatgtgtttgcccacttcaaggacttcactgccacctttggccccctggatagcctgaatactcgcctcttcctgcagggacccaagatcgcagaggagtttgaggtggagctggagcggggcaagacgctgcacatcaaagccctggccgtgagcgacctgaaccgggccggccagaggcaggtcttctttgagctcaatgggcagctgcggtccatcttggtcaaggacacccaggccatgaaggagatgcacttccaccccaaggccctaaaggacgtgaagggccagatcggggcgcccatgcctgggaaggtgatagacatcaaagtggtggcaggggccaaggtggccaagggccagcccctgtgtgtgctcagtgccatgaagatggagactgtggtgacctcacccatggagggtactgtccgcaaggttcatgtgaccaaggacatgacactggaaggtgacgacctcatcctggagatcgagtgatcttgccccagaccggcagcctggccatccccaagccttcaacagaagctgtgctgccacggcaggcccaggccagccagtgcccgaggccaggaaggccgggccgtggaggtcctgtccacagctggacaggagagacaccgcctgcggtggttcattcctttcagccatcgtcctttcctccggcggacagctgcttacatgttcatctcttgccaaataagggtcccctcctcactggagactacaagtggtgggtcaggtggtcctaggacccaggggaggtttaggggtcctatctcctgggggaaggggagatctaagatgtcccaggtcctgggaagtttactcaataaagctggctttcccctgcc

SEQ ID NO: 69347 - DNA, 3949 bp, Homo sapiens
gggttcttacccatttaaagtttgaccaaacactaaggatgctgaagttccgaacagtccatgggggcctgaggctcctgggaatccgccgaacctccaccgcccccgctgcctccccaaatgtccggcgcctggagtataagcccatcaagaaagtcatggtggccaacagaggtgagattgccatccgtgtgttccgggcctgcacggagctgggcatccgcaccgtagccatctactctgagcaggacacgggccagatgcaccggcagaaagcagatgaagcctatctcatcggccgcggcctggcccccgtgcaggcctacctgcacatcccagacatcatcaaggtggccaaggagaacaacgtagatgcagtgcaccctggctacgggttcctctctgagcgagcggacttcgcccaggcctgccaggatgcaggggtccggtttattgggccaagcccagaagtggtccgcaagatgggagacaaggtggaggcccgggccatcgccattgctgcgggtgttcccgttgtccctggcacagatgcccccatcacgtccctgcatgaggcccacgagttctccaacacctacggcttccccatcatcttcaaggcggcctatgggggtggagggcgtggcatgagggtggtgcacagctacgaggagctggaggagaattacacccgggcctactcagaggctctggccgcctttgggaatggggcgctgtttgtggagaagttcatcgagaagccacggcacatcgaggtgcagatcttgggggaccagtatgggaacatcctgcacctgtacgagcgagactgctccatccagcggcggcaccagaaggtggtcgagattgcccccgccgcccacctggacccgcagcttcggactcggctcaccagcgactctgtgaaactcgctaaacaggtgggctacgagaacgcaggcaccgtggagttcctggtggacaggcacggcaagcactacttcatcgaggtcaactcccgcctgcaggtggagcacacggtcacagaggagatcaccgacgtagacctggtccatgctcagatccacgtggctgagggcaggagcctacccgacctgggcctgcggcaggagaacatccgcatcaacgggtgtgccatccagtgccgggtcaccaccgaggaccccgcgcgcagcttccagccggacaccggccgcattgaggtgttccggagcggagagggcatgggcatccgcctggataatgcttccgccttccaaggagccgtcatctcgccccactacgactccctgctggtcaaagtcattgcccacggcaaagaccaccccacggccgccaccaagatgagcagggcccttgcggagttccgcgtccgaggtgtgaagaccaacatcgccttcctgcagaatgtgctcaacaaccagcagttcctggcaggcactgtggacacccagttcatcgacgagaacccagagctgttccagctgcggcctgcacagaaccgggcccaaaagctgttgcactacctcggccatgtcatggtaaacggtccaaccaccccgattcccgtcaaggccagccccagccccacggaccccgttgtccctgcagtgcccataggcccgcccccggctggtttcagagacatcctgctgcgagaggggcctgagggctttgctcgagctgtgcggaaccacccggggctgctgctgatggacacgaccttcagggacgcccaccagtcactgctggccactcgtgtgcgcacccacgatctcaaaaagatcgccccctatgttgcccacaacttcagcaagctcttcagcatggagaactggggaggagccacgtttgacgtcgccatgcgcttcctgtatgagtgcccctggcggcggctgcaggagctccgggagctcatccccaacatccctttccagatgctgctgcggggggccaatgctgtgggctacaccaactacccagacaacgtggtcttcaagttctgtgaagtggccaaagagaatggcatggatgtcttccgtgtgtttgactccctcaactacttgcccaacatgctgctgggcatggaggcggcaggaagtgccggaggcgtggtggaggctgccatctcatacacgggcgacgtggccgaccccagccgcaccaagtactcactgcagtactacatgggcttggccgaagagctggtgcgagctggcacccacatcctgtgcatcaaggacatggccgggctgctgaagcccacggcctgcaccatgctggtcagctccctccgggaccgcttccccgacctcccactgcacatccacacccacgacacgtcaggggcaggcgtggcagccatgctggcctgtgcccaggctggagctgatgtggtggatgtggcagctgattccatgtctgggatgacttcacagcccagcatgggggccctggtggcctgtaccagagggactcccctggacacagaggtgcccatggagcgcgtgtttgactacagtgagtactgggagggggctcggggactgtacgcggccttcgactgcacggccaccatgaagtctggcaactcggacgtgtatgaaaatgagatcccagggggccagtacaccaacctgcacttccaggcccacagcatggggcttggctccaagttcaaggaggtcaagaaggcctatgtggaggccaaccagatgctgggcgatctcatcaaggtgacgccctcctccaagatcgtgggggacctggcccagtttatggtgcagaatggattgagccgggcagaggccgaagctcaggcggaagagctgtcctttccccgctccgtggtggagttcctgcagggctacatcggtgtcccccatggggggttccccgaaccctttcgctctaaggtactgaaggacctgccaagggtggaggggcggcctggagcctccctccctcccctggatctgcaggcactggagaaggagctggtagaccggcatggggaggaggtgacgccggaagatgtgctctcagcagctatgtaccccgatgtgtttgcccacttcaaggacttcactgccacctttggccccctggatagcctgaatactcgcctcttcctgcagggacccaagatcgcagaggagtttgaggtggagctggagcggggcaagacgctgcacatcaaagccctggccgtgagcgacctgaaccgggccggccagaggcaggtcttctttgagctcaatgggcagctgcggtccatcttggtcaaggacacccaggccatgaaggagatgcacttccaccccaaggccctaaaggacgtgaagggccagatcggggcgcccatgcctgggaaggtgatagacatcaaagtggtggcaggggccaaggtggccaagggccagcccctgtgtgtgctcagtgccatgaagatggagactgtggtgacctcacccatggagggtactgtccgcaaggttcatgtgaccaaggacatgacactggaaggtgacgacctcatcctggagatcgagtgatcttgccccagaccggcagcctggccatccccaagccttcaacagaagctgtgctgccacggcaggcccaggccagccagtgcccgaggccaggaaggccgggccgtggaggtcctgtccacagctggacaggagagacaccgcctgcggtggttcattcctttcagccatcgtcctttcctccggcggacagctgcttacatgttcatctcttgccaaataagggtcccctcctcactggagactacaagtggtgggtcaggtggtcctaggacccaggggaggtttaggggtcctatctcctgggggaaggggagatctaagatgtcccaggtcctgggaagtttactcaataaagctggctttcccctgcc

SEQ ID NO: 69348 - DNA, 4336 bp, Homo sapiens
agttctggaaagtcattgacaggggattaacctagaacatcaattataaacaggcagcaggcctcaggcccagacttgggtgttacaggaacagtgtggcctctctggaactctgcagaccaactgccgtgatgctgaagttccgaacagtccatgggggcctgaggctcctgggaatccgccgaacctccaccgcccccgctgcctccccaaatgtccggcgcctggagtataagcccatcaagaaagtcatggtggccaacagaggtgagattgccatccgtgtgttccgggcctgcacggagctgggcatccgcaccgtagccatctactctgagcaggacacgggccagatgcaccggcagaaagcagatgaagcctatctcatcggccgcggcctggcccccgtgcaggcctacctgcacatcccagacatcatcaaggtggccaaggagaacaacgtagatgcagtgcaccctggctacgggttcctctctgagcgagcggacttcgcccaggcctgccaggatgcaggggtccggtttattgggccaagcccagaagtggtccgcaagatgggagacaaggtggaggcccgggccatcgccattgctgcgggtgttcccgttgtccctggcacagatgcccccatcacgtccctgcatgaggcccacgagttctccaacacctacggcttccccatcatcttcaaggcggcctatgggggtggagggcgtggcatgagggtggtgcacagctacgaggagctggaggagaattacacccgggcctactcagaggctctggccgcctttgggaatggggcgctgtttgtggagaagttcatcgagaagccacggcacatcgaggtgcagatcttgggggaccagtatgggaacatcctgcacctgtacgagcgagactgctccatccagcggcggcaccagaaggtggtcgagattgcccccgccgcccacctggacccgcagcttcggactcggctcaccagcgactctgtgaaactcgctaaacaggtgggctacgagaacgcaggcaccgtggagttcctggtggacaggcacggcaagcactacttcatcgaggtcaactcccgcctgcaggtggagcacacggtcacagaggagatcaccgacgtagacctggtccatgctcagatccacgtggctgagggcaggagcctacccgacctgggcctgcggcaggagaacatccgcatcaacgggtgtgccatccagtgccgggtcaccaccgaggaccccgcgcgcagcttccagccggacaccggccgcattgaggtgttccggagcggagagggcatgggcatccgcctggataatgcttccgccttccaaggagccgtcatctcgccccactacgactccctgctggtcaaagtcattgcccacggcaaagaccaccccacggccgccaccaagatgagcagggcccttgcggagttccgcgtccgaggtgtgaagaccaacatcgccttcctgcagaatgtgctcaacaaccagcagttcctggcaggcactgtggacacccagttcatcgacgagaacccagagctgttccagctgcggcctgcacagaaccgggcccaaaagctgttgcactacctcggccatgtcatggtaaacggtccaaccaccccgattcccgtcaaggccagccccagccccacggaccccgttgtccctgcagtgcccataggcccgcccccggctggtttcagagacatcctgctgcgagaggggcctgagggctttgctcgagctgtgcggaaccacccggggctgctgctgatggacacgaccttcagggacgcccaccagtcactgctggccactcgtgtgcgcacccacgatctcaaaaagatcgccccctatgttgcccacaacttcagcaagctcttcagcatggagaactggggaggagccacgtttgacgtcgccatgcgcttcctgtatgagtgcccctggcggcggctgcaggagctccgggagctcatccccaacatccctttccagatgctgctgcggggggccaatgctgtgggctacaccaactacccagacaacgtggtcttcaagttctgtgaagtggccaaagagaatggcatggatgtcttccgtgtgtttgactccctcaactacttgcccaacatgctgctgggcatggaggcggcaggaagtgccggaggcgtggtggaggctgccatctcatacacgggcgacgtggccgaccccagccgcaccaagtactcactgcagtactacatgggcttggccgaagagctggtgcgagctggcacccacatcctgtgcatcaaggacatggccgggctgctgaagcccacggcctgcaccatgctggtcagctccctccgggaccgcttccccgacctcccactgcacatccacacccacgacacgtcaggggcaggcgtggcagccatgctggcctgtgcccaggctggagctgatgtggtggatgtggcagctgattccatgtctgggatgacttcacagcccagcatgggggccctggtggcctgtaccagagggactcccctggacacagaggtgcccatggagcgcgtgtttgactacagtgagtactgggagggggctcggggactgtacgcggccttcgactgcacggccaccatgaagtctggcaactcggacgtgtatgaaaatgagatcccagggggccagtacaccaacctgcacttccaggcccacagcatggggcttggctccaagttcaaggaggtcaagaaggcctatgtggaggccaaccagatgctgggcgatctcatcaaggtgacgccctcctccaagatcgtgggggacctggcccagtttatggtgcagaatggattgagccgggcagaggccgaagctcaggcggaagagctgtcctttccccgctccgtggtggagttcctgcagggctacatcggtgtcccccatggggggttccccgaaccctttcgctctaaggtactgaaggacctgccaagggtggaggggcggcctggagcctccctccctcccctggatctgcaggcactggagaaggagctggtagaccggcatggggaggaggtgacgccggaagatgtgctctcagcagctatgtaccccgatgtgtttgcccacttcaaggacttcactgccacctttggccccctggatagcctgaatactcgcctcttcctgcagggacccaagatcgcagaggagtttgaggtggagctggagcggggcaagacgctgcacatcaaagccctggccgtgagcgacctgaaccgggccggccagaggcaggtcttctttgagctcaatgggcagctgcggtccatcttggtcaaggacacccaggccatgaaggagatgcacttccaccccaaggccctaaaggacgtgaagggccagatcggggcgcccatgcctgggaaggtgatagacatcaaagtggtggcaggggccaaggtggccaagggccagcccctgtgtgtgctcagtgccatgaagatggagactgtggtgacctcacccatggagggtactgtccgcaaggttcatgtgaccaaggacatgacactggaaggtgacgacctcatcctggagatcgagtgatcttgccccagaccggcagcctggccatccccaagccttcaacagaagctgtgctgccacggcaggcccaggccagccagtgcccgaggccaggaaggccgggccgtggaggtcctgtccacagctggacaggagagacaccgcctgcggtggttcattcctttcagccatcgtcctttcctccggcggacagctgcttacatgttcatctcttgccaaataagggtcccctcctcactggagactacaagtggtgggtcaggtggtcctaggacccaggggaggtttaggggtcctatctcctgggggaaggggagatctaagatgtcccaggtcctgggaagtttactcaataaagctggctttcccctgccctcccatgctggatcctgtgcagcccccagcctgcaccactcagcagtggggggctgcctttcaagctccccatgggtgggcaggtcagttgtgtcgttctcctcagagggtagtgagaatgaccatcgtggccctgttttaagtcactattgggtgcctactgtgtatactccccaaacaggactagtagtactgaacttgcttgaggggtggggcctgttctaagtatttaacacctattaacacagggaattaaccttcatcctcttatggacacagaaatcaagtcacag

SEQ ID NO: 69349 - DNA, 462 bp, Homo sapiens
agttctggaaagtcattgacaggggattaacctagaacatcaattataaacaggcagcaggcctcaggcccagacttgggtgttacaggaacagtgtggcctctctggaactctgcagaccaactgccgtggtaagagaaccgactttcagaggcctctaggcactttgtcctgggtaggggtgcccacacatcctggccattgttgctcttccctctggaacttggcagctttctagcagttagaagagcagagggtagaaggatgggaacagtccttagagaacaggaatctaggggagggttggactagatcatttctcaagagctgtggggactgttctggtcaggcatgggcaagctgaggggcaggaggtaggcaaaccctacttgacctgagaacagatttgttgttgttttgtttttgtttttgagcctgggtgatagagtgagactccatctc

SEQ ID NO: 69350 - DNA, 4204 bp, Homo sapiens
agctgttctctgtcagtggaggcagcagcggtagaggcggcggcgaggactggcgacggcgaggagctgccttctagtctcacctgtggacactttgccaaaggagtcgggcctgacggtggaagatgggaaatggccaaaagaataaaccatttcctcttacttaccgaatgaaaagcttgcttcatcttggcgttcaagactctctaatatgattccacctgttgggctctttcttccatttgcctccgcagatagtgtctgccttctggagagctgaccaaacactaaggatgctgaagttccgaacagtccatgggggcctgaggctcctgggaatccgccgaacctccaccgcccccgctgcctccccaaatgtccggcgcctggagtataagcccatcaagaaagtcatggtggccaacagaggtgagattgccatccgtgtgttccgggcctgcacggagctgggcatccgcaccgtagccatctactctgagcaggacacgggccagatgcaccggcagaaagcagatgaagcctatctcatcggccgcggcctggcccccgtgcaggcctacctgcacatcccagacatcatcaaggtggccaaggagaacaacgtagatgcagtgcaccctggctacgggttcctctctgagcgagcggacttcgcccaggcctgccaggatgcaggggtccggtttattgggccaagcccagaagtggtccgcaagatgggagacaaggtggaggcccgggccatcgccattgctgcgggtgttcccgttgtccctggcacagatgcccccatcacgtccctgcatgaggcccacgagttctccaacacctacggcttccccatcatcttcaaggcggcctatgggggtggagggcgtggcatgagggtggtgcacagctacgaggagctggaggagaattacacccgggcctactcagaggctctggccgcctttgggaatggggcgctgtttgtggagaagttcatcgagaagccacggcacatcgaggtgcagatcttgggggaccagtatgggaacatcctgcacctgtacgagcgagactgctccatccagcggcggcaccagaaggtggtcgagattgcccccgccgcccacctggacccgcagcttcggactcggctcaccagcgactctgtgaaactcgctaaacaggtgggctacgagaacgcaggcaccgtggagttcctggtggacaggcacggcaagcactacttcatcgaggtcaactcccgcctgcaggtggagcacacggtcacagaggagatcaccgacgtagacctggtccatgctcagatccacgtggctgagggcaggagcctacccgacctgggcctgcggcaggagaacatccgcatcaacgggtgtgccatccagtgccgggtcaccaccgaggaccccgcgcgcagcttccagccggacaccggccgcattgaggtgttccggagcggagagggcatgggcatccgcctggataatgcttccgccttccaaggagccgtcatctcgccccactacgactccctgctggtcaaagtcattgcccacggcaaagaccaccccacggccgccaccaagatgagcagggcccttgcggagttccgcgtccgaggtgtgaagaccaacatcgccttcctgcagaatgtgctcaacaaccagcagttcctggcaggcactgtggacacccagttcatcgacgagaacccagagctgttccagctgcggcctgcacagaaccgggcccaaaagctgttgcactacctcggccatgtcatggtaaacggtccaaccaccccgattcccgtcaaggccagccccagccccacggaccccgttgtccctgcagtgcccataggcccgcccccggctggtttcagagacatcctgctgcgagaggggcctgagggctttgctcgagctgtgcggaaccacccggggctgctgctgatggacacgaccttcagggacgcccaccagtcactgctggccactcgtgtgcgcacccacgatctcaaaaagatcgccccctatgttgcccacaacttcagcaagctcttcagcatggagaactggggaggagccacgtttgacgtcgccatgcgcttcctgtatgagtgcccctggcggcggctgcaggagctccgggagctcatccccaacatccctttccagatgctgctgcggggggccaatgctgtgggctacaccaactacccagacaacgtggtcttcaagttctgtgaagtggccaaagagaatggcatggatgtcttccgtgtgtttgactccctcaactacttgcccaacatgctgctgggcatggaggcggcaggaagtgccggaggcgtggtggaggctgccatctcatacacgggcgacgtggccgaccccagccgcaccaagtactcactgcagtactacatgggcttggccgaagagctggtgcgagctggcacccacatcctgtgcatcaaggacatggccgggctgctgaagcccacggcctgcaccatgctggtcagctccctccgggaccgcttccccgacctcccactgcacatccacacccacgacacgtcaggggcaggcgtggcagccatgctggcctgtgcccaggctggagctgatgtggtggatgtggcagctgattccatgtctgggatgacttcacagcccagcatgggggccctggtggcctgtaccagagggactcccctggacacagaggtgcccatggagcgcgtgtttgactacagtgagtactgggagggggctcggggactgtacgcggccttcgactgcacggccaccatgaagtctggcaactcggacgtgtatgaaaatgagatcccagggggccagtacaccaacctgcacttccaggcccacagcatggggcttggctccaagttcaaggaggtcaagaaggcctatgtggaggccaaccagatgctgggcgatctcatcaaggtgacgccctcctccaagatcgtgggggacctggcccagtttatggtgcagaatggattgagccgggcagaggccgaagctcaggcggaagagctgtcctttccccgctccgtggtggagttcctgcagggctacatcggtgtcccccatggggggttccccgaaccctttcgctctaaggtactgaaggacctgccaagggtggaggggcggcctggagcctccctccctcccctggatctgcaggcactggagaaggagctggtagaccggcatggggaggaggtgacgccggaagatgtgctctcagcagctatgtaccccgatgtgtttgcccacttcaaggacttcactgccacctttggccccctggatagcctgaatactcgcctcttcctgcagggacccaagatcgcagaggagtttgaggtggagctggagcggggcaagacgctgcacatcaaagccctggccgtgagcgacctgaaccgggccggccagaggcaggtcttctttgagctcaatgggcagctgcggtccatcttggtcaaggacacccaggccatgaaggagatgcacttccaccccaaggccctaaaggacgtgaagggccagatcggggcgcccatgcctgggaaggtgatagacatcaaagtggtggcaggggccaaggtggccaagggccagcccctgtgtgtgctcagtgccatgaagatggagactgtggtgacctcacccatggagggtactgtccgcaaggttcatgtgaccaaggacatgacactggaaggtgacgacctcatcctggagatcgagtgatcttgccccagaccggcagcctggccatccccaagccttcaacagaagctgtgctgccacggcaggcccaggccagccagtgcccgaggccaggaaggccgggccgtggaggtcctgtccacagctggacaggagagacaccgcctgcggtggttcattcctttcagccatcgtcctttcctccggcggacagctgcttacatgttcatctcttgccaaataagggtcccctcctcactggagactacaagtggtgggtcaggtggtcctaggacccaggggaggtttaggggtcctatctcctgggggaaggggagatctaagatgtcccaggtcctgggaagtttactcaataaagctggctttcccctgcc

SEQ ID NO: 69351 - DNA, 3947 bp, Homo sapiens
agctgttctctgtcagtggaggcagcagcggtagaggcggcggcgaggactggcgacggcgaggagatagtgtctgccttctggagagctgaccaaacactaaggatgctgaagttccgaacagtccatgggggcctgaggctcctgggaatccgccgaacctccaccgcccccgctgcctccccaaatgtccggcgcctggagtataagcccatcaagaaagtcatggtggccaacagaggtgagattgccatccgtgtgttccgggcctgcacggagctgggcatccgcaccgtagccatctactctgagcaggacacgggccagatgcaccggcagaaagcagatgaagcctatctcatcggccgcggcctggcccccgtgcaggcctacctgcacatcccagacatcatcaaggtggccaaggagaacaacgtagatgcagtgcaccctggctacgggttcctctctgagcgagcggacttcgcccaggcctgccaggatgcaggggtccggtttattgggccaagcccagaagtggtccgcaagatgggagacaaggtggaggcccgggccatcgccattgctgcgggtgttcccgttgtccctggcacagatgcccccatcacgtccctgcatgaggcccacgagttctccaacacctacggcttccccatcatcttcaaggcggcctatgggggtggagggcgtggcatgagggtggtgcacagctacgaggagctggaggagaattacacccgggcctactcagaggctctggccgcctttgggaatggggcgctgtttgtggagaagttcatcgagaagccacggcacatcgaggtgcagatcttgggggaccagtatgggaacatcctgcacctgtacgagcgagactgctccatccagcggcggcaccagaaggtggtcgagattgcccccgccgcccacctggacccgcagcttcggactcggctcaccagcgactctgtgaaactcgctaaacaggtgggctacgagaacgcaggcaccgtggagttcctggtggacaggcacggcaagcactacttcatcgaggtcaactcccgcctgcaggtggagcacacggtcacagaggagatcaccgacgtagacctggtccatgctcagatccacgtggctgagggcaggagcctacccgacctgggcctgcggcaggagaacatccgcatcaacgggtgtgccatccagtgccgggtcaccaccgaggaccccgcgcgcagcttccagccggacaccggccgcattgaggtgttccggagcggagagggcatgggcatccgcctggataatgcttccgccttccaaggagccgtcatctcgccccactacgactccctgctggtcaaagtcattgcccacggcaaagaccaccccacggccgccaccaagatgagcagggcccttgcggagttccgcgtccgaggtgtgaagaccaacatcgccttcctgcagaatgtgctcaacaaccagcagttcctggcaggcactgtggacacccagttcatcgacgagaacccagagctgttccagctgcggcctgcacagaaccgggcccaaaagctgttgcactacctcggccatgtcatggtaaacggtccaaccaccccgattcccgtcaaggccagccccagccccacggaccccgttgtccctgcagtgcccataggcccgcccccggctggtttcagagacatcctgctgcgagaggggcctgagggctttgctcgagctgtgcggaaccacccggggctgctgctgatggacacgaccttcagggacgcccaccagtcactgctggccactcgtgtgcgcacccacgatctcaaaaagatcgccccctatgttgcccacaacttcagcaagctcttcagcatggagaactggggaggagccacgtttgacgtcgccatgcgcttcctgtatgagtgcccctggcggcggctgcaggagctccgggagctcatccccaacatccctttccagatgctgctgcggggggccaatgctgtgggctacaccaactacccagacaacgtggtcttcaagttctgtgaagtggccaaagagaatggcatggatgtcttccgtgtgtttgactccctcaactacttgcccaacatgctgctgggcatggaggcggcaggaagtgccggaggcgtggtggaggctgccatctcatacacgggcgacgtggccgaccccagccgcaccaagtactcactgcagtactacatgggcttggccgaagagctggtgcgagctggcacccacatcctgtgcatcaaggacatggccgggctgctgaagcccacggcctgcaccatgctggtcagctccctccgggaccgcttccccgacctcccactgcacatccacacccacgacacgtcaggggcaggcgtggcagccatgctggcctgtgcccaggctggagctgatgtggtggatgtggcagctgattccatgtctgggatgacttcacagcccagcatgggggccctggtggcctgtaccagagggactcccctggacacagaggtgcccatggagcgcgtgtttgactacagtgagtactgggagggggctcggggactgtacgcggccttcgactgcacggccaccatgaagtctggcaactcggacgtgtatgaaaatgagatcccagggggccagtacaccaacctgcacttccaggcccacagcatggggcttggctccaagttcaaggaggtcaagaaggcctatgtggaggccaaccagatgctgggcgatctcatcaaggtgacgccctcctccaagatcgtgggggacctggcccagtttatggtgcagaatggattgagccgggcagaggccgaagctcaggcggaagagctgtcctttccccgctccgtactgaaggacctgccaagggtggaggggcggcctggagcctccctccctcccctggatctgcaggcactggagaaggagctggtagaccggcatggggaggaggtgacgccggaagatgtgctctcagcagctatgtaccccgatgtgtttgcccacttcaaggacttcactgccacctttggccccctggatagcctgaatactcgcctcttcctgcagggacccaagatcgcagaggagtttgaggtggagctggagcggggcaagacgctgcacatcaaagccctggccgtgagcgacctgaaccgggccggccagaggcaggtcttctttgagctcaatgggcagctgcggtccatcttggtcaaggacacccaggccatgaaggagatgcacttccaccccaaggccctaaaggacgtgaagggccagatcggggcgcccatgcctgggaaggtgatagacatcaaagtggtggcaggggccaaggtggccaagggccagcccctgtgtgtgctcagtgccatgaagatggagactgtggtgacctcacccatggagggtactgtccgcaaggttcatgtgaccaaggacatgacactggaaggtgacgacctcatcctggagatcgagtgatcttgccccagaccggcagcctggccatccccaagccttcaacagaagctgtgctgccacggcaggcccaggccagccagtgcccgaggccaggaaggccgggccgtggaggtcctgtccacagctggacaggagagacaccgcctgcggtggttcattcctttcagccatcgtcctttcctccggcggacagctgcttacatgttcatctcttgccaaataagggtcccctcctcactggagactacaagtggtgggtcaggtggtcctaggacccaggggaggtttaggggtcctatctcctgggggaaggggagatctaagatgtcccaggtcctgggaagtttactcaataaagctggctttcccctgcc

SEQ ID NO: 69352 - DNA, 4020 bp, Homo sapiens
  misc_feature (3978)..(3978): n is a, c, g, or t
  misc_feature (3998)..(3998): n is a, c, g, or t
  misc_feature (4002)..(4002): n is a, c, g, or t
  misc_feature (4004)..(4004): n is a, c, g, or t
agctgttctctgtcagtggaggcagcagcggtagaggcggcggcgaggactggcgacggcgaggagatagtgtctgccttctggagagctgaccaaacactaaggatgctgaagttccgaacagtccatgggggcctgaggctcctgggaatccgccgaacctccaccgcccccgctgcctccccaaatgtccggcgcctggagtataagcccatcaagaaagtcatggtggccaacagaggtgagattgccatccgtgtgttccgggcctgcacggagctgggcatccgcaccgtagccatctactctgagcaggacacgggccagatgcaccggcagaaagcagatgaagcctatctcatcggccgcggcctggcccccgtgcaggcctacctgcacatcccagacatcatcaaggtggccaaggagaacaacgtagatgcagtgcaccctggctacgggttcctctctgagcgagcggacttcgcccaggcctgccaggatgcaggggtccggtttattgggccaagcccagaagtggtccgcaagatgggagacaaggtggaggcccgggccatcgccattgctgcgggtgttcccgttgtccctggcacagatgcccccatcacgtccctgcatgaggcccacgagttctccaacacctacggcttccccatcatcttcaaggcggcctatgggggtggagggcgtggcatgagggtggtgcacagctacgaggagctggaggagaattacacccgggcctactcagaggctctggccgcctttgggaatggggcgctgtttgtggagaagttcatcgagaagccacggcacatcgaggtgcagatcttgggggaccagtatgggaacatcctgcacctgtacgagcgagactgctccatccagcggcggcaccagaaggtggtcgagattgcccccgccgcccacctggacccgcagcttcggactcggctcaccagcgactctgtgaaactcgctaaacaggtgggctacgagaacgcaggcaccgtggagttcctggtggacaggcacggcaagcactacttcatcgaggtcaactcccgcctgcaggtggagcacacggtcacagaggagatcaccgacgtagacctggtccatgctcagatccacgtggctgagggcaggagcctacccgacctgggcctgcggcaggagaacatccgcatcaacgggtgtgccatccagtgccgggtcaccaccgaggaccccgcgcgcagcttccagccggacaccggccgcattgaggtgttccggagcggagagggcatgggcatccgcctggataatgcttccgccttccaaggagccgtcatctcgccccactacgactccctgctggtcaaagtcattgcccacggcaaagaccaccccacggccgccaccaagatgagcagggcccttgcggagttccgcgtccgaggtgtgaagaccaacatcgccttcctgcagaatgtgctcaacaaccagcagttcctggcaggcactgtggacacccagttcatcgacgagaacccagagctgttccagctgcggcctgcacagaaccgggcccaaaagctgttgcactacctcggccatgtcatggtaaacggtccaaccaccccgattcccgtcaaggccagccccagccccacggaccccgttgtccctgcagtgcccataggcccgcccccggctggtttcagagacatcctgctgcgagaggggcctgagggctttgctcgagctgtgcggaaccacccggggctgctgctgatggacacgaccttcagggacgcccaccagtcactgctggccactcgtgtgcgcacccacgatctcaaaaagatcgccccctatgttgcccacaacttcagcaagctcttcagcatggagaactggggaggagccacgtttgacgtcgccatgcgcttcctgtatgagtgcccctggcggcggctgcaggagctccgggagctcatccccaacatccctttccagatgctgctgcggggggccaatgctgtgggctacaccaactacccagacaacgtggtcttcaagttctgtgaagtggccaaagagaatggcatggatgtcttccgtgtgtttgactccctcaactacttgcccaacatgctgctgggcatggaggcggcaggaagtgccggaggcgtggtggaggctgccatctcatacacgggcgacgtggccgaccccagccgcaccaagtactcactgcagtactacatgggcttggccgaagagctggtgcgagctggcacccacatcctgtgcatcaaggacatggccgggctgctgaagcccacggcctgcaccatgctggtcagctccctccgggaccgcttccccgacctcccactgcacatccacacccacgacacgtcaggggcaggcgtggcagccatgctggcctgtgcccaggctggagctgatgtggtggatgtggcagctgattccatgtctgggatgacttcacagcccagcatgggggccctggtggcctgtaccagagggactcccctggacacagaggtgcccatggagcgcgtgtttgactacagtgagtactgggagggggctcggggactgtacgcggccttcgactgcacggccaccatgaagtctggcaactcggacgtgtatgaaaatgagatcccagggggccagtacaccaacctgcacttccaggcccacagcatggggcttggctccaagttcaaggaggtcaagaaggcctatgtggaggccaaccagatgctgggcgatctcatcaaggtgacgccctcctccaagatcgtgggggacctggcccagtttatggtgcagaatggattgagccgggcagaggccgaagctcaggcggaagagctgtcctttccccgctccgtggtggagttcctgcagggctacatcggtgtcccccatggggggttccccgaaccctttcgctctaaggtactgaaggacctgccaagggtggaggggcggcctggagcctccctccctcccctggatctgcaggcactggagaaggagctggtagaccggcatggggaggaggtgacgccggaagatgtgctctcagcagctatgtaccccgatgtgtttgcccacttcaaggacttcactgccacctttggccccctggatagcctgaatactcgcctcttcctgcagggacccaagatcgcagaggagtttgaggtggagctggagcggggcaagacgctgcacatcaaagccctggccgtgagcgacctgaaccgggccggccagaggcaggtcttctttgagctcaatgggcagctgcggtccatcttggtcaaggacacccaggccatgaaggagatgcacttccaccccaaggccctaaaggacgtgaagggccagatcggggcgcccatgcctgggaaggtgatagacatcaaagtggtggcaggggccaaggtggccaagggccagcccctgtgtgtgctcagtgccatgaagatggagactgtggtgacctcacccatggagggtactgtccgcaaggttcatgtgaccaaggacatgacactggaaggtgacgacctcatcctggagatcgagtgatcttgccccagaccggcagcctggccatccccaagccttcaacagaagctgtgctgccacggcaggcccaggccagccagtgcccgaggccaggaaggccgggccgtggaggtcctgtccacagctggacaggagagacaccgcctgcggtggttcattcctttcagccatcgtcctttcctccggcggacagctgcttacatgttcatctcttgccaaataagggtcccctcctcactggagactacaagtggtgggtcaggtggtcctaggacccaggggaggtttaggggtcctatctcctgggggaaggggagatctaagatgttgtcacanttatcacacctcggagaggnttancntcaataagtcgtttcc

SEQ ID NO: 69353 - DNA, 4098 bp, Homo sapiens
agctgttctctgtcagtggaggcagcagcggtagaggcggcggcgaggactggcgacggcgaggagatagtgtctgccttctggagagctgaccaaacactaaggatgctgaagttccgaacagtccatgggggcctgaggctcctgggaatccgccgaacctccaccgcccccgctgcctccccaaatgtccggcgcctggagtataagcccatcaagaaagtcatggtggccaacagaggtgagattgccatccgtgtgttccgggcctgcacggagctgggcatccgcaccgtagccatctactctgagcaggacacgggccagatgcaccggcagaaagcagatgaagcctatctcatcggccgcggcctggcccccgtgcaggcctacctgcacatcccagacatcatcaaggtggccaaggagaacaacgtagatgcagtgcaccctggctacgggttcctctctgagcgagcggacttcgcccaggcctgccaggatgcaggggtccggtttattgggccaagcccagaagtggtccgcaagatgggagacaaggtggaggcccgggccatcgccattgctgcgggtgttcccgttgtccctggcacagatgcccccatcacgtccctgcatgaggcccacgagttctccaacacctacggcttccccatcatcttcaaggcggcctatgggggtggagggcgtggcatgagggtggtgcacagctacgaggagctggaggagaattacacccgggcctactcagaggctctggccgcctttgggaatggggcgctgtttgtggagaagttcatcgagaagccacggcacatcgaggtgcagatcttgggggaccagtatgggaacatcctgcacctgtacgagcgagactgctccatccagcggcggcaccagaaggtggtcgagattgcccccgccgcccacctggacccgcagcttcggactcggctcaccagcgactctgtgaaactcgctaaacaggtgggctacgagaacgcaggcaccgtggagttcctggtggacaggcacggcaagcactacttcatcgaggtcaactcccgcctgcaggtggagcacacggtcacagaggagatcaccgacgtagacctggtccatgctcagatccacgtggctgagggcaggagcctacccgacctgggcctgcggcaggagaacatccgcatcaacgggtgtgccatccagtgccgggtcaccaccgaggaccccgcgcgcagcttccagccggacaccggccgcattgaggtgttccggagcggagagggcatgggcatccgcctggataatgcttccgccttccaaggagccgtcatctcgccccactacgactccctgctggtcaaagtcattgcccacggcaaagaccaccccacggccgccaccaagatgagcagggcccttgcggagttccgcgtccgaggtgtgaagaccaacatcgccttcctgcagaatgtgctcaacaaccagcagttcctggcaggcactgtggacacccagttcatcgacgagaacccagagctgttccagctgcggcctgcacagaaccgggcccaaaagctgttgcactacctcggccatgtcatggtaaacggtccaaccaccccgattcccgtcaaggccagccccagccccacggaccccgttgtccctgcagtgcccataggcccgcccccggctggtttcagagacatcctgctgcgagaggggcctgagggctttgctcgagctgtgcggaaccacccggggctgctgctgatggacacgaccttcagggacgcccaccagtcactgctggccactcgtgtgcgcacccacgatctcaaaaagatcgccccctatgttgcccacaacttcagcaagctcttcagcatggagaactggggaggagccacgtttgacgtcgccatgcgcttcctgtatgagtgcccctggcggcggctgcaggagctccgggagctcatccccaacatccctttccagatgctgctgcggggggccaatgctgtgggctacaccaactacccagacaacgtggtcttcaagttctgtgaagtggccaaagagaatggcatggatgtcttccgtgtgtttgactccctcaactacttgcccaacatgctgctgggcatggaggcggcaggaagtgccggaggcgtggtggaggctgccatctcatacacgggcgacgtggccgaccccagccgcaccaagtactcactgcagtactacatgggcttggccgaagagctggtgcgagctggcacccacatcctgtgcatcaaggacatggccgggctgctgaagcccacggcctgcaccatgctggtcagctccctccgggaccgcttccccgacctcccactgcacatccacacccacgacacgtcaggggcaggcgtggcagccatgctggcctgtgcccaggctggagctgatgtggtggatgtggcagctgattccatgtctgggatgacttcacagcccagcatgggggccctggtggcctgtaccagagggactcccctggacacagaggtgcccatggagcgcgtgtttgactacagtgagtactgggagggggctcggggactgtacgcggccttcgactgcacggccaccatgaagtctggcaactcggacgtgtatgaaaatgagatcccagggggccagtacaccaacctgcacttccaggcccacagcatggggcttggctccaagttcaaggaggtcaagaaggcctatgtggaggccaaccagatgctgggcgatctcatcaaggtgacgccctcctccaagatcgtgggggacctggcccagtttatggtgcagaatggattgagccgggcagaggccgaagctcaggcggaagagctgtcctttccccgctccgtggtggagttcctgcagggctacatcggtgtcccccatggggggttccccgaaccctttcgctctaaggtactgaaggacctgccaagggtggaggggcggcctggagcctccctccctcccctggatctgcaggcactggagaaggagctggtagaccggcatggggaggaggtgacgccggaagatgtgctctcagcagctatgtaccccgatgtgtttgcccacttcaaggacttcactgccacctttggccccctggatagcctgaatactcgcctcttcctgcagggacccaagatcgcagaggagtttgaggtggagctggagcggggcaagacgctgcacatcaaagccctggccgtgagcgacctgaaccgggccggccagaggcaggtcttctttgagctcaatgggcagctgcggtccatcttggtcaaggacacccaggccatgaaggtattgtctcccccagggccagccaggcggtggggcttggctgggcccaggatgtcatgtcccctctgccctgtgtcttcaggagatgcacttccaccccaaggccctaaaggacgtgaagggccagatcggggcgcccatgcctgggaaggtgatagacatcaaagtggtggcaggggccaaggtggccaagggccagcccctgtgtgtgctcagtgccatgaagatggagactgtggtgacctcacccatggagggtactgtccgcaaggttcatgtgaccaaggacatgacactggaaggtgacgacctcatcctggagatcgagtgatcttgccccagaccggcagcctggccatccccaagccttcaacagaagctgtgctgccacggcaggcccaggccagccagtgcccgaggccaggaaggccgggccgtggaggtcctgtccacagctggacaggagagacaccgcctgcggtggttcattcctttcagccatcgtcctttcctccggcggacagctgcttacatgttcatctcttgccaaataagggtcccctcctcactggagactacaagtggtgggtcaggtggtcctaggacccaggggaggtttaggggtcctatctcctgggggaaggggagatctaagatgtcccaggtcctgggaagtttactcaataaagctggctttcccctgcc

SEQ ID NO: 69354 - DNA, 1180 bp, Homo sapiens
aaggtgtacccggagtacgggattcgtcgaccggcgtcaatggattgagccgggcagaggccgaagctcaggcggaagagctgtcctttccccgctccgtggtggagttcctgcagggctacatcggtgtcccccatggggggttccccgaaccctttcgctctaaggtactgaaggacctgccaagggtggaggggcggcctggagcctccctccctcccctggatctgcaggcactggagaaggagctggtagaccggcatggggaggaggtgacgccggaagatgtgctctcagcagctatgtaccccgatgtgtttgcccacttcaaggacttcactgccacctttggccccctggatagcctgaatactcgcctcttcctgcagggacccaagatcgcagaggagtttgaggtggagctggagcggggcaagacgctgcacatcaaagccctggccgtgagcgacctgaaccgggccggccagaggcaggtcttctttgagctcaatgggcagctgcggtccatcttggtcaaggacacccaggccatgaaggagatgcacttccaccccaaggccctaaaggacgtgaagggccagatcggggcgcccatgcctgggaaggtgatagacatcaaagtggtggcaggggccaaggtggccaagggccagcccctgtgtgtgctcagtgccatgaagatggagactgtggtgacctcacccatggagggtactgtccgcaaggttcatgtgaccaaggacatgacactggaaggtgacgacctcatcctggagatcgagtgatcttgccccagaccggcagcctggccatccccaagccttcaacagaagctgtgctgccacggcaggcccaggccagccagtgcccgaggccaggaaggccgggccgtggaggtcctgtccacagctggacaggagagacaccgcctgcggtggttcattcctttcagccatcgtcctttcctccggcggacagctgcttacatgttcatctcttgccaaataagggtcccctcctcactggagactacaagtggtgggtcaggtggtcctaggacccaggggaggtttaggggtcctatctcctgggggaaggggagatctaagatgtcccaggtcctgggaagtttactcaataaagctggctttcccctgcc

SEQ ID NO: 69355 - DNA, 1298 bp, Homo sapiens
agagagggactcccctggacacagaggtgcccatggagcgcgtgtttgactacagtgagtactgggagggggctcggggactgtacgcggccttcgactgcacggccaccatgaagtctggcaactcggacgtgtatgaaaatgagatcccagggggccagtacaccaacctgcacttccaggcccacagcatggggcttggctccaagttcaaggaggtcaagaaggcctatgtggaggccaaccagatgctgggcgatctcatcaaggtgacgccctcctccaagatcgtgggggacctggcccagtttatggtgcagaatggattgagccgggcagaggccgaagctcaggcggaagagctgtcctttccccgctccgtggtggagttcctgcagggctacatcggtgtcccccatggggggttccccgaaccctttcgctctaagggacttcactgccacctttggccccctggatagcctgaatactcgcctcttcctgcagggacccaagatcgcagaggagtttgaggtggagctggagcggggcaagacgctgcacatcaaagccctggccgtgagcgacctgaaccgggccggccagaggcaggtcttctttgagctcaatgggcagctgcggtccatcttggtcaaggacacccaggccatgaaggagatgcacttccaccccaaggccctaaaggacgtgaagggccagatcggggcgcccatgcctgggaaggtgatagacatcaaagtggtggcaggggccaaggtggccaagggccagcccctgtgtgtgctcagtgccatgaagatggagactgtggtgacctcacccatggagggtactgtccgcaaggttcatgtgaccaaggacatgacactggaaggtgacgacctcatcctggagatcgagtgatcttgccccagaccggcagcctggccatccccaagccttcaacagaagctgtgctgccacggcaggcccaggccagccagtgcccgaggccaggaaggccgggccgtggaggtcctgtccacagctggacaggagagacaccgcctgcggtggttcattcctttcagccatcgtcctttcctccggcggacagctgcttacatgttcatctcttgccaaataagggtcccctcctcactggagactacaagtggtgggtcaggtggtcctaggacccaggggaggtttaggggtcctatctcctgggggaaggggagatctaagatgtcccaggtcctgggaagtttactcaataaagctggctttcccctgcc

SEQ ID NO: 69356 - DNA, 3257 bp, Homo sapiens
agctgttctctgtcagtggaggcagcagcggtagaggcggcggcgaggactggcgacggcgaggagatagtgtctgccttctggagagctgaccaaacactaaggatgctgaagttccgaacagtccatgggggcctgaggctcctgggaatccgccgaacctccaccgcccccgctgcctccccaaatgtccggcgcctggagtataagcccatcaagaaagtcatggtggccaacagaggtgagattgccatccgtgtgttccgggcctgcacggagctgggcatccgcaccgtagccatctactctgagcaggacacgggccagatgcaccggcagaaagcagatgaagcctatctcatcggccgcggcctggcccccgtgcaggcctacctgcacatcccagacatcatcaaggtggccaaggagaacaacgtagatgcagtgcaccctggctacgggttcctctctgagcgagcggacttcgcccaggcctgccaggatgcaggggtccggtttattgggccaagcccagaagtggtccgcaagatgggagacaaggtggaggcccgggccatcgccattgctgcgggtgttcccgttgtccctggcacagatgcccccatcacgtccctgcatgaggcccacgagttctccaacacctacggcttccccatcatcttcaaggcggcctatgggggtggagggcgtggcatgagggtggtgcacagctacgaggagctggaggagaattacacccgggcctactcagaggctctggccgcctttgggaatggggcgctgtttgtggagaagttcatcgagaagccacggcacatcgaggtgcagatcttgggggaccagtatgggaacatcctgcacctgtacgagcgagactgctccatccagcggcggcaccagaaggtggtcgagattgcccccgccgcccacctggacccgcagcttcggactcggctcaccagcgactctgtgaaactcgctaaacaggtgggctacgagaacgcaggcaccgtggagttcctggtggacaggcacggcaagcactacttcatcgaggtcaactcccgcctgcaggtggagcacacggtcacagaggagatcaccgacgtagacctggtccatgctcagatccacgtggctgagggcaggagcctacccgacctgggcctgcggcaggagaacatccgcatcaacgggtgtgccatccagtgccgggtcaccaccgaggaccccgcgcgcagcttccagccggacaccggccgcattgaggtgttccggagcggagagggcatgggcatccgcctggataatgcttccgccttccaaggagccgtcatctcgccccactacgactccctgctggtcaaagtcattgcccacggcaaagaccaccccacggccgccaccaagatgagcagggcccttgcggagttccgcgtccgaggtgtgaagaccaacatcgccttcctgcagaatgtgctcaacaaccagcagttcctggcaggcactgtggacacccagttcatcgacgagaacccagagctgttccagctgcggcctgcacagaaccgggcccaaaagctgttgcactacctcggccatgtcatggtaaacggtccaaccaccccgattcccgtcaaggccagccccagccccacggaccccgttgtccctgcagtgcccataggcccgcccccggctggtttcagagacatcctgctgcgagaggggcctgagggctttgctcgagctgtgcggaaccacccggggctgctgctgatggacacgaccttcagggacgcccaccagtcactgctggccactcgtgtgcgcacccacgatctcaaaaagatcgccccctatgttgcccacaacttcagcaagctcttcagcatggagaactggggaggagccacgtttgacgtcgccatgcgcttcctgtatgagtgcccctggcggcggctgcaggagctccgggagctcatccccaacatccctttccagatgctgctgcggggggccaatgctgtgggctacaccaactacccagacaacgtggtcttcaagttctgtgaagtggccaaagagaatggcatggatgtcttccgtgtgtttgactccctcaactacttgcccaacatgctgctgggcatggaggcggcaggaagtgccggaggcgtggtggaggctgccatctcatacacgggcgacgtggccgaccccagccgcaccaagtactcactgcagtactacatgggcttggccgaagagctggtgcgagctggcacccacatcctgtgcatcaaggacatggccgggctgctgaagcccacggcctgcaccatgctggtcagctccctccgggaccgcttccccgacctcccactgcacatccacacccacgacacgtcaggggcaggcgtggcagccatgctggcctgtgcccaggctggagctgatgtggtggatgtggcagctgattccatgtctgggatgacttcacagcccagcatgggggccctggtggcctgtaccagagggactcccctggacacagaggtgcccatggagcgcgtgtttgactacagtgagtactgggagggggctcggggactgtacgcggccttcgactgcacggccaccatgaagtctggcaactcggacgtgtatgaaaatgagatcccagggggccagtacaccaacctgcacttccaggcccacagcatggggcttggctccaagttcaaggaggtcaagaaggcctatgtggaggccaaccagatgctgggcgatctcatcaaggtgacgccctcctccaagatcgtgggggacctggcccagtttatggtgcagaatggattgagccgggcagaggccgaagctcaggcggaagagctgtcctttccccgctccgtggtggagttcctgcagggctacatcggtgtcccccatggggggttccccgaaccctttcgctctaaggtactgaaggacctgccaagggtggaggggcggcctggagcctccctccctcccctggatctgcaggcactggagaaggagctggtagaccggcatggggaggaggtgacgccggaagatgtgctctcagcagctatgtaccccgatgtgtttgcccacttcaaactcctctgcgatcttgggtccctgcaggaagaggcgagtattcaggctatccagggggccaaagatggcagtgaagtccttgaagtggg

SEQ ID NO: 69357 - DNA, 131 bp, Homo sapiens
tcctggagggatgtgtccctgtccctgagcccagccactctcactgctgccctcgactcagcctctgcccagcccaccctgacccactgcccgctttctccccaggccatgtcatggtaaacggtccaacc

SEQ ID NO: 69358 - DNA, 4016 bp, Homo sapiens
agctgttctctgtcagtggaggcagcagcggtagaggcggcggcgaggactggcgacggcgaggagatagtgtctgccttctggagagctgaccaaacactaaggatgctgaagttccgaacagtccatgggggcctgaggctcctgggaatccgccgaacctccaccgcccccgctgcctccccaaatgtccggcgcctggagtataagcccatcaagaaagtcatggtggccaacagaggtgagattgccatccgtgtgttccgggcctgcacggagctgggcatccgcaccgtagccatctactctgagcaggacacgggccagatgcaccggcagaaagcagatgaagcctatctcatcggccgcggcctggcccccgtgcaggcctacctgcacatcccagacatcatcaaggtggccaaggagaacaacgtagatgcagtgcaccctggctacgggttcctctctgagcgagcggacttcgcccaggcctgccaggatgcaggggtccggtttattgggccaagcccagaagtggtccgcaagatgggagacaaggtggaggcccgggccatcgccattgctgcgggtgttcccgttgtccctggcacagatgcccccatcacgtccctgcatgaggcccacgagttctccaacacctacggcttccccatcatcttcaaggcggcctatgggggtggagggcgtggcatgagggtggtgcacagctacgaggagctggaggagaattacacccgggcctactcagaggctctggccgcctttgggaatggggcgctgtttgtggagaagttcatcgagaagccacggcacatcgaggtgcagatcttgggggaccagtatgggaacatcctgcacctgtacgagcgagactgctccatccagcggcggcaccagaaggtggtcgagattgcccccgccgcccacctggacccgcagcttcggactcggctcaccagcgactctgtgaaactcgctaaacaggtgggctacgagaacgcaggcaccgtggagttcctggtggacaggcacggcaagcactacttcatcgaggtcaactcccgcctgcaggtggagcacacggtcacagaggagatcaccgacgtagacctggtccatgctcagatccacgtggctgagggcaggagcctacccgacctgggcctgcggcaggagaacatccgcatcaacgggtgtgccatccagtgccgggtcaccaccgaggaccccgcgcgcagcttccagccggacaccggccgcattgaggtgttccggagcggagagggcatgggcatccgcctggataatgcttccgccttccaaggagccgtcatctcgccccactacgactccctgctggtcaaagtcattgcccacggcaaagaccaccccacggccgccaccaagatgagcagggcccttgcggagttccgcgtccgaggtgtgaagaccaacatcgccttcctgcagaatgtgctcaacaaccagcagttcctggcaggcactgtggacacccagttcatcgacgagaacccagagctgttccagctgcggcctgcacagaaccgggcccaaaagctgttgcactacctcggccatgtcatggtaaacggtccaaccaccccgattcccgtcaaggccagccccagccccacggaccccgttgtccctgcagtgcccataggcccgcccccggctggtttcagagacatcctgctgcgagaggggcctgagggctttgctcgagctgtgcggaaccacccggggctgctgctgatggacacgaccttcagggacgcccaccagtcactgctggccactcgtgtgcgcacccacgatctcaaaaagatcgccccctatgttgcccacaacttcagcaagctcttcagcatggagaactggggaggagccacgtttgacgtcgccatgcgcttcctgtatgagtgcccctggcggcggctgcaggagctccgggagctcatccccaacatccctttccagatgctgctgcggggggccaatgctgtgggctacaccaactacccagacaacgtggtcttcaagttctgtgaagtggccaaagagaatggcatggatgtcttccgtgtgtttgactccctcaactacttgcccaacatgctgctgggcatggaggcggcaggaagtgccggaggcgtggtggaggctgccatctcatacacgggcgacgtggccgaccccagccgcaccaagtactcactgcagtactacatgggcttggccgaagagctggtgcgagctggcacccacatcctgtgcatcaaggacatggccgggctgctgaagcccacggcctgcaccatgctggtcagctccctccgggaccgcttccccgacctcccactgcacatccacacccacgacacgtcaggggcaggcgtggcagccatgctggcctgtgcccaggctggagctgatgtggtggatgtggcagctgattccatgtctgggatgacttcacagcccagcatgggggccctggtggcctgtaccagagggactcccctggacacagaggtgcccatggagcgcgtgtttgactacagtgagtactgggagggggctcggggactgtacgcggccttcgactgcacggccaccatgaagtctggcaactcggacgtgtatgaaaatgagatcccagggggccagtacaccaacctgcacttccaggcccacagcatggggcttggctccaagttcaaggaggtcaagaaggcctatgtggaggccaaccagatgctgggcgatctcatcaaggtgacgccctcctccaagatcgtgggggacctggcccagtttatggtgcagaatggattgagccgggcagaggccgaagctcaggcggaagagctgtcctttccccgctccgtggtggagttcctgcagggctacatcggtgtcccccatggggggttccccgaaccctttcgctctaaggtactgaaggacctgccaagggtggaggggcggcctggagcctccctccctcccctggatctgcaggcactggagaaggagctggtagaccggcatggggaggaggtgacgccggaagatgtgctctcagcagctatgtaccccgatgtgtttgcccacttcaaggacttcactgccacctttggccccctggatagcctgaatactcgcctcttcctgcagggacccaagatcgcagaggagtttgaggtggagctggagcggggcaagacgctgcacatcaaagccctggccgtgagcgacctgaaccgggccggccagaggcaggtcttctttgagctcaatgggcagctgcggtccatcttggtcaaggacacccaggccatgaaggagatgcacttccaccccaaggccctaaaggacgtgaagggccagatcggggcgcccatgcctgggaaggtgatagacatcaaagtggtggcaggggccaaggtggccaagggccagcccctgtgtgtgctcagtgccatgaagatggagactgtggtgacctcacccatggagggtactgtccgcaaggttcatgtgaccaaggacatgacactggaaggtgacgacctcatcctggagatcgagtgatcttgccccagaccggcagcctggccatccccaagccttcaacagaagctgtgctgccacggcaggcccaggccagccagtgcccgaggccaggaaggccgggccgtggaggtcctgtccacagctggacaggagagacaccgcctgcggtggttcattcctttcagccatcgtcctttcctccggcggacagctgcttacatgttcatctcttgccaaataagggtcccctcctcactggagactacaagtggtgggtcaggtggtcctaggacccaggggaggtttaggggtcctatctcctgggggaaggggagatctaagatgtcccaggtcctgggaagtttactcaataaagctggctttcccctgcc

SEQ ID NO: 69359 - DNA, 4520 bp, Homo sapiens
agctgttctctgtcagtggaggcagcagcggtagaggcggcggcgaggactggcgacggcgaggagatagtgtctgccttctggagagctgaccaaacactaaggatgctgaagttccgaacagtccatgggggcctgaggctcctgggaatccgccgaacctccaccgcccccgctgcctccccaaatgtccggcgcctggagtataagcccatcaagaaagtcatggtggccaacagaggtgagattgccatccgtgtgttccgggcctgcacggagctgggcatccgcaccgtagccatctactctgagcaggacacgggccagatgcaccggcagaaagcagatgaagcctatctcatcggccgcggcctggcccccgtgcaggcctacctgcacatcccagacatcatcaaggtggccaaggagaacaacgtagatgcagtgcaccctggctacgggttcctctctgagcgagcggacttcgcccaggcctgccaggatgcaggggtccggtttattgggccaagcccagaagtggtccgcaagatgggagacaaggtggaggcccgggccatcgccattgctgcgggtgttcccgttgtccctggcacagatgcccccatcacgtccctgcatgaggcccacgagttctccaacacctacggcttccccatcatcttcaaggcggcctatgggggtggagggcgtggcatgagggtggtgcacagctacgaggagctggaggagaattacacccgggcctactcagaggctctggccgcctttgggaatggggcgctgtttgtggagaagttcatcgagaagccacggcacatcgaggtgcagatcttgggggaccagtatgggaacatcctgcacctgtacgagcgagactgctccatccagcggcggcaccagaaggtggtcgagattgcccccgccgcccacctggacccgcagcttcggactcggctcaccagcgactctgtgaaactcgctaaacaggtgggctacgagaacgcaggcaccgtggagttcctggtggacaggcacggcaagcactacttcatcgaggtcaactcccgcctgcaggtggagcacacggtcacagaggagatcaccgacgtagacctggtccatgctcagatccacgtggctgagggcaggagcctacccgacctgggcctgcggcaggagaacatccgcatcaacgggtgtgccatccagtgccgggtcaccaccgaggaccccgcgcgcagcttccagccggacaccggccgcattgaggtgttccggagcggagagggcatgggcatccgcctggataatgcttccgccttccaaggagccgtcatctcgccccactacgactccctgctggtcaaagtcattgcccacggcaaagaccaccccacggccgccaccaagatgagcagggcccttgcggagttccgcgtccgaggtgtgaagaccaacatcgccttcctgcagaatgtgctcaacaaccagcagttcctggcaggcactgtggacacccagttcatcgacgagaacccagagctgttccagctgcggcctgcacagaaccgggcccaaaagctgttgcactacctcggccatgtcatggtaaacggtccaaccaccccgattcccgtcaaggccagccccagccccacggaccccgttgtccctgcagtgcccataggcccgcccccggctggtttcagagacatcctgctgcgagaggggcctgagggctttgctcgagctgtgcggaaccacccggggctgctgctgatggacacgaccttcagggacgcccaccagtcactgctggccactcgtgtgcgcacccacgatctcaaaaagatcgccccctatgttgcccacaacttcagcaagctcttcagcatggagaactggggaggagccacgtttgacgtcgccatgcgcttcctgtatgagtgcccctggcggcggctgcaggagctccgggagctcatccccaacatccctttccagatgctgctgcggggggccaatgctgtgggctacaccaactacccagacaacgtggtcttcaagttctgtgaagtggccaaagagaatggcatggatgtcttccgtgtgtttgactccctcaactacttgcccaacatgctgctgggcatggaggcggcaggaagtgccggaggcgtggtggaggctgccatctcatacacgggcgacgtggccgaccccagccgcaccaagtactcactgcagtactacatgggcttggccgaagagctggtgcgagctggcacccacatcctgtgcatcaaggacatggccgggctgctgaagcccacggcctgcaccatgctggtcagctccctccgggaccgcttccccgacctcccactgcacatccacacccacgacacgtcaggggcaggcgtggcagccatgctggcctgtgcccaggctggagctgatgtggtggatgtggcagctgattccatgtctgggatgacttcacagcccagcatgggggccctggtggcctgtaccagagggactcccctggacacagaggtgcccatggagcgcgtgtttgactacagtgagtactgggagggggctcggggactgtacgcggccttcgactgcacggccaccatgaagtctggcaactcggacgtgtatgaaaatgagatcccagggggccagtacaccaacctgcacttccaggcccacagcatggggcttggctccaagttcaaggaggtcaagaaggcctatgtggaggccaaccagatgctgggcgatctcatcaaggtgacgccctcctccaagatcgtgggggacctggcccagtttatggtgcagaatggattgagccgggcagaggccgaagctcaggcggaagagctgtcctttccccgctccgtggtggagttcctgcagggctacatcggtgtcccccatggggggttccccgaaccctttcgctctaaggtactgaaggacctgccaagggtggaggggcggcctggagcctccctccctcccctggatctgcaggcactggagaaggagctggtagaccggcatggggaggaggtgacgccggaagatgtgctctcagcagctatgtaccccgatgtgtttgcccacttcaaggacttcactgccacctttggccccctggatagcctgaatactcgcctcttcctgcagggacccaagatcgcagaggagtttgaggtggagctggagcggggcaagacgctgcacatcaaagccctggccgtgagcgacctgaaccgggccggccagaggcaggtcttctttgagctcaatgggcagctgcggtccatcttggtcaaggacacccaggccatgaaggagatgcacttccaccccaaggccctaaaggacgtgaagggccagatcggggcgcccatgcctgggaaggtgatagacatcaaagtggtggcaggggccaaggtggccaagggccagcccctgtgtgtgctcagtgccatgaagatggagactgtggtgacctcacccatggagggtactgtccgcaaggttcatgtgaccaaggacatgacactggaaggtgacgacctcatcctggagatcgagtgatcttgccccagaccggcagcctggccatccccaagccttcaacagaagctgtgctgccacggcaggcccaggccagccagtgcccgaggccaggaaggccgggccgtggaggtcctgtccacagctggacaggagagacaccgcctgcggtggttcattcctttcagccatcgtcctttcctccggcggacagctgcttacatgttcatctcttgccaaataagggtcccctcctcactggagactacaagtggtgggtcaggtggtcctaggacccaggggaggtttaggggtcctatctcctgggggaaggggagatctaagatgtcccaggtcctgggaagtttactcaataaagctggctttcccctgccaaaaaaaaaaaaaaaaaaaaaaaaaaaaaaaaaaaaaaaaaaaataaaaaaaaaaaaaaaaaaaaaaacaaaaaaaaaaggggggggggggcgacagaaaaaatcaccccccaggggggcgcgcccaactacggaggcgacaccccgcttttggggggcacagagggggcgcccacaagaggaggaggcggcaataataatagcgaggcgacgagcggaggagcggcggcagatcataataaaacgcagcagtaggtagagtaggcgagaacaccacggcgcgagcgcaccagggcgggcaaccactgcctggtgggaaggccggcgcccccaccatcactcctcgggggggggcggcgagacacaccaatagtgcggcggcagacaacactcccgccgcagtcagagagtaattatagacaacgcgcccccggcggggcgggcccaataaacacacgacatctcaacgagcacgttagtataccgaggggggacaaccacacg

SEQ ID NO: 69360 - DNA, 2023 bp, Homo sapiens
  misc_feature (1798)..(1798): n is a, c, g, or t
tatacaaaatataagtaaataggaaaaagtaactatagtaacagttgctattggaattcctctttggatttattagagaaagtaccctaatatctgccttgggtatagatagtgaaagcccaagcattttgggtctggttagaactaaactgtagcaaacaagggaggagtttttcagggactctggaatgggagagaacactgggataactgagaggagccaggagttggtgaagtctttgcattaggggatgtgacacttcacaggcacccctctcccctatgtttttactaaaaactaccaagaacttgatgtgtaaggatttcttatagaggccagtaaaaaggttaagtcatgcaacaggaagctttgcagaaaaacagtctatacccaaggatgcaggagcacagaagtagagaacataaggaggaattcttgagaatttgctggattatcggggacacttcgggctgacacagggagtggggctgggattataggcagagtgtaatcagaccactgaggggcagagagtctctaacatctaagttacatacttatattttaaatttttgtgattttagtttttgcttgctccattagagtagaaaataagtatttgttgaataagttagaaaaatgaatgaatgaatgaattgctttcaggactatgccacagaatgttagagtaggaaaggaccttagggatctattagttaaacctgttgagcaattagttcaatgttgttaggtattgatctcactccaaagataataaccattagcagcaataacaacagtcactgctatgagtgcctaccatgaatcagacagtttacatttataatctctatttttttaaacctttcaagaaaagtgtcattattgctacttttcaaatatgttgtccaaagtttctcaattagtaacccaaatctgcctgtttctaagccggggtgtgcccacctttttggctatgctttttctcaggtcattccaaagacagaccatttaaccactggatctggggcaacaaaggtggatcaatcgtgaatccttcactaaaaagcttgctttgtaatagatgaaacagtttaatttttaaatctagtgttataagggtttaagtagtagcacactgtcaaacttctgttggaatgaaaagaataagaactgacgaccacaaaaaagcaattctgcttaaaccagtgtctctcacccttggcactattaaattatcagtacaggcggtccgtgacttctgatggttcaacctacgatttttcaactctacaacagtgcaaaaacaaaaacaaaaaacaaaacaacaacaacaaaaaaagtgttgtcagtttgttcatcgacttatgatggagttacatcctgataaaatagtggttagttgaaaacattaatattttttattttactttaagttctgggatatatgtacagaacatgcaggtatgatgcatagatatacatgtgccatggtggtttgctgcacctgtcaacctgtcatctaggttttaagccccacatgcattaggtatttgtcctaatgctctccctccccttgcccccaacccgccgacaggccccagtttgtgatgttcccctccctgtgtccatgggttctcataaacattaatattttcaacttacaatgggtttatcgagatgtaatcccatcataagtcaaggaccctctgcactgaatatacttcattgtggagggctgtcttgtgcatcaaaggagggttagcagcatccctggcttctacccattaggtgctntggcataccttcttccactgttgtgacaaccaaagtgtctccagacattgctagatcgggcaaaattgtgcccagttgagaatcactggcttaaaaggaaaaaggccattgcatggatgtgcaataacacctttagccatttcctaatgatgtcatttaatcagttaggatttttgttttgtttttagtattttgctgttacaaataaagctgcaatgaacattg

SEQ ID NO: 69361 - DNA, 853 bp, Homo sapiens
tgagacagagtctcgctctgtggcccaggctagactgcagtggcatgatctcggctcactgcaacctccacctccggggttctagcaattctcctgcctcagcctcctgagtagctgggattataggcgcatgccacacctggctttttgtattttagtggagatggggtttcactgtgttgctcaggctggtcttgatctcctgagctcagacaatccccccgccttggcctcccaaagtgctaggattataggcgagagctgctgtgtgcttcttaagtgaggtaagtaacttccatagaaaatttccatcagttcattcatgaaagaacaaagaacctggcaaaacttaaaaaaacgtttccaagaatcagataaaagaggacaaaccttagggagaagaaggcagctgctcatttccagcaggggaagtagctgcatagagtacaaggactggtaggcctgttggctgttcctgtttaaggagacaagatgggcatggaacagggaccaccccctcctctgggagaagctgttacccccttcacttttcctcctctgtcattacccacaatcactctccttctttgcgctatggtaggtgtttacccatcataggaatgggcatttgaactttgaaactgaatgtggtgattacacttcatgctgaagcttttcacatgagtgctttcataagcattaagtaaaattttataatgactgcagtccaaggacattttccctggtttttggccagtctaaatattgtaagagagagagaagaaaagtgtacggaatataattgtctctaagctaagaaatgtggatgttcaaataaaacatacgtacagaa

SEQ ID NO: 69362 - DNA, 537 bp, Homo sapiens
gacatcagaacacatctcagcggtggtgactagtcctcggatttcctgccatggtgctgccattcccaccgcccgtgccctctgcctaggctgttcctgctgcaccgaacgcctcctcctgccaccgccctccctcctttctttagaagcccctgccagcacctgagctctctgctgattgctgttcctcccagtctgtggaagctttgcccatatgctttccttaaaagggttctgggcagggcaggcgcccccatttctcagggatcccctccaggacaacgccttttccttgtgtcttcagctctccttaccagatatctatatatttgtatatattcagtttcaccaacaatgcatcaagtacttttttttttttaagtaaagaaccgcagtcatcgaactggagtcccattgattccctccccctcgcctccccaaatctggcacctgcccaaggtatcctcagaaccatttggggtgtcctttggcattggataatagaaataaaattttacctctttctaccataaattg

SEQ ID NO: 69363 - DNA, 457 bp, Homo sapiens
atagttacaccaagagggaaggaaacaatgaaattgaagagatttgaatgtcacgcagcgctgttataattaaatgcaagcttccataccataactcattaaaagtagtggtgactttgaaaaatttggcaacaatttaaactgcaaagttgaaagagaaatgtgtgtaagaaaattagacaccggtgcagtggctcacgccttgtaatcccagcattttgggaggccgaggcaggtggatcacttgaggtcaggagtttgagaccagccttgccaacatggtgaaaccctgtctctagtgaaaatactaaaattagccgggcatggcgcgcatctgtaatcccagctactcgggaggcggaggcaggagaatcacttgaaccctgaggtggaggttgcagtgaggcgagattatgccactgcactccagcctgggcacagagcgagtctccatctc

SEQ ID NO: 69364 - DNA, 410 bp, Homo sapiens
catcccaggattcttgacacataaacaaattggtgcaatgtgctataagagatgtgtaggggaataagagtaccaagaaagaagccatgaggttatgggtgtttgtggggctgaggatacaagaagtgtttcctgtaggagataatgataatatgtgtttagtctactatgtattcttaaccttgttatctttgtgctggaatgacccctttgtaattatgcaatgaactacttagctctgatgctatttactgcactaaaatttacttggtctaacattaatatagccaatctagcaattttttgatgagtgctggaatgatatatcattttccatcaagatttctgatagtagcatatagatgggtcttatctttttgtctaatttattaatctctgtcttttaactg

SEQ ID NO: 69365 - DNA, 523 bp, Homo sapiens
  misc_feature (455)..(455): n is a, c, g, or t
  misc_feature (484)..(484): n is a, c, g, or t
catcccaggattcttgacacataaacaaattggtgcaatgtgctataagagatgtgtaggggaataagagtaccaagaaagaagccatgaggttatgggtgtttgtggggctgaggatacaagaagtgtttcctgtaggagataatgataatatgtgtttagtctactatgtattcttaatctatatttgtaaaacaatggtccacataatgatatctgacttgtacaaaatatcttttagggacagtagtttttatgctggcaaattaaaattatgcaagaactctgggaccccttaagttttcctgggtcttacttactttgtaaattttagctctacatagtgtaatatatgttttatctgaatgttgagacacactaaggaacaacacacttctttttgcactccagcctgggtgacagagcaagactgtcaaaacaaaacaaaacaaaanaaaaacatttcaaatgtaagaaccaaganccagtactcatccctcaaatctgctgcttcccctgcttc

SEQ ID NO: 69366 - DNA, 442 bp, Homo sapiens
gattgattcaataaagagatctactaggcagttgagctccaggtcctgcatttttcctgacatactctgtatttctctctgtccagctccagcttctgaaatgccctctcagcttagcacggcctgcttatggcgagaaccatgtattcaatggctcctccttatttctgcaagtcttcaaattctccttttggtaattctctgcatggaattaactcttgcaaatccatgtctcacttttgtgtgacctattttgtcttatgctacacattgtccatgttttagcagtagattggaagcttttatgtgcatagccttcccaagaggaaagtaaaaggttggtgctagatggtgcaccttcgataaatgtcagaacagcaaaaaaagggctttagaaatatttccttctttgcacattcccattcaagaatggcttatacag

SEQ ID NO: 69367 - DNA, 298 bp, Homo sapiens
ccgcagtaataactgttataggcaagatccattggtagatgcaatatcactaggcaaaaatttgaagaggaacaggacattcgcatggtctcaaagtatctccaccaagatatttattaaatacagcaaaaaaatataactaactttacaacagagaaattaagcagacaccaacataaccaagccatcaaggttatcaccatcactcatatacctagaaatccctaatgactcgtacaaaagactcctagatttgataaacaaattcagttaaactctcagcttacaaaatcaacgt

SEQ ID NO: 69368 - DNA, 765 bp, Homo sapiens
aaataacatcttgtcacctttgtggcactctactggttagcagtcacaggtctaggccatctcaaggggcagggagtacataaggctgtgaacagcaggtggggatcacagtgaccacctgggagtctatctgccacacctcccagtgcatccaaattctgttgtgcagagggcaagtgaggtctagcataccccccaagaaagcagccatcttctaccatccacccaccagtttgtaaactccagtcaggggtgtaattgaagtgatgcctggtttgggattgagttttcctggagattctggtcctgtaatgagttttttccagctgggattccagttggtgatggacagcatcaagctgtcccttgctcctggccccagaccccacaaggtgcttttcaggctggtctcgaactcctaacctcaagtgagccacccacttcggcctcccaaagtgctgggattgtgggcatgagccaccacacccagccatggtacacacttctaataaagcttcctctacatctaagctttctgatttccaccctccaagtacttaaaactgactcgatgtgaagtaatgctatgtgaaatcgacataaaaaagttactgctcccgaagatcctttaatgcaatctccttacccttaattcaatgggcaagagaatcttcaattttcattttctttctcctctctacagtttcttaatcagagtggctatttccataacaataaaaactgcttcttacagaatcctcaggc

SEQ ID NO: 69369 - DNA, 1207 bp, Homo sapiens
aaataacatcttgtcacctttgtggcactctactggttagcagtcacaggtctaggccatctcaaggggcagggagtacataaggctgtgaacagcaggtggggatcacagtgaccacctgggagtctatctgccacacctcccagtgcatccaaattctgttgtgcagagggcaagtgaggtctagcataccccccaagaaagcagccatcttctaccatccacccaccagtttgtaaactccagtcaggggtgtaattgaagtgatgcctggtttgggattgagttttcctggagattctggtcctgtaatgagttttttccagctgggattccagttggtgatggacagcatcaagctgtcccttgctcctggccccagaccccacaaggtgcttttcaggctagattcctgagggctgtgtcatcagctgtgccacctcctcctccctaccatgatgaactgttttgggtacttacctgactccagagaaaggtcattaaggtcatcacaatgcaatgtgcatctgctagtgcctcatccgagtgacgctcaggtgaaggaacagcctgtggccacacgtctaaccaggggataggcctagatcctaaggccaggtctgtctccacaatccaagtgctgatcttcaatggtacatactttttttttttttccttttgagacagtcttgctctgttgcccaggctagagtacagtggcatgatctcagctcactgcaacctccacttcctggaggcaattctcatgcctcagcttctcaagtagctgggattacaggcgtgcgccaccatgcctggctaattgttgtatttttagtagacggggttatctgcacccctttactacttagggagatgctctgtcggtaggtttggtggaagacggaaagcaaggggccaggctctctagaacggcctgtatcatgagacgccacaagagaattaagccccacacaaagtgattcaagcaactactttcacatcaaccaaaggatgatgaaaagactgtactatcctagagaacacaggagagaaggtaccgattgccttagacaacaaggttgcatttcctcactttggccagcctcacaccccagccctgaactttcaatctggacacttggtcagtggtgagagaagtggccgtgagtctagctgtggcaccctgaagagtttaacagccacg

SEQ ID NO: 69370 - DNA, 425 bp, Homo sapiens
gccacaaaggaattccaggtccgagccaacagagagaaacatgaatttttagacacatgctctcctgccacctcttggctccatcaagatccagttccccatctcactgttttctctgagttcttgggaggagtgatggtgttggggtagaaataagctcactcacccacgcagggtactaaagatcttacaggagcttcaactggagcaggaggagctttttatgcttatgttgaatcaagtcagatacaaaaagcaattgtccctctttgcccaagcctttccaattctgtgtgtcttgttgtgtcagtgtccacttgtgtatccttctgcaggaagacccgccaaatagaagagatgggacaaaaataggaatggtgtgtgacgacaaagggctactggaagaacaaaagggatacaggcct

SEQ ID NO: 69371 - DNA, 460 bp, Homo sapiens
ctcgtgatgctgtctcagtgcctctgattaaaacccacatctgttagtaaatgaggggtgagatctctgttgattaccagcatgtcagctctcagccttattgacacattcgatcaaagagcatttattttgtaggcacagacaagataatttgaaaagatgaattttcttcttcacaggggtgtgtttctgggttctagtgaggggactattctggacagaattagggccaggaccccggggactttgtccagtttgctagtagtggggcaggtgtggacgttgtctgggttgcccagttttgcccgtctctgaatggggccattgtctaagatggttctagagggcaggggcctcgtgggcgagcaggcttgtccttctaaggaagtgcatgggttgggtagcactttgtcgggatctgcaccccgtgtgtgctggactacgtgctctgagccaagct

SEQ ID NO: 69372 - DNA, 350 bp, Homo sapiens
gaagagcaatgtttgcttttgttttcaatcctagaaaagttcaaaaaaagcttttattctatataaactctaaagtgtatatattttaaacgtgttacttcttttttttaattttgcattggcatctgtagaaatttttgtcagtttaaacaacaatgcttgaaagtcactttgacttttcaagctgccagattgccttatcattgtctttgagagattagggatgcttttttagaaggttgccttttatgtaaataaaactgaagttttgttgttccattgtagtatttcattttaatctggttgttttcttgtggagataatatataacaggatccaaaaatagttca

SEQ ID NO: 69373 - DNA, 349 bp, Homo sapiens
agaatatgggaaatttagttgtagaagatttaagaggaagaggatcacgatagtacatgaagactgtttaaaaaactgtcttgtagaagttatgtcaccttttttgttgtcattccagaggacagaactgggacaagtgtggatcagtggttgaaaatgacaggaaattagattttagcttaacataaagaagaacagttgggttgttcagaacaaatggaatgggctatgtagattttttgacactaaacagaaattgaatgagtggtaaggattctaaaggggatattgaccattcagcgggtgattgacttgaatttttttttttttttttttttaattttttgag

SEQ ID NO: 69374 - DNA, 429 bp, Homo sapiens
tatagtctaattaaaaataaaaatataaagaccttaataaatactaataatggaggtcaaagggcacatagtgaagtgcagttgagaaatgacgtgacctgtgtatttgtcttattcctgctatatcgcataaacaggagaatgaattgaaaattgtaattaagatttattccattttgttaagattaaaaatgagcagtcaaataattctttctctgagagaagagtgtatggtaggtccattgagggtgtctgttgtatcttaaaatctattcgaaatgtttgggtgaattattgtctaaattgacagatgattgcttttgagctaacaaaatatttctgttagcatagctaaagaatatatgttaaggaatatatgctctttgtaagttttgattgagtagataagatgatacagacacatgaatc

SEQ ID NO: 69375 - DNA, 994 bp, Homo sapiens
atgattttgaggcagggaaaggtaggggattgttaaatataatctggtttgtctaggtgagtccaacagaacagaatattaaggtagttacagttaggaaggctcccaaataattgcaccaagtagatacaaatttggttactggatttgaggggccagattgcctaacttcttaggatctgtgatattgatacagaattagagcaaaatcacttaacttgcttgaggataaaataatgttgagaatggcgttggcatgaatgagctgctgacaagcttgctgttgttccattttgttccattttgtcccctttcagttggttactgtattttccctttctttgaaatgtagtcattcttaacccagtaaccttcctatacaatctgtacaggtacatgagcaatttcaaattttatttggattaagtgttttttatactgaggaactaactgtctttccattttatatctagcttttagtatcacagatctactttttggatttttttcctcccctttgattgcaaaatgaatggcaatatcatgcactttgttgggattcttttttagtagtatacaatgcattctctttgctatgagtaacccctgaagctggagatgggtcctaaataaaggattctaattgcagctttggttcttcatcatacctccttccccacatcagcacgtgcagaattgaaaagttcaaacctgactgccatttgaaaaagggacattgcaaatttgttttcattaactttgttatcaatacatgtagcctgtggtgttaaaaattttaaagggagaaagaggcaattagcatgaaatgttcaaatgaatggtttgtggtgcctttgaccatgcatatgttgttttgggaggtcagcttgttggctctgttgtaaggttttaaatggattatcctgtgaaagagattgggtatagtgtttctcaggtgtacagaagaaaaaagttattaaacctgaccattctg

SEQ ID NO: 69376 - DNA, 349 bp, Homo sapiens
catcaatgtttaggttatttgaatattgttcttgaatattgtttttgaatatctggactaactctggaggctgaggtgggaggattgcttgaagccaggagttcaactgcagcctgggcaacatagtgaaaccctccatctctaaaataataataataaacactcaaaaaagacacaaatatgatcagctcctcttgaaccctatttctccacagtatatacaaggaacacaactttgctgttaggtcttcataaaaaatatataattatgaaactatgaattaaaataacccctcaatgtgttttattttctatttaaaagcaatgcagccattacagactacttaca

SEQ ID NO: 69377 - DNA, 306 bp, Homo sapiens
ggatacaaagcagaataaggacagggagaagtcacatggacaaagttcagaggaagccaggtgcaagcttccaagagcctcttcctatggaatcacacaggacatgcttaatttctccaggatggaattgggacagcacatgtgaaatgctgtctatcaagaaagcttattagagactcggttcctaaggtttttagtgggaactggtcacatggaccccttcttgctatcatctgccaagattcccttctcccagaaggaaactagacttttagcataaagcacattatttgcacaatttaggca

SEQ ID NO: 69378 - DNA, 467 bp, Homo sapiens
ctggcttctctttatttgttgtttttaaaatcatactgctgtccttatgcatggtactccttggaacagataagcagccatacaagaagctctttgagagagagaaggtggactctgggggtcgtgccggttgtttggagttgttggactgttagcttgtggagtgggtgatgtttcatcttcaggattctgtgaggccaggcctgggatgcggggaggagctgactggatggctcctggtgatgcattcctgggccctcttctcatctctgaattcctagagtcccactttctccaaaggccctgcgggaatcagacgcatgcacttcttcagttctgtgtagttttaggttctcagtggaggcctttgggctcaacttgtagtaaatatttgttttctgtggctgtcagcaatctatagtcttgggtgtggtccctaaaagccagcttttgggcaatttttgaac

SEQ ID NO: 69379 - DNA, 851 bp, Homo sapiens
cactttgggaggctaagaatcacttgagactaggagttcaagatcagcctgggaaacatagtgagaccccgtctctacaaaaaatataaaaattagttaggtgtggtggcatgcacttgtagtcccagctactcaagaggctgaggcagaaggatcccttgagcccaggagtgcaaggctgcaatgagccaggatcccatgatcacacatctgtattccagcctgggcaatagagcaagtccccattactaaaaaacccaaaaggccaaaaaacaaaaaagttagagttcgaggaattaccaactgtagttttagccttggttcatgctctcttgcatatttatataatctctgacttgtaatggaccctgactggaatgtgatccctcaggaacttagtagcctgagtctttcagtagactacactgcccagaaccctggccattctcaaaatgagaacttgggaatgtttaagaagaaatcaaacatgtttcaggaaaaggaaatctatggagtattatagggacattcccatgggaatgtatcttcctccatggcatgtcttgagggtcctttcttgttaggagtttatcctgccagcccataaatggactatttattgtaagtgtagaaaatcacagagaagcagttttgcaccagccttattcctgtgccttgttttcctcttgctctttttttacctgtatatctaatttatattttcatatatattgtgtattgattgaagtcactttaaatccttcttgggaatgacacagtatataaataaggaagaaagaaaacatgccaagctgagcatgctgctccaaataaatatctgctttcctact

SEQ ID NO: 69380 - DNA, 811 bp, Homo sapiens
gttaaatattatctgcctaaaaaaaaaaatagttaagtctctcttacatgtgaaaaactagaggcattcccactaaggttcagtatggacaactgtatttagtgctaaatctatttaaaattgttcagtaagtgctaatcaaaacattctttaaaacaatataaaatgataaattttgaatgttgaaaaactaaatgatttatttaacccggtataactgactgataaacgattagaattaataatcttccaacagggcagcaagataatatacataaaccagtgctccccaccgttgacaattttttatctgtctcaccatgaaacatcttttcatgattaaaaactcccaaccaattaggtagagaaatgtacctaatcataataaaggccatatatgacaaggctgcaactaacatcatccttgacagtggatggaactaagctaaaagcttttcctctaaaatcagacacaagacaaggatgcccattcttaccacttctattcagcatagagggctagaagtcctagccagagcaattagtcaagagaaggaaacaaaagacatccatattggaaaggaagaagtgaaatttgtagatgacatggtcctgtatgtaaaaaaaaaaaccctaaagacgccaccaaaaaatgccaccaaaagaacagttagaactaatgcattcagtgaagttgtaggctacaaaatcagcatacaaaaatcactcatgtttctatacactaatattgaattaacagtgagtttctttaatgaaaatcttttaaaaatctcatttacaataacatcaa

SEQ ID NO: 69381 - DNA, 364 bp, Homo sapiens
cagtttatagacagaagacaggaggagtgaagctgtggacttcagctttgttgttgaaaaggggtactctgtgacagacctgggttcaactcttagcgctgttacttactagctacgtgatttggggcaaattacttggccactccaatcctgttcctgtaaaatggaggcaaaaagaataattcttacatcatagagtttttgtaaggattaaatgatagaatatttattaagcatttggttcagggcccagtacattataaagtgcttagccagtgttagctgttataaaattatcatcacagtcgattctcactgtgcatgcaattatccttctgatttcaactatgtgtgctggaacaaa

SEQ ID NO: 69382 - DNA, 999 bp, Homo sapiens
tgcttgatgaggaaaggattgctgcacgtcattgtgcctcggtgctttccatatcagcagctgttaccacctttccaaaaggtgttgccaagaaacaggagcagggtaagatgtttttctctaaccagacagaaatctgctgactttccagaagtctaattgaacttgaaggcagaggaaataatgtgacttgaatctaacttgaaagtcttggaggaatttggtgttacagtgtgcaggccaccttaacctggcaaattccattctatgcaattctgctttcgttctattaaatacgtacctttgtgagtcaaggatttcagcacttgttgccatagggaaaaagttgtaatgggttatcaaagatgaagtatatgttgctatgtcaaaagccaaagcacagtttcaactcatttaaactagatctcattgagatgtactactgaacagtcagaattttctaaattttttttccaggaaacagtcatttttctttcaaaagagaacggaggcataatcctttacaaatattgcttatgttcagtaaatcatcttccagtgcagtgaaacgaagtaaatggtgtatgcacttctgcgcatgtttctggaggaggaagtccatatctttagtcagaatctctatcgatttagctattgtggaggcagtaggttgctctggataaatctgagcaaaggaatgagaggaaatcagctcatttgaagaatatgggatgcgaagctttgacacgacaatggcgagtaatttagggattcaggttatcccccgcatctgagtaatctgaaggtaattttctagctagagcttctcaaaggtaggaaccttgtgttatcttttttgttcatactgtctgagcacagtgcaggagacataatagggactccaaaaatgttgagttaaattgaaatcactgtatgaatagtgaaagctggactgtagcaccaataataaatgctcttctgtcttatttgtatttaaca

SEQ ID NO: 69383 - DNA, 613 bp, Homo sapiens
ggcacacctgtagtctcagctactctggaggctgaggtggaaggatcgattgagctgggaggtcaaggctgtgcatgaaaaaaacaagaacaaaagcaaaacaacactatcttgatttgtcgcaccgcaggcagttttgcttgttttgaatttatataagtagaaccttttgtttctggcttcttttgctcaattttatgtttatgagattcaaccatgttgttgtatataacagagatgtattcctttttgttgctatatggtattccattatatgaatagactacaatccattaaccaggttttggcactgtggttgtttctatcttttggctattgtgaataatgctcctatgaacatgggtgtacaaatacttcttcaaagccgcttttccatttttttaaggcatatactcaaaattgctggctcatatggtaattctaggtttaatttttgaggaactgccatactgttctctatagcagctacaccagtttacattcttaccagcatgtagggtagcttgggttccagtttctccacattctcaccaatgcttgttattttctgttgtttttattttttaataataaccatcctaatgaatgtgaa

SEQ ID NO: 69384 - DNA, 477 bp, Homo sapiens
tattagcaccacatggactctcgtttacaaagattttgttgcctgagcagaaggtatttattagataatcatacattaattttctcatgagttaaaaccagccagaccttctgagccatgatagcaagtgccgtcacactgaggtgctgcaaaccctcacaaactgagaaccttactcctttagttaacatgggcagccttatccccagaaaatgtaaaacttcactgtgctttttcaagtatattcccaggattccttcacaggcctgtaaggcatgggatctcagtattggctgcatgacagaaatgcatggggaactttttgaagaccaaaatgccttggtctgacccccagagattctgtttatttggtctgggaggtgctgcctggatgttgggatttttaagagttgtgtggcccaagttgagaagcactgtcctaggggctcaggaattgcttggccaaccttcttgctt

SEQ ID NO: 69385 - DNA, 896 bp, Homo sapiens
agaaataatgcatctttttagaatgtacaatatccattttaatcaatggtaaatgattgaaatatttttatattaaattcaaaaagttacgtagaccagatagaaaggtcaatttatttttttgagacggagcctgggtgacagaaagactctctgaaaacaaataaaaaactaactaaggaataatgcaggctatgttgtatctaggagcggtagagagagtagtgtccaagtaagacccaacaaccagtgactgattgattggctaaaatcctcttcaagcaaggcttggccctaaagaaggttagcccttgggcaagcatgagggcatttcacagaggccactggcacagtgaggctccagtgtggctggagctggggatgagggcagacaggcaggagcagcttggactgttgaagactagagggaaacagaaggaagcaggaactctgtgaaaggccgccgtgccttaccagaccaggggagaggagagaggatggacattcacagtcctcactgctagcagtcggaactcacctgtagctcacttattactgacatgcaaatgaatctaaactgcctaaaatgttagcgaatccatctaaaatctggctttcaaatccttcatatgttcatttgcttagcaaaccttctataaaaatagaaaacacacatttccaaacagagtccacattaatgaggccttcgaaagactccagaaaaccaatgcaagagtctgcacatagccgaaagtttaaggaacagtttctctccctcattcctaatagcaagtgaccaaatgactacagattaaaatgagaattttcctcaccttctttcatgccatatgtacctcctggccctctaggcaatgatttcagaagggtctttgaac

SEQ ID NO: 69386 - DNA, 977 bp, Homo sapiens
acaactagggaatttagaaaatggaaattagtatgttcactatttaagacctatgcacagagcaaagtcttcagaaaacctagaggccgaagttcaaggttatccatctcaagtagcctagcaatatttgcaacatcccaatggccctgtccttttctttactgatggccgtgctggtgctcagctacaaatccatctgttctctgggctgtgatctgcctcagacccacagcctgggtaataggagggccttgatactcctggcacaaatgggaagaatctctcatttctcctgcctgaaggacagacatgatttcggattccccgaggaggagtttgatggccaccagttccagaaggctcaagccatctctgtcctccatgagatgatccagcagaccttcaatctcttcagcacagaggactcatctgctgcttgggaacagagcctcctagaaaaattttccactgaactttaccagcaactgaatgacctggaagcatgtgtgatacaggaggttggggtggaagagactcccctgatgaatgaggactccatcctggctgtgaggaaatacttccaaagaatcactctttatctaacagagaagaaatacagcccttgtgcctgggaggttgtcagagcagaaatcatgagatccctctcgttttcaacaaacttgcaaaaaagattaaggaggaaggattgaaacctggttcaacatggaaatgatcctgattgactaatacattatctcacactttcatgagttcttccatttcaaagactcacttctataaccaccacgagttgaatcaaaattttcaaatgttttcagcagtgtgaagaagcttggtgtataccttgcaggcactagtcctttacagatgacaatgctgatgtctctgttcatctatttatttaaatatttatttatttttaaaatttaaattattttttatgtgatatcatgagt

SEQ ID NO: 69387 - DNA, 2045 bp, Homo sapiens
  misc_feature (431)..(431): n is a, c, g, or t
  misc_feature (435)..(435): n is a, c, g, or t
  misc_feature (441)..(441): n is a, c, g, or t
  misc_feature (691)..(691): n is a, c, g, or t
aaaaaatgattttcttctgttggcttggcatgatgagaaacggcttctgtgagggcgaggttcaaaaacaagacctttgtgagcaatgggaagggactgcctctttgactgcatttattacggaagctgaacggacagctcccagctgaaaaggcaacttcaccatcgacggttctcgccaggttaaatgtcagtagatgaaggcctcatcatcactcatacttggcttttctccttttctgctgcttcttctccctaattggaaatctttggactaagaatctgtaaaacaagtctttcaaactgccttcaagtatctcctctgtgtcacttggtaacaaaggtcgaagataacagatggagtcctcagtgtaacttgataaatgtttcccttcctcagccttttgtctgattggacatctggaaggagncagntgttgnctttgttacagtggttcaagaatgtcagaattgcagtcactacaattctcctggcttttctctcatggtccccaaatgactgctggagtttcagccatcatatcagtgatcaaggcagctggatccaggcagtaatccagacacttggaagtcccacccaaggacttctgctcttatctcattggtcatctttgtctgaaaggaaagctgtgaaatacagtattattaataagcacgttgctggctccantaatatagagtcttgttaacaacaaagaagaggagaatggagattgagcaaccaggaagcagtctcagccacaccatcatatggagaagtgcctgtttcccattctgcccgattttaagtttcctgaggcacccccagccatgcagaactctctggtgcctggcccacaggaagttttcactaaatattgaaataaactgaacttagattaaactttggtgtctaacttaggaaaaacaacaagagttctacaaaactatttcttcacaggctgttgtagcagggagaccctcaagggcgtctacaatatcaccacaactctcatagagctgcctgtgaaggatgacaagaaggaagtaggctgagacccaagttctgggtcaggggactaatgctgttgtcaccaagaagggaaagtctgaagccaggcctgcttagcagaggtctccgtatagtagggatctcactctttcaagatgtaggatctcaactggttagccagccctctgagtgaagctggtcagttggggctgtgacaacatagcacactcaaaggggcagacccttctcagctccaacagattggtgtcattggaaaaggtggacccagtgtaggcagactttcctagagagtccagaagtgactgtgcaagcccaaagcaatccaaacaaatatttgtggaccaccaagaacctctggtatgaagtaaataataaaggcattgaacaataataacctgtctgtatatccaccaatgggaccgatgggccacagtgtgacatctatcctattcatgtcataagggagatgaattctactgtgggacagtctgtgtgactgctcgtaggagattatccaattccttttgctctaatttcatggtcaccaaatttctgcttgctaactttgttttacaacaaactttagaaaggaggtgatctgaataagaggatatatgtttttcagtctctggaaaggggtatttctttgtattgagaagccagaactcttgagtgtgttgagccttgtagagattgaaccactctgggtcagctgacaaaataagattctggtgctgaaaagctgagtatgtgaccatgatattaacagtgacctaagtttgtgtggcccccttcgttctccagaaaccaaccagtcagccttcattttgtaaatgtagcagacaccattttgctagtgaatgaggttaaatctttagccttgtcattggttcggctttgtaatttaaaactctcttattttaccctctgattttaaatccccagattttcctttctgtgtcctttgccccctgaagtttccatctgtctagcaactaagcactgtttgggt

SEQ ID NO: 69388 - DNA, 850 bp, Homo sapiens
gccctcagagacagtggaaaggaaaatcttcccagcaggtggagctgtgggcaggacaccagttcatgacaccgcgtagcttgatctgaaatgcgtgcagatgtgtgggcagtggccaacagcctggttgtatggtcaaggtactgaaataaaaagaactggaagatgaggaacaaggagatctggataaaggccatgtgggtagaaattcgggagtgggcacagggtgaagatttctgtatcacttgttaacctccactggaaagtttcccaccaaagagacactgaacacaaagcaggcaaaatccgccagcctgcatcatcgataagtccacccagaattatcagcctgatggaccccacacatcatcgcatctgacgaggggacccactttacagtgaaggacgtcgagcgtgggcccatcgacaggatccaatggtcacatcacatatcaaaccacccaacgcgggtccatcccaatgaacgctgggccagccttttcaaggcacactgaagcacaagcttgccagacactctgaaaggatggtcatactccacaacacagtacacttatacatcagaggcctctagatggcagtgggatcccaaggaggaggacatgtgggcttaggcgcctagggctggaggcaagaaaagccctacttaatgatcaccaccaacagcccaggggaactttgtgcttcccattctgcaccagtggacactgcagggctgggggtctgaaatggggcacacacttagcaggaacaaggcaaagatcccactgaactgcaagttctggatgccaccacggtactttggactcatgttaccatggaatagaaaatg

SEQ ID NO: 69389 - DNA, 347 bp, Homo sapiens
ctggaggaaagtgacagaggtccggacccaggtttggtctaacttaggaacagtaatgagcagttcagggactgcaggccaatttattcgttgttgcaacaatgagcacctaccgtatattagatctgtaccgggtgagataaaatcaactgtctttacccagagaggacttgctgtcaggaaggggagctcctccccatgagtcctgaaggctagtgggatgctccctgcttcgctccagtggcctacctcagccagggttggtatggtgtctgaggggttggctgtggtggcccattgcccattccccatttcagttcaaaatgtgaagagcatttatagcatgt

SEQ ID NO: 69390 - DNA, 473 bp, Homo sapiens
gtttttccttagcaaaatgctgcagtgagtacccttgtacatagatgtttgtacatttgttctagaaaaatctacagtaaagattcttagattaagagattcccaggttattagaaaacttctctattaatttagatatatacttccaaattgcctgaccaaaaagttatgtcaatttaacttctatgaacagtatacaaacatgacaattttccatcacctacaccaactctgggtaatttcatcttttttacaagttgatggattgttttaatttatatttctctggttattaataaggttggccacctcttcatgtgttattattgatgatatttgtattgaattgtttgaattttcttgatttggaaaacctttttacatgtcatagatattaaatatttgttgtaaaactctccttccagtattttgtatatgtttggtcaagtagaataaactcttgtcctctgatt

SEQ ID NO: 69391 - DNA, 369 bp, Homo sapiens
agttataaatgaacatctgttgcctacttaataggtcattgagtagctgtgacccattcttaatttgtatgtaagcatattttttacatatttgtatctacttcattttcccttgaagcttgccaaattggtacacttcagtttgaactgatgtctcttatatgctgtaccaccttcttaaaaattgaattatctttccttccacctagattgttctcaaagcatttgtttttgctggactttccactcttgaccataagatggtagcattccctaagatattgcagcacagtctaattccactgttgtcatctacagttaaatcgcaaataaaaaataataataagcagcaactgattgctcaagttg

SEQ ID NO: 69392 - DNA, 498 bp, Homo sapiens
attttgagcactacaatggaggagatccagtcactcggctgcagagttcagacctcactaaggacttgcttttcttctgattttacttaaagattaatgtagggtgatggactttggatggagaatgcctggctgtcctgtcttcagctctatcttgcactgtggtcatcaacttttctcagatcaaaaataggcaggtacgggtagtgggcttacaacgtttgaccgcaactggtttttctaagtattctgtacatttttcagcagcaaaaccaaactgggtcttcagctttatccccatttcttgcaaaggaagagcctttatatgattgggcacattttggtttttccttactgagaattttagtcttcttttgtattgtttctataataatttgtaaacatatttatttgtacctactttttaaaacttttctggtgaaattcattgtactgcattttatttgtcaaaataaacattctcataatgctggttaa

SEQ ID NO: 69393 - DNA, 1819 bp, Homo sapiens
caatccatgagtccatactaatataaataaagtgacaaagtgggtgagaaggaccagtgcccctggatgaagaatctctgctcatgtgggaggaaggtgggggatcaaagctggagcacttgctgctgcaggtgagacccctgacacactctcaaattggtaggcaaaggtttaaagaacgggatatttgcttagcttaaaagcacctcccaaggggaaaacagtaacttcacagtggagagacctggcaggcaccaccctcagatcaaaatgaacctcagcagtaatgacacgtccacatcagcacccccaacaccactccctgaggaggacatgccagttctgggaacatcacactcatcgtgaaaaaacatcagacaaacccaaacggatgaaatgtgaggaaaatctgtagttggttttacgcggatgttaatctcttagttttgatcattgtgctgtagctgcataagaggttagctgggtgaagtgtatctggggaccctctatggcttttgcatcttttctctaagtctcctgtcatttcaaagtaaaaacaaaaaaagaagacaagggtagcggcttcaggtacagctggacccagcactcagtgctatctgggcttgtggctccaactcaactcctccatcagaactgtgagaaatgcattctttcagcttctaatcctgcaaaaagaactgcatggtcttcccccagaaatcctaagagtagctgctggtgtctcatgcatgcgagctgcatatgggcccccgttagtcaggaacccatgctgagaggtgctatgctttgaatgtttggctcctcccaaactcgtgttgaaacttaatagccattgtaacagtattaagagggcagggccttcaagagctggtcaggccatgagggccctgtcctcctgactgagtgaatgctgttattgtaggagtgggcttgtttggcctcctcttgctctctctacccctctctgagcccttgtgttgtgggatgacacagccagaaggcccttgccaggttccggtccctccaccttggacctcccagcctcccgaacgttgagccaatacatctctgctcattgtaaattacctagtcttgggcattgtgttacagcagccaaaaagcagcctacggcagtcaccgtgctaacacctgcagcagcctgcggcggtcaccgtgctaacacgtgcagcagcctgtgtggctcaggccagtcagcttcccctggaagcaagtgtgaggtcgtcgcctctggaagtgctagcggagggtgatctcccgggaggaaatcagagtggtgttctactagaaggccgatgactcctgggtaaagtgccaatgctcacctcccatctctgcaagctcagtccctcgtggaatttccccaggagcacaagggcaatctcgacagctcccacgttccccagtgcccgaccccaagccctggccccatgatcagataaatgccctaagtggggtggcatggacatttgcacacgtcccagactgctttatgttagaagctgagctggcatgccactagctggttttgatgtaaacaacaattttgtaaaaccctggactgaatgggtctgactaacggctggttctgtgaacttgagcctcagcgtcctgtgtcagaagagcacaaaccactttcccagagaggttatgaagacagaaatgaccctgtgacccctttgcaaagtatgaagaacggttcccactcatgcatggagctggatcttctcaagtgggaaacaggcgtggtaaataaatactgttgtttcaaaaaaaaaaa

SEQ ID NO: 69394 - DNA, 1451 bp, Homo sapiens
  misc_feature (3)..(3): n is a, c, g, or t
tangcaagcttggcacgaggcggatgaaatgtgaggaaaatctgtagttggttttacgcggatgttaatctcttagttttgatcattgtgctgtagctgcataagaggttagctgggtgaagtgtatctggggaccctctatggcttttgcatcttttctctaagtctcctgtcatttcaaagtaaaaacaaaaaaagaagacaagggtagcggcttcaggtacagctggacccagcactcagtgctatctgggcttgtggctccaactcaactcctccatcagaactgtgagaaatgcattctttcagcttctaatcctgcaaaaagaactgcatggtcttcccccagaaatcctaagagtagctgctggtgtctcatgcatgcgagctgcatatgggcccccgttagtcaggaacccatgctgagaggtgctatgctttgaatgtttggctcctcccaaactcgtgttgaaacttaatagccattgtaacagtattaagagggcagggccttcaagagctggtcaggccatgagggccctgtcctcctgactgagtgaatgctgttattgtaggagtgggcttgtttggcctcctcttgctctctctacccctctctgagcccttgtgttgtgggatgacacagccagaaggcccttgccaggttccggtccctccaccttggacctcccagcctcccgaacgttgagccaatacatctctgctcattgtaaattacctagtcttgggcattgtgttacagcagccaaaaagcagcctacggcagtcaccgtgctaacacctgcagcagcctgcggcggtcaccgtgctaacacgtgcagcagcctgtgtggctcaggccagtcagcttcccctggaagcaagtgtgaggtcgtcgcctctggaagtgctagcggagggtgatctcccgggaggaaatcagagtggtgttctactagaaggccgatgactcctgggtaaagtgccaatgctcacctcccatctctgcaagctcagtccctcgtggaatttccccaggagcacaagggcaatctcgacagctcccacgttccccagtgcccgaccccaagccctggccccatgatcagataaatgccctaagtggggtggcatggacatttgcacacgtcccagactgctttatgttagaagctgagctggcatgccactagctggttttgatgtaaacaacaattttgtaaaaccctggactgaatgggtctgactaacggctggttctgtgaacttgagcctcagcgtcctgtgtcagaagagcacaaaccactttcccagagaggttatgaagacagaaatgaccctgtgacccctttgcaaagtatgaagaacggttcccactcatgcatggagctggatcttctcaagtgggaaacaggcgtggtaaataaatactgttgtttcaaaaaaaaaaa

SEQ ID NO: 69395 - DNA, 577 bp, Homo sapiens
agaaaccatctgttctcaacagtcaacagcaggctggatggtgctgaacaaggtgaaatttaccaggattaaatgcagtagtgtgctgtagtgtgctggagtgatggttacattttcaggaattttgcaagcctgctgaaattaagttggtaacttaaaactggccatggtaggagtacttatgccatagaaattggcagctactagtcaggacatctctccccagaagctagttgttatgcaccagcaaaccagctaaatgtcaaatccttcaattccatccacaaaataagtggcacgactaattgcaggcagtataggtatgatgtacagagcctggattttagaatcagatagatctgagggaataatggtaagaggaatgcaacactgctggctgtcaagatgaaggaagggcccacaagccaaggaatgtgggtggcctttagaagcagaaaaggccgtgagccttgagaaaggaatgctcacaccttgattttagaacaagaacatccatgtcagacttcttgcctacagtactgtaatataataaatttgctttgttttaagccatcaa

SEQ ID NO: 69396 - DNA, 460 bp, Homo sapiens
atgccaccaggatcagagatgatctggccagctgagcccttccttaattctaacccataaaattgtgtgcgaaacaaaatggttgttttcaaccactaagttttggggtaggttttatgcagcagcagataatggaaatactgcttggttttgactttcaaaaaaatccatttgttttcaggcttgtctgcactccttctttaagaggtgctaagagactggacttagttctttgtccagataaatgtgtttttcccactgctagcttaggttttatttttttcacgtctgctaagtcagtagtccatttgcttttcagcttccaaaacttaattattctaattttccttattgttctcttccttgtggatttatgcattttatttgctcctttctgtaatttttgtggtatttggcaaacagtgaaggtaaatatacacattcaatctgccacatttaa

SEQ ID NO: 69397 - DNA, 384 bp, Homo sapiens
ggcaggagaatcgcttgaacccgggaggcagaagttgcagtgagccaagatcgtgccactgcactccatcctgggcgacagagcaagagtctgtctcaaaaataaaaaataaaaaaaaagtaggtcttttcatcattgtgttttctagcatgtagcactgtaacttccacctactagtaactgaaaacacgcatgtgggaacattgcacagatggatagatgcagagatgaaagaaggaaagctaaaatatttgccacgtgaaaaccatgcatcctgttcagaaactaattctgccttcacgccttccaggagcatgggaggggtgtcgtcctggcccttttgtggatgagggggaccacatggtatttctactgaagagttgt

SEQ ID NO: 69398 - DNA, 1362 bp, Homo sapiens
gggagggtgaggtgggcggatcaccagaggtcaagagttggagaccagcctggccaccatggtgaaaccctgtctctactaaaaatacaaaaattagccgggcatggtggcagacacctgtaatcccagctacatgggaggctgaggcaggagaattgcttgaacacaggaggcggaggttgcagtgagccgagatcatgccattgcactccagcctggcgatagagtgagactacatctcaacaaacaaacaaacaaacaaacaaacaaaaaaacaagacagaatctcaccagggaagccccttctttatctgttttatatattgaacaatcaagatcaattctagttgaaaaaataattattgcttaacaagttttgaaaaccacggtactatacttttaatatggttgattagaaggggtcagggaaaggggtcagttcaaacacaaatgaagctaaatatgtctgaatacggagaaaaaaggaactccaagcattgttttcatcagaacagttaaagacttgaagccttctcaaaagaaggcccagttgaaacaatagtttatcagagcaacaactcagattgccagtttggacagcacccaagtactacttaagactcctccattccccaggtttattttcagcatcatcctcaagcataatgtgctttcccaatgcactattgcaacaccactacacatgaggtagaaacagaaaccttgctaaacaggttctgcgtttggcaaaagtgccatgaatatgggacattgtacatctccatgcctggggaaaattcctcggtctttttggttaacaccttatagaaatgtaatgcatggagttctctacatgagcacaaagtagactaattgatacgaagagccctgtaaatatgtgtgcagcggcagattttgaacatttggaccgaactgtatttgacacagcgcaatatctggaactggttggtcaaaaacctgcttgtcttgttaaatttcctctgtccaaggacatggaatctctctctaattttacttcaaatttccctttccttcatttctctaaaaacgttaaataagaaagaagattgtaaagccagcatttgaagcctaagtattgaaagtctttgacaatttctgaaatcagacttgacatctttcccccgccttgcaaatttcttgaagaaataagaagctacatgtaagcatcatcatgtttattaaattacaatgagaactctcactcaatcttgaccagagcagactcttaacttggaagcagagtccctctaaaggtaactcttgtggtcactcaatattgtattggcatttgcatattaaatagacatttcagtagcattt

SEQ ID NO: 69399 - DNA, 2218 bp, Homo sapiens
  misc_feature (1253)..(1253): n is a, c, g, or t
catgttgaccaggctggtctcgaactcctgacctcaagtgatccacctgcctcagcctcccaaagtgctgggattacagatgcgagccaccatgcccgcccccccaccccccgtgcattgtgcctttgctctgcactaggcaccctatcaaaacttgaagatcctgccctaacataagcctcataacgactgtgaggtgggtattatctccactttacaggtaaataagataaaaacagaatagtactttcccacccaggatcacatagccaggaagcaggggagtcagaatttgaccccaagctgtgttcttaactcttcctgcatgtaaaacattcctctccttactaagtgtgacctgcagaaaagtcaccacatttctcagagccccagtttcctctctataaaatgggagcatcaacacctacctctccttctgtggtttggatataatatacatgaagtacctagcataggtgactgacagatagaaagtatttacttaatggcgactctttttgagaacagaaatgaccatgagcccattatctgccccctcccaccctcacggatctgcttatcttccttggtcctccgtctcactgaaggcaagcatgtatttggctctgtttacctttccctctctcctgtgactggtggcaaacatgaagatcccccaagagccagctgccagccagaagcctgccttcttacatgaccccatggcagcagggcctgagagcactggtcttgggtgggatggggttcagagcaactcagggctcagggatagggtagcagcgctccttgtcagggcctggggccaggggtgcatgggcatcaacaggacccagtgtgaagtggaaggtgctaggatcaatgctctaaaatcctctttgcaaacagatactcctctgttacttgcagtttgtcctcagtttataatcaggaaaacctgttgattgcaatgactgtagctccaatcatatattcatcaggatgtcattagttcttttctcctaaagccccagagctgcatccccctaccctccctgatgccctagaaagaggagtgctagcccagcgggacatccagttgcccaccacctcctccagcagctcccggccctgtgggtggccacatgccagccaagcactgggcttctgtgacctgaagctgctggatgacttatttccttttaataagactcctaatttgatctcaatttcaaaaaggcaaaatgatgaagganttctccctggagacattctgccctgtggtctgattttgccctggggctggatcaggctttcttggctgctctgaggctcagccctggcttaggtaggagggagccttagggtgctggcaaagcagggaacagtgggctgccgattacctctgccagccaccccagcctcagatctccccagttctggagcagggctcctgtcaccagcgggttggaaggaactgctttaaatgagggtggctgcctgccagatgtgctgattcagctcagcctgagcatcactccattgtcacatctgtccccaactttatgtttgggcttcttatcttcagcagctctggatgctcatttagatccctcaactcccctcgggcaacaagcacacacatacacacacccccacacacacggaattcatctcgctgctgctgggagatgaatttgcacattaaaataggtgagttaacgtgcaaggtgatttacactagatcaaaggcacagcaagatagtgagaattattggaacaagaggctgaagaaaaggctcctagaatgtccaagctgaaaagtattcagggatcatctaatcctctacagtcatccctttgtatccaccagggattgataccacagataccaaagccctgggatgctcaggtcccctatatgaaatgcatcatatttgcatataacctacatacattctcatatactttaaatcatctctagattgcttataatacctaacacaatgtaaattctatgtaaatagtggatatactgtatttcttaaaatttgtattattttttattgttggagtgttatttttattgttttttccccaaatatttttgatctgcagttggttgaatctgcaaatttggaacccgagggtacagagggctgactgtatctgctttgttggagtccatctgattcattgtctaaatacaattaattgctcc

SEQ ID NO: 69400 - DNA, 580 bp, Homo sapiens
cagatttagggcaaagttaacacttcaaaaatatctccagtaattgagtaaattgctcatctgtcaaattggctctttggcaaattactctgcttgcacatattaatagccaagcttagccaacttgaaatatggagatttactggaaatcacagtgaagtgaagagagaggcaagagcagaattgaaattcccacctggcagcaaaagagagttatgcagagcctatcaggacccgtgttcacaccagcacttagtttggaggaagcacctggaggagatgcagagtccagatgtgcgccctctgccggaagcctactgcaccaggacgtaggcctggagtggcccttaacgcatttggaaatcagtcttcactaaaaaaacttcctccaaaatgttctttaacagccctttaaaagccattgtttcaaaacagtccaaggtggtgaacaattaatattttcgatttacatgaagactctggagtaggaattacctgagttggaaactcagttctactctattggtatcaggttgcattctgtatcatcattaaaattttcagaaaaactctcaaaaaa

SEQ ID NO: 69401 - DNA, 458 bp, Homo sapiens
ctcatatctccatgctgaatttcctcactcattcacaaccctcctttccatttcaagaaatctttctgttcccacaagcctgggagggcctttgagtggggcatattgggacccgtgttcacaccagcacttagtttggaggaagcacctggaggagatgcagagtccagatgtgcgccctctgccggaagcctactgcaccaggacgtaggcctggagtggcccttaacgcatttggaaatcagtcttcactaaaaaaacttcctccaaaatgttctttaacagccctttaaaagccattgtttcaaaacagtccaaggtggtgaacaattaatattttcgatttacatgaagactctggagtaggaattacctgagttggaaactcagttctactctattggtatcaggttgcattctgtatcatcattaaaattttcagaaaaactctcaaaaaa

SEQ ID NO: 69402 - DNA, 460 bp, Homo sapiens
cacaccatcattataattctatgcaattattatttaaaaattaaaaatttataggccactcttctatctcagatggggtagaaagactgtgagttgtgcagggacttaagcaccttttacatgtgttttaaagtccattagttgctttattccagtgaagaaatgggatatggtagtgagaacatcatggaagaagctgttaaaacatttcctttcactttagcttttctttccttttcttctacgcacctcctattctttttcttttcccatcccagttcactgatatccaagtgtggatggttcatgtcagacacttaaagtctgaattctctacccacagagctacataattactggacagattttctgccatgctgtttggaattatcaagaaagataactaaattcgacttgctttatactctcataaacactgattcagtatccacaaagcctg

SEQ ID NO: 69403 - DNA, 328 bp, Homo sapiens
gaaagtaagagtggtagaaggaaaagtggcagagagaaggcaaagataacaggtctgcaggttcctcctgagcctgctttatgcaagcaaagacaacagtcaccagcctcaaagcccatttctgcagcacagccactccgtttcttgggttgtgccttcttccatatgtgtgatagaaagctataaaatactacttatatcatgcccccaactatcacttaatgcctgtatggaggcatgaaatatttatggtaatgattagagtctggcatgcatgtgttgaggttcaaagttctttaagagaatctccattagcttaataaaatgg

SEQ ID NO: 69404 - DNA, 325 bp, Homo sapiens
ctgaactccagcctgggcaacagagagagattccatctcaaaaacaaaaagaaaagaaaagaaatatgatgctagttgtcattactaaaatgattctgatcaaacaatttgatgtggtttagatgtgtgtctcctccaaatctcatgttggaaagtgatacccagtgttgaaggtggggcctgatgggaggtgttggatcatgggggcagatcccttatgaatggcttagtgccactgccttggtgatgagtgagttcttgctctgttagttcaggtgaactggttgtttaaggagtctggcacctcctcctctctcttgcttcc

SEQ ID NO: 69405 - DNA, 335 bp, Homo sapiens
agaggcataataatccttgttatttcataaattcaaaattctagtttcctgtctacaacttgacctttaccagatacattctattgtgactgaattatgtcaattcttccttgattaatctttttaatccattctctcctttatcattgtttatttgtatctcatgtaacttattcttgtcctacatgtaaacaatggtttcctgaattccaacatcattctgccatctgatcctttcagttttagctctgatcactttccaccacacatttttttctacaatctagacaaatcagtgcatttctcaaaaatatgctatttcactttgtgatttt

SEQ ID NO: 69406 - DNA, 433 bp, Homo sapiens
ttagggtctgtggaggctttcttccattcagtgactcaggggtccaagctccctccatctggtggcctatcatcttaaaacatgacctcttcagggacaagtgaagactggcgcaggatgatttttaagactgaggcctgggctgggcgcggtggctcacgcctgtaatcccagcactttgggaggccaaggcgggtggatcacctgaggttgggagttcgggaccagcctgaccaacgtggagaaatcccatctctactaaaaatacaaaaatttacctggtgtggtggcgcatgcctgtaatctcagctacttgggaggctgaggcaggagaatctcttgaacccaggaggtggagtttgcggtgagccagggtcgcgccactgcactccagcctgggcaacaagagcgaaactctgtctcaaaaaaaaaa

SEQ ID NO: 69407 - DNA, 250 bp, Homo sapiens
ggaagactgacattcagtgtgggcggctgcaatctctgctccttcattcatggcagacatggatcattgatcactgcacgctccctgctgaacccacacaaggcctcagagatctgttccacccagagctccaggcagtccccacctatggtctgccgttgagaggaaacatcattgttgtgggtaattgggagccactgcatgttcttgagcaggagaatgggtgtcagaacaggttttgtgttcctgg

SEQ ID NO: 69408 - DNA, 2641 bp, Homo sapiens
caaaaaaccaaatggatcttgttccgcatagggcagacaggacccagaggacacagcagtccacaacaaaggcactggattctgaatggcccctgtcttgtttggggagaggggaactgttggtccccgtctgtgttccgaggcttggtgacaaattctagcaaaccttagtggtttaaaacagcagtccacatagatggtctctcacagttcctgggaagcaggaccctgggctccatggcaacctggttctgctctaaggtctcaactgaggtgtcagtgcctgggtttacctcgaaggtattgtagtggggtaggttgggcaccccccttcacatccagctggagccttggagcaggacctcctgtagaaccagggtcttggcagacatcctcaatgagtgacgtcgagaccaggccatcctggattagggtgggccctggacccgtaacaggtgatcgtctaagagaaagaggagggggatctgagatgcacagatcgggaaccagccatgaagacaggccagagactggagtgtgtggccatgcgcctgaggcacctgagccaccaggagctggaggaggctgtgcagggtcctccccagaacctttggagggagcatgcccgggacacctcaatgtggggcttctggctgcagagttgcgaggaaatacctcccttgctgttgtgaaccacccaggttgtggtaacttgctgtggccaccctgtgatgccagtatacctccttccctcatgtctggtgccaaggccgggagagtcaaatacctggggctaaaagcattggggttcctcagatgatcctctttgcacccctgcatagggtgtctgcccacacggcctcagggtcatgagttttctgcaggcagccacctgacctgtccagccggacatgtgtctcccccatgggtcagtttgggcagcaggttgggtcccgtgtaaggctcagggctgctgggctctgatgtcacctgttgccacggtgactctggttgctaggatcagactactcccttcctgggcacactgtatcccgaatccccagaagaaccaaggggatcccccagcacaaggctcgttggggagggagtccttggcgctcagatttgagagagagagtcggggctggccagggggcgtggcttgggcagaggagagtgctcatggtgaccctggaggagaccctcccttccctcgttcattgctcccaaggccaggtgtctctaaaggaagccagttgtggagaatgttggtcctgcagtggcgattaatgcaaagatgccctgaacaaagcaggacacacgtgcctgcctgctacccctgcccagctgctgttcttggacgcatgtgctcttctggtgggacccgtgaatacgtggctcacggtcctggggcacaccccattgtgtgaggctgggggtcttgtggggagccaggcccctggtgtgggtccctgctcagaagccccacgcagcccctgttctgctgagtgcggctgaaagccccccatacccacagccctctgtcctcaaatttttctcattttaaaaattgtggtaaaatacccataacataggacttaccattttaaccttttaaaaataatttaaattttttaagagacagggtcttgctctgtcacccaggctggagtacagtggcgtgattttggctcattacagcctccgcctcctgggctcaagcaattctcccacctcagcctcttgagtacctgggatggtaggcacgcaccaccatgccagctaattaatatattttttcttgtactgactgggtctcagtatgttgcccaggctgatctcaaattcctggcctcaagcgatcctcccacctcagcctcctgagtagctgggattataggcgagagccactgcatccagtgacttttttttgtttgtttctctaatagctgccatcctgatggggtgagctggtgtctcatggtggttttgatttgcctgtcctgaaggactcgtgactttgagcgtctttccatgtgcttgctgctgtttatagatcttctccggagacatgtctgtcttccctctcattcttgcatgcgggcgtccacaggctgacccctcagctgctcagccaggcccctgctcctgtccacagagcccaccctccaggtgcactccctgcctgcctcctgcaggttcctttcctgggcatggtggcccagccctctctgtccctcacctcacctgctttcttcatggcatgtgcacatctgacatggttactagttgtgtgatttctgtctgcctttgcagtggacacaccacagacgctcagccaatgcttgaaccagcaggtgggtgggactatgccaggacgggatggtggctcagagaggggctgcctggtctggggcctgacaggcgggaggaggagaggcctgtagcacccattggaggtgtgtggtcgcccagcacaagaacaagggaggaggcagtcaggcgggggcgctcctgcccaggccacggagctttaattaaaacccgcccggagcatgaccccactctgccatgcattcttcacttaattggggcccttcaggaggggccggctgaggttaattaaaaagcccagctgaag

SEQ ID NO: 69409 - DNA, 573 bp, Homo sapiens
tgactgataggctgggtcaaatgctttcccttactccttctttgggagataggatccctctttattatagaaaatgtgttgttgttattattattattattgagatggaatctcactctgtcacccaggctagagtgcaatggcaaaagtgagccaagattgtgctgctgcactccagcctgggcaacagagggagactctgtctcacaaaactaacaaacaaacaaacaaaccccatggacaaatggataaaaaagaacaagttgtcttagaaatcaagggaaaagagcatttcatcaagtatgtacaggatcggctatgtaggagttagctgtgtgacactgggcaagttaacctctcttagcctcagttttcttattcgtaaaatggagatagtactagtacttacatccagggttggaaggattaaatgcaatcatacatgtaaaggcttggaaacacatacacataagctacaaagaaggaagtggctaactatccaatagtgatctaaaaagacaaaatctgaaaagtttccattggaatttgcagcaaggaagttataggtgaccc

SEQ ID NO: 69410 - DNA, 215 bp, Homo sapiens
cagggccgccacctcccttccgtctgggtcagggctgcaggactgcaggcacctttcccaccactaccccggtgggtaagagccaaatgccggcccctcgtctccaccatcctgttgtgtcaggcctctgtgtggacccagaatgccttcctgtgctgcctgccccaggtgcctccctgctttcagcctcatctctctaggtctgtctccactca

SEQ ID NO: 69411 - DNA, 764 bp, Homo sapiens
acaccttaccaagtaagagagttgaaccatctccacatgacaatggaagctccactctcaagcaccacagccacaaaggaacattctattgattctgacccatcctcgggaagttggggatgaacatggtagggagttcttgagtaatgagaaaaacatcctgagaatacaaactttatagggttgttaagtatatggtatacagagtagtgaattggcatggtattcgcttacagggaactcacagtcaagaaagttaatttgctgaatgatactaacatctcctctgctacattcatttctttttaatgatttaatggataattttttaggatttaatggttaattaggatttggacatatctttgccaacataaaaagagactaatgatgtaccttgctcttttgaaaaggaatatgatgttcaagcagcagtaacagatattctggagccaatcagtatgaggattagcagccgatcttctacaataatgtatatttaaaaattaagtgaaaatgcaataacgtacgtccattggttcgatatagaagggtgacatttcttttctaaaatttagtgcttttggtgcagtggttcttaaatttgttgtgctgatgaagcaccttaaatgcttatgaaaagggcatatttcatggacccatgacgagaaatggtctgatatgccattaagatctgctttttcttttcttttggtaaacaagcatctcaggtcatctgcagagtttgagatatccattgtccc

SEQ ID NO: 69412 - DNA, 448 bp, Homo sapiens
tgtatgggtgggtgaggcacgccatgcaggtattgcagaaggaacccacgcaaccgtcatcctttctacccccaagtgatgctgcctcattctggggtcctgaaagtaggcttcacttaacatggtagggaagtttctggctgaaaaagcaaaaggcttttatcactggagtctatcctgagccccctgtgcaaaaggcagtgtgaactcaggggacagaatcactgaagcttttgtaaaagcacaacatctgcctatcacagtccaaaggggacttcaaaatcaagaatgtctgtgacggagaagatggaaacagagcctggctgatggttgtaggtgaatcttctctgtgtcgagatgttatcagtgaccgttttctttatttcatgaagaaacatttttaatatattcacctccctgcatatattctgtttactgtgttattgtt

SEQ ID NO: 69413 - DNA, 407 bp, Homo sapiens
tgataatctatatatggttacctctacagttactggcgacagatttggactgccagtttctgtgagtactttatatgacttttctggtaaaaatctattctgacttggaagaatcagccattctggagagaagaattggctttgtctccatggtaacttatttttctgttttatgtgaatagtgacggccaattgtgctaaagtaagggtgatagttttgtgatgaactactttacatggggattgaacattagaacactgagcttattttactggaggccgagaagcaaaaggctttaacatagcaggttggtggtcataatgtacaatatgtatttttctattctcttaaaattttaaataagctcaatatattattctacattgtgccctaatattttgcagaa

SEQ ID NO: 69414 - DNA, 620 bp, Homo sapiens
ttacttgtgcgtgcactgagggatggggcgtacctccatcagaccaactcagaggcagctttgcgggtgcactgagggatggggagggcacctccatcagaccaactcagaggcagctttgtgtcttacattcatctttatatttgtaaaataacaaaaaatttatatcattgtaaatttatatgtgagtagagactgttcatataaagcaggacttctcaatctatctgtcctttttttaattaatgtgcaattagtcatggactgatagttttgtaaaaagtgaattcctgggaaaacaagattagaaagcaaagacagacaaaattcttttattattagatttaacagacatagcattactctgctggtttgctataaaagcttctgaatgcttctctcggtctctcttactcatatcttcatagacttgtaatagtttgcacatgggcacctgttccagaacacagattgagtggcactggaatgcccacgcactcagcacccagctgcaatgatttgcaactccttagctaattttggatgatctgtgcccccaccacttcccctttctcctatatcattttgaagcaaactccagattcatatcattttatctg

SEQ ID NO: 69415 - DNA, 382 bp, Homo sapiens
caaagttaaagatgctgtgaggcagtaaagagggatatattgaacacagttgctgatcgttgtgaaatgctatttgaggatctgcttttgaatgaaattccagaaaaaaaaagattctgaaaaagagttccacgtcctcccttatcgagtctttgttccccttcctggatccactgtaatgttgtgtgattataaatttgacgatgagtcagctgaagaaatcagggaccattttatggagatgttggatcacacaattcaaatagaagatttggaaattgcagaggaaacaaacacagtctagtatagagatggattaacagtaggaagagtttaatattactagaacaaaggaagcaaaacagcaatttggaaagtttag

SEQ ID NO: 69416 - DNA, 433 bp, Homo sapiens
catgtaactctgggaagttgcctgtgggggacatggaggaaaaaaacaaaatcctcttccccagtctggtcaatacacccatcacacatcaatcaagtgatggagacactggcctggcccaggataaggatgctggattcctgggatcctggtgtgcaaatcacctgatgaaataactaggagaaaacatttctatccttaaaaaaattatagctgaatgcgaggtggctatagctttccaaattcaaaagatgtgaaatgagccagcctggtttttctacctcaatgactcctaatcccacgtttaggactcctcactaataattccatcactctgcattatgctatacactaggggcagtcatcccaaaacgaaggaatcactcgtcgtctttacttcaggaaatttcttggtaaaactgacttcaagaaa

SEQ ID NO: 69417 - DNA, 487 bp, Homo sapiens
tacaaccacttgctttggcatctgagagccttggatgggaatgtctgctcctccactgacaagctgtgcagtcttgaacatctcaccctctctgaactctagtggatttttctctctggtcgggaatagcatggtgctcatggctttcagggagcataagggctttaacacttgtagagccctggccgagttcctgcttggaggaaggtcgcccactgactgctgtcttcagccaggtctccagactcccagggcttggatattttcagtatttcctgttgccttccagtagtagaatttagaaaggccagtcaaccttagtggctttaacaagaatcttttgaggcagcgttatcactgcaatgaacttcaaatcctaccttttcccatcctagccccgcccagccctccccctggatttcagagaaaggccttctccaggtgtccgcatgtcccatttgcaaaatgcctctcgaaattggagagt

SEQ ID NO: 69418 - DNA, 659 bp, Homo sapiens
ctctgcaccccatccgctggctctcacccctcggagacgctcgcccgacagcatagtacttgccgcccagccacgcccgcgcgccagccaccatgctaggtaacaagcgactggggctgtccggactgaccctcgccctgtccctgctcgtgtgcctgggtgcgctggccgaggcgtacccctccaagccggacaacccgggcgaggacgcaccagcggaggacatggccagatactactcggcgctgcgacactacatcaacctcatcaccaggcagagatatggaaaacgatccagcccagagacactgatttcagacctcttgatgagagaaagcacagaaaatgttcccagaactcggcttgaagaccctgcaatgtggtgatgggaaatgagacttgctctctggccttttcctattttcagcccatatttcatcgtgtaaaacgagaatccacccatcctaccaatgcatgcagccactgtgctgaattctgcaatgttttcctttgtcatcattgtatatatgtgtgtttaaataaagtatcatgcattcaaaaaaaaatcctcctcaatgaaaaatctattacaatagtgaggattattttcgttaaacttattattaacaattagtcattatagtctccctcaactagca

SEQ ID NO: 69419 - DNA, 1072 bp, Homo sapiens
attcagagacaaggtctccttctgtcactcaggccagagcacagtggtgcaatcaaagatcactgcagcctcgagctcccagcctcaagagatcctccctcctcagcctgcccaagtgctaggattacagttgtgagccataatgcctggccagggttgtctttaacactaagcagtaaatgtctttccatgtttcactgacatgcatatgatgtttgccacagtaaaaagtttagggtagactatatcgacttactgttagaaaaataacaacgcagacctacttagaaccttggtttttgtctttgttttgtggcccaaggtcacacagttagtgcatgaagtaaaattaattgcaacctgattgacagactccatcaggtgcagttagaaggagacaaaacttgacggtcttgaagttgcctatgagtgctattttattaaaaaggtcttattatagtctaataagtagcatcttactacataataaagctggcaggaaaaggaagcatatttagagttgaggaacaataactttcctgtcacagcttcatgtgatttctgtaattttgattttcaaaagatcggggtgttcttcggctcctttgatacatacagagcctttcaaatgctctctctgatgtttgcccaagacgcctgtcaacatcgtggaatgctgctcagctggggctgtgcatattgtgcctccgcctcacgatctgatattccacatggcttcttatttagaatgccaacaggaaacttttcaacagttcccggtcatctttcacttcagatctaaatgtctcacccttgctcatacctcaggaagttgggcagctttccttacatgctttgcttcttatgttttacaggcttgaagaccctgcaatgtggtgatgggaaatgagacttgctctctggccttttcctattttcagcccatatttcatcgtgtaaaacgagaatccacccatcctaccaatgcatgcagccactgtgctgaattctgcaatgttttcctttgtcatcattgtatatatgtgtgtttaaataaagtatcatgcattca

SEQ ID NO: 69420 - DNA, 558 bp, Homo sapiens
ctctgcaccccatccgctggctctcacccctcggagacgctcgcccgacagcatagtacttgccgcccagccacgcccgcgcgccagccaccatgctaggtaacaagcgactggggctgtccggactgaccctcgccctgtccctgctcgtgtgcctgggtgcgctggccgaggcgtacccctccaagccggacaacccgggcgaggacgcaccagcggaggacatggccagatactactcggcgctgcgacactacatcaacctcatcaccaggcagagatatggaaaacgatccagcccagagacactgatttcagacctcttgatgagagaaagcacagaaaatgttcccagaactcggcttgaagaccctgcaatgtggtgatgggaaatgagacttgctctctggccttttcctattttcagcccatatttcatcgtgtaaaacgagaatccacccatcctaccaatgcatgcagccactgtgctgaattctgcaatgttttcctttgtcatcattgtatatatgtgtgtttaaataaagtatcatgcattca

SEQ ID NO: 69421 - DNA, 402 bp, Homo sapiens
ggatccggttgcagtgagccgagattatgccattgcactccagcctgggcaacaagagcgaaactctgtctcaaaaaaaaaaaaagggatgcagggcccagacaagagaagagtcccatcatgcaggtgctgggcccagtgatacatctaaatctttttttgttcagagtccaagcagtagagaagaagtcacattacctaaatgctgcatccagcaacatgtcacaatacccggataaggagagcccaggcagaaaagtcacatcacctaggtgaaaggcccaggggtatttcctagtgctacttgtttgcagagctcaggaagaagacaagagtcagataacgtaggagctggtagcacaatcactacagtgggcagggtctagctatgagaggagagtc

SEQ ID NO: 69422 - DNA, 560 bp, Homo sapiens
ctcctgtaaacagcctctctgacttctcttctcagatgccctttcaagggcgacagctacagaacccaaatggtagccttggacggggccacaccctttccagtcgcactaccagcgattcactgttgctaccttcgccctcctggactcaggctcccagagagccctcagaggactggtttacttgttctgcagcacctctgcctgccacacctcagggctggagacttgctccactgcatgtagcactggcactacaagacagcgacgatcctcaggtcaccgtaatgacactgccaggccccaggacatcgtgagctctccggggccagtgggctttgaggattcttatgggcaggagcccacacttgggcccacagactccaatgggaactccagcctgagacctctcctttgggcggtccttttgctgccagctgttgccctggtccttgggtttggtgtctttgtgggcctgagccagacctgggcccagaagctctgggaaagcaacagacagtgaatgggcccaataaacaatcatttcaaacctactgaaa

SEQ ID NO: 69423 - DNA, 401 bp, Homo sapiens
gcttctttaaaaactcaatagtaagcattttagaactttttctaaatttgaatagttgaagtttcagcttctgttttaaccagaatttattgtaaatggccaaaatacctatctactgctaaacatcattctggaattctgtttatgcctgctaaactattgcatttgcatcttcatccttttaaagatggagcaacttaaatgcacatagcaatctttttataaaagcataattatgtcttgtgctttttaaaatgaaaaactagtcctatatgcattattggtttatgtgaaaaagtaattcacaaatggacttctgtataaatacatgttttaaatagccttgaatttttcttgccttgtactttttatgtaaataaaattaagcaattgtttatcgt

SEQ ID NO: 69424 - DNA, 162 bp, Homo sapiens
ttttttctgtttgcttatttcttttcacccagacacactgctgcttgttctaaactatgcatattggttatggtatggtcaagtcagtgtagccgctggaggaaagaaaaatgaagcttgcaaggaagaagttgtttaggcccacaggtcccagagaggagg

SEQ ID NO: 69425 - DNA, 328 bp, Homo sapiens
gacaacctacagaatggatgaaaatatttgccaatcatatatctgaaagggtatagtattcagagtacattaaaaactcttacaactcaaaatacaaagacaaataataacccaattaaaaaacaggcaaagcatttgagtagacacttcttaaaaaagatattcaaaggccagtaattacatgaaagaagctcaacaccattggtcattaaggaactacaaagccacagtgcatgtatgactataataaaaaaagacaatgacaagtattggcaaggaggtggagaaatcagaaccctcatacactgctggtgggaaagtaaaatgg

SEQ ID NO: 69426 - DNA, 445 bp, Homo sapiens
  misc_feature (394)..(394): n is a, c, g, or t
ggtagtggcatgatttctgcttttgtagttctcttttgtttctataggaccgtgaatttccatcgctcgctttctctctgtgccacaaacttgtcaaaggatgtcttcccacttctaagttgtctctctccctgccagaagcaatgccttccctaattcctggctgcatgtattttcataccttcccttctgttcagttccttagtagccactgctctgatccactcagacctatcctcattattttcccacttgggaatgggactgtcttttgtgggtaacttttatctgtctgacctttctgggaaccctcctgccctctccactgcatagtctctgcctgactgtctaactctagtgtggggctttgggagctgggttttggggggttcantttctcttaaactttccataaggttgaagtgtgtaggtattttctgactcc

SEQ ID NO: 69427 - DNA, 310 bp, Homo sapiens
ttacaaatttagctcttccacttctcttggcgtcctttgggcgtgcgttccacagactgcacttgaccttgtatcttgtaaggaggtgttctttctccagctgccaaggttccagacctgctgatttcactcctttgtatttcctactgggcttctggaggaattttagtttgtgatgcccgcatatatgtgtaggttatatatagatatcaccttttacattttcatttagttttggacgatgtgtttctgtgattcaaattccaaagattccattctgggcaacaacacaagaccccgtctctacaaa

SEQ ID NO: 69428 - DNA, 648 bp, Homo sapiens
atcgagctgtgtgacaagggtgccagccactccaggtgaagacaccaccccaggccatcaaggatcttccctaccttcactaaacagagcagggtgaaagttgtgtgatccccaataggtagggactacaccccaagtcagcaggaagcagttacagaagaaagaccattggtccctctgcttcccataaagatttatggggatcacagctttcacgggggagatgaggcaagagaatagggcatgcaggcagggtacttgaggccaatccacgctgacttcctagaactgaattaaatgaaagctcctcagcaatgacaggaatgtgaatggctttgtaacttcttcctctccattaatgctatttccactttgtaacttcactttcatcctctccatttacatagatcacacaccaagtaacatcctctccatttacagtagggcgcattccgagtcaatgactctgactgcacttcgttctcctcatttacatagaacattcgccaagtaaccaatgggaaacctctagagtattgaaactccagaaaattccgtaagtggggctcttgagcgtctacactcgggtcgctcccacactgtggcgtgtacttttattctcaataaattcccgcttttgctttcaaa

SEQ ID NO: 69429 - DNA, 5003 bp, Homo sapiens
  misc_feature (1413)..(1413): n is a, c, g, or t
  misc_feature (2197)..(2197): n is a, c, g, or t
  misc_feature (2487)..(2487): n is a, c, g, or t
  misc_feature (2745)..(2745): n is a, c, g, or t
  misc_feature (3123)..(3123): n is a, c, g, or t
  misc_feature (3889)..(3889): n is a, c, g, or t
ggcttcaggtttaaaggcgcgagcgccacccacgcaggcacaagggctcctagtcgttttatttttagcgtaaggtcttcctctttaacaaggaagtaaaaaaaaaagttgtgcaataaatattaatcgtccttatatgtactcgggaacgttcgtcctttaggttttttcctggcgcatgggcgccgccaatcatttcggggcttattttggttctaaagcccggggcagccaggcctccctgcctggcctcggcggggacgcgggacctggggccccggaccgggcctaaccgccctggccggtccccactgatggtggcggtcggtcctgatcgtcctgatggcagcgaccaggctggactcgggctgtgcaggggcgaggggagcagggcggggtgacgcccggagagcggcctggagagcgcgtgcttcagaaggcgtgggcaccctgtcccctttgcagatggggatgcaggccctggtggcggtggaggggagatgggggcagggacgttgccgggcagaggaagctgggtgagtgtgcacttggtcccctttgctcctccctgggactttgggctctatagggcagcctccgaggcccacgtgcacactcggtgaaccacagtccagacacaggcagggcggcaggccagggaaggagaggccaggtgttggtgcatggagaggccaggtgttggcctgggggtgctaagtgaacccccaaggtcgcggagacagtagggcaacagcaaaacgagctctgccgtccagggcgagggcccggagtcctccccaggggtgggctgcagagaagcccctgtccaggccctgctcacctgcaaagtgctcccgagctcctgtgcccccagcagcaatcccagccccgctgacacccaagcttgtcacccgctgggtttcttgaggtctgaggaccgtggctgagggtgcatgggcgctgggatggagggggatgtcctgtcccagtctgtgcttattaattgttaaagagggcaaggctgcttttattcaaggtgggggggctgctaaagcgagatgttgggttaggggaggcagatccggctcaactccagatagaaaaagtgggaattgacagcccaggcgtagggtcgggagtggagagaaaattactaagaggaagggtcaggggcaaggcgggttctagctgcatagacaggatttttgctgaaaaggcaggcagtgtggtcacagaccgagggtgggagttgaggactttgatcagggaccaagagtagacgattttcactaaaccgactcagcaggattcttgctaaatcggccgaaaccggccaaggtcagggactggtcacagggagggctcagaggagcctgactcgagtgtggtcaaaggagagagtctttgtcatcntttaagaggcgagagtgacgtattagtgagaaacggtgaagggatcaagctcaggccagcagccccgagtttgagatgaggacaggctgggtccaggaagggctgcaggaatagggggcacctgagcctgcagaaagcggggagcccagccgccagagcaggcacccccaggcagacctcagtgtgtcctgccctgtgggagtggcaaggccagaccaagctggatgtgaaccagtcccagaacaccgcctagaatttggattgtaatttgttatcgatgatattgctgcttggtctctctcctcttcctccccacccccacccaagatggagtctggctttgtcccccaggctggagtgcgatggcaggatctcggctcactgcaacctccgcctcctgggttcaaacaattctcctgcctcagcctcccaaatagcggggattactggtgcgtgccaccacacccagctaatttttgtatttttggtagagacggggtttcatcatgttggccaggctagtctcaaactcctgacgtcgtgatccgcccacctcagcctcccgaaatgctttgggattacgggtgtgagccgccgcgccgagcatggccatcgtggctacatcagtcccggctaatagagattttagcacactcagattctattggctaataagatttaattataattctggggtatttaacaatgtcgttatacagtcttcattgttgcaaatggagaatgaaatcgggtgcatgtgacactaatatgacctgttcatgcnctgtcacttaaacggagttaagtaacatagccctgagcaggaagactccttccccacttctgtccaggagctccttactcgattctggggaacagaaaggctttcagcggccaaggggagtgacaacagccagacatgagacacctcctagagccctttggtgttaccctttccggtccatcagccacagtgtccaccccaggtagctgggtcctgagttcaccgtctcaggacatttttcgacctggtttgtctgaattattattattattgatcattgagacagggtntcagtccatcgccaagactggagtgcagtggtgtgatcctggcttactcagcctcccaggctcaggtgatcctcccagctcagcctcctgcgtagctgggaccacaggcaggcaccaccatgcctggctaaattttttgtattttttgtagagaccagctctcgctatgttgtccaggttggtctcaaactgctgcctcagcctcccaaggtgctgggattacaggcatgagggaccaagctcagcaatctgaattanttatgcagaatttttttttctctagctggaagagctgtttatatgcacgtttctttgggggcaactcttctccattgtcacagattttttttttccaagccattcctgggggattcctgggagccatgtgggagaggcgtgaggaagtgagaccttcaccccgagacaggtcctgacacaccctctggtgcctctactcaagtgagaagtttggctgctgtaactgactgggaagcttaaaataacagacaatcatctctcacatttatggggactgggaagtccaagaccaagttgccatctggggagggcctgttcctcacagcgccttccagctcaggcctcgtttataagggcactcaagccttccacgacaangggtcctcatgacttactcacctcggaaagccccacccccaagaccatcacattgtgggtgatggcagagcataaggtgccttccccacatgctcgggttggcccagcgtctcacgctagcagctacgtggaatagttattttttctggagaactctgggacccctctgatgtcttggagcacccacacaggccgttcactgtgcacgctgtgaggctgtcgtcttggagcacccacacaggccgttcactgtgcacgtggtgaggctgtcctctggggagttctgctgttgtatgggttctgtctgtgtcaatgtcccagcgggaacgcagggcacactagcgtcatccccagagggcttggtaaggggactgtttgcagagacataggcagagggctggaaaactaccaaaaaagtgcagtgttctggacctaataatagcagagctattctcaccctggtctgaaggcaggaggggaggagcagttaatggattctggaagtcaggttgcacagagtcaccttgaaagatgccatgaccttcaccgagggccagacagagactaagatgaccccataggagaataagacctagacctcatcctcctgcctcctgccagtccctgccaggggtcgccaatggcaaaacaggactggaagccagaggccatggaagcccatggatgaagtccacaggccagcctccccgagagcagcctggacggtccgcaggagacgtctcctgtcttaggcgtcccacgccgngtgctcctgttcagccctgccgaggtggaagcttggagtggctcacggtggatgcattgacgctgcagacgccagcaagtgctacaaaccagagctggcctttaactcagactgatggagaaggtgttaataatgcagattagacttaaaagtgttgaagccattgcactgtgaacagcaaaaaaattgaagaactcttctggcatttaaaaacaattactcagttcagcagagaagtcactgacaaacgagatcacactgactgctttgtcgttttggttttgtcttactcattaatgcaaataagaacattcactagcatctgtgtcgggcctaccctccctggtcaaatacagctacagtctccctgcagatacgagttttccagaaatgagccgatgttttctgcgagaatcaattggtcatatacaatttacaaaaatgagtactgtatactatatttgtaaactgtacactgcagatgctttatttcactgaaatttataatacacttatccatgtatatgcatgcatgcatttttgttcctgagatccagctgtgaaatgtttaccagcacataaattaccagcacatgctcttttttgttaacctactaggtaaaatcttcatttattacatcaaattcttgtagtttttgtattgcaattatgcagatattgattatcgcagtattactgcaattatacagataccacaatttcagatattgatcagcgtgttcagttggtttctaaggaggtttacttacctcatggtacacctagtttgcatagtttgattatatttaactcttatgctaattgggggaagtcattgatttattggacagatgcacctgtggtcttccctgagcacatcctggccaaggatgctgcccccaggagatttgagaagtcctgtaaggatcatatcagtattttcaaatacttatagaaaagccagagggattgacccagaattaccaatataagcttgaccctgagataacaatgccattttatgtttgcatgcataaaaccaatgcaagaggctgatgactccagatcccttatataagccaataaaaagtagtttcattttttatttcattta

SEQ ID NO: 69430 - DNA, 2588 bp, Homo sapiens
  misc_feature (708)..(708): n is a, c, g, or t
  misc_feature (1474)..(1474): n is a, c, g, or t
ggcttcaggtttaaaggcgcgagcgccacccacgcaggcacaagggctcctagtcgttttatttttagcgtaaggtcttcctctttaacaaggaagtaaaaaaaaaagttgtgcaataaatattaatcgtccttatatgtactcgggaacgttcgtcctttaggttttttcctggcgcatgggcgccgccaatcatttcggggcttattttggttctaaagcccggggcagccaggcctccctgcctggcctcggcggggacgcgggacctggggccccggaccgggcctaaccgccctggccggtccccactgatggtggcggtcggtcctgatcgtcctgatggcagcgaccaggctggactcgggctgtgcaggggcgaggggagcagggcggggtgacgcccggagagcggcctggagagcgcgtgcttcagaaggcgtgggcaccctgtcccctttgcagatggggatgcaggccctggtggcggtggaggggagatgggggcagggacgttgccgggcagaggaagctggaagtttggctgctgtaactgactgggaagcttaaaataacagacaatcatctctcacatttatggggactgggaagtccaagaccaagttgccatctggggagggcctgttcctcacagcgccttccagctcaggcctcgtttataagggcactcaagccttccacgacaangggtcctcatgacttactcacctcggaaagccccacccccaagaccatcacattgtgggtgatggcagagcataaggtgccttccccacatgctcgggttggcccagcgtctcacgctagcagctacgtggaatagttattttttctggagaactctgggacccctctgatgtcttggagcacccacacaggccgttcactgtgcacgctgtgaggctgtcgtcttggagcacccacacaggccgttcactgtgcacgtggtgaggctgtcctctggggagttctgctgttgtatgggttctgtctgtgtcaatgtcccagcgggaacgcagggcacactagcgtcatccccagagggcttggtaaggggactgtttgcagagacataggcagagggctggaaaactaccaaaaaagtgcagtgttctggacctaataatagcagagctattctcaccctggtctgaaggcaggaggggaggagcagttaatggattctggaagtcaggttgcacagagtcaccttgaaagatgccatgaccttcaccgagggccagacagagactaagatgaccccataggagaataagacctagacctcatcctcctgcctcctgccagtccctgccaggggtcgccaatggcaaaacaggactggaagccagaggccatggaagcccatggatgaagtccacaggccagcctccccgagagcagcctggacggtccgcaggagacgtctcctgtcttaggcgtcccacgccgngtgctcctgttcagccctgccgaggtggaagcttggagtggctcacggtggatgcattgacgctgcagacgccagcaagtgctacaaaccagagctggcctttaactcagactgatggagaaggtgttaataatgcagattagacttaaaagtgttgaagccattgcactgtgaacagcaaaaaaattgaagaactcttctggcatttaaaaacaattactcagttcagcagagaagtcactgacaaacgagatcacactgactgctttgtcgttttggttttgtcttactcattaatgcaaataagaacattcactagcatctgtgtcgggcctaccctccctggtcaaatacagctacagtctccctgcagatacgagttttccagaaatgagccgatgttttctgcgagaatcaattggtcatatacaatttacaaaaatgagtactgtatactatatttgtaaactgtacactgcagatgctttatttcactgaaatttataatacacttatccatgtatatgcatgcatgcatttttgttcctgagatccagctgtgaaatgtttaccagcacataaattaccagcacatgctcttttttgttaacctactaggtaaaatcttcatttattacatcaaattcttgtagtttttgtattgcaattatgcagatattgattatcgcagtattactgcaattatacagataccacaatttcagatattgatcagcgtgttcagttggtttctaaggaggtttacttacctcatggtacacctagtttgcatagtttgattatatttaactcttatgctaattgggggaagtcattgatttattggacagatgcacctgtggtcttccctgagcacatcctggccaaggatgctgcccccaggagatttgagaagtcctgtaaggatcatatcagtattttcaaatacttatagaaaagccagagggattgacccagaattaccaatataagcttgaccctgagataacaatgccattttatgtttgcatgcataaaaccaatgcaagaggctgatgactccagatcccttatataagccaataaaaagtagtttcattttttatttcattta

SEQ ID NO: 69431 - DNA, 519 bp, Homo sapiens
gactgcaagtgtggaccaccatgtctggctaatgttttttatttttagcagaaatgaggtcttgctatgttgccaaggctggtcttgaactcctgagctcaagcgagccttctgccttggccttccaaagggctgggattagagggctgagccaccacacttggccaaccatattttattttttatatttttattttatttgatccttgttctgaaaccataaagtgagtttaacatttctggctgggcacagtggctcatgcctgtaattctagcactttgggagaccaaggcaggaggatgccttgagcccaggagtttgagaccatcctggacaacataatgagaaaagaaaatacaaaaattaaggggtgtggtgacacatgcctgtagtctcaactatttgggaggctgaggcgggaggactgcttgagcccgagaggttgaggctacagtgagccatgtttacgccattgcagtccagcctgggcgacagagtgaaaccctgtctcaaaaaaa

SEQ ID NO: 69432 - DNA, 438 bp, Homo sapiens
cgtgaaagtcttgtctttcagacaactcattctggcagtagtgtagaaaaggaattgcaggggattcaatggaagcagaaagctctgttagaagtctatgaggataagtcctggccagtaggtgtgaggccctgaactaaaagcagaggcagtggaatagataggaaagaggttaaaggtggatattgtggagtaagtcaatgattggtgttccagttatctatctatctatgccctaaaacattggcatatacgcaagattgcagaagacaaggacaacatagaaaaatttattgtatttctgtacagaagcaatgagcagactgaaaatgaaattaaggaagtgattccatttataataacaccaaaaagaaataggaataaattgaacaaaagcagtgcaaaacttatactttggaaactacaaaacatagttga

SEQ ID NO: 69433 - DNA, 512 bp, Homo sapiens
gaaaagagtgactaattaacatatagatgtggagtctcttgaattcttcatcaaaagacctccatcatgaactctgttttgcaaatagccagtcagtggaatcctgtgtttcttatgaagtgccatagctacgtgattataataatttaatggtctacattgtcttgaactctaaaaatgtgacatgcaactctccttcctactgaaatgtttctttttctttactaacgtactttgagcatgccaacaaatgcctatgtgctctttgtgcaaaacctattaaactaataccattgccctttcaacttagcttgtgtttaagcagaaatcatagaacataattacaaatgtaatttgatgagcatttgattctgctttcttcactttgtcctgttggcacattttcataattttgtttctaggcaatttttaagtgcattttgagatcttaaattttctataccaaagtcaatgccagtaattttaagaaaaaaagaaagtgaaatatttta

SEQ ID NO: 69434 - DNA, 800 bp, Homo sapiens
agctgtgcgtggaaatggccggctcaagcagccgagacagagcagagtgtgagagagctaatggaagtaagctgctgaagaaaccgtattcacctgcctatggcccgtgagtgttcttgaagctatctggcgttcatccacccactcccctcggacctcagcatgggctggaacctcaccctagacctaacagatgctctcatgagcactcttcaaactcagaaatttcccttacgtcatcacgagccgaagatttctaattaaattcctcccgagttcattctgcttcctgccacactgtgaaaaaggtgcctttcttctggtttgccttctaccatgactgcaagtttcctgaggcctccccagccatgcagaactaacatttggataccacttacctctgagacagttcttttggaaattataaatatatttctttccggggatcaaaagaatccacatcaacatgaaagatgaagtgttgaatctgaattcacagctgctttatgcaatctggaaaaaggtcaagctggagtgcagtggcccaatcctggctcactgcaacctctgcctcctgggctcaaggcatccttccacctcagcctcccaagtagctgggactacaggagagaagacaatgaggtcagctagaatgatggattgtcatcactggggcacgggaaaggggttgagcaagtcaatgtatgttttccagagcctacagaatgtgtctgattctctgaagtatattttttctaaatgccaggtgagtatgcaatgctaatgtgaggtagagatta

SEQ ID NO: 69435 - DNA, 449 bp, Homo sapiens
agctgtgcgtggaaatggccggctcaagcagccgagacagagcagagtgtgagagagctaatggaagtaagctgctgaagaaaccgtattcacctgcctatggcccgtgagtgttcttgaagctatctggcgttcatccacccactcccctcggacctcagcatgggctggaacctcaccctagacctaacagatgctctcatgagcactcttcaaactcagaaatttcccttacgtcatcacgagccgaagatttctaattaaagtatgtcaagatgaagtggacttaattgacatctgccttttaaagtataattcgttcttttcttgaaactcggatctctaagtagtagaatatttagtaaatataactcccatccttattctaggcgatttgggaaataaaatattagatgtgaagcttaatacaacgtttgaaaatattataa

SEQ ID NO: 69436 - DNA, 553 bp, Homo sapiens
gccaagaatcaggaatacctaaacctgagtgaggaaaggccatcagcagatctcaacagcaaggtgactcagatagtggaattatagggcaaggatttgaaaacagctatcataaaaatgcttcataaaattacagatacacatgaaacaaatgaaaaatagtctcagcaagaactggaaagtttcagcaaaaacctagaagatagaagaatcaaatgaaaattttagaactatacaatagccaataaaaaagtcactgaatgggctcatcagcagaatagagatgacaggagaaagaatcagtgaacttgaaggtagaacaatagaaattacctgacaaagagcagacttaaaagaaaaagtaatgaacaaaatgaacagagtttctgggacctgtgggactataacaaaagatgtgacattcacatcattgtagtaacaggagatgagtgtggggttgaaaaagtgtttgaagaagtaatggctgcatttttgtcatatttggcaaaagacataaacctacattttcagtgaaccccaagaggataaactc

SEQ ID NO: 69437 - DNA, 2824 bp, Homo sapiens
gggttccagatcaatagctaacgatcctggcgcagggctgaatggagttaaggaactttaacactttaattaggctgccaccgaaaataaattcctacacatctgtcaattcttacttgagcggtaatctcctcttccagctagacctgccacttcctgctcactgcagcagctgcttccattcagccaaggcttccttcttcagtgcccctcctactacatttctctggggcttcccatttcctgggtcatttaagacagggagctgagtttggtcttgtttctgctgtctactgctggacttctataaaaggacaggaactggactcttaataaaatgatctcttaggccctaccagttctaatactgtaattttccctctatcttctgtgtgggtgtttctttttgttggcttttcatactctcctacctgctgattgagccatccattttctccttcattgactggctgcttgtcctgcttcctctgtcctatgtcctcccttccctgatgccacacctctttaagctgactctccccccatcctacacagggaaggctcctgtcacccccttagctgagccacccacccctgagaaagatgcccagaacaagacagaacaattgggtgagttttccctcccttccccccagtcctcctaccttctgagacgctcacgggaccttgcagtaatccaggagcccagcaatgtctgtgctcaaggagcaaaactgattaaagaaagggctcatcagggggaagggaggctgagccacgagaggctaggcacttccgccctctttgagaactcagacctgaccatcctactgacccggagtcagcccttgccaagcctcacctatctactgagtttcctgccctttctctagtgcccaactccctaccctggaagctctctgctacaaatcatcttgagggctgtcagggttccttaatctcctcttctttcatcctcagcttcagaagagacagaaaacaagactggcccttccagagacagtgccaaccagaccacggtcagaattggggtaactgggaagagctgaagtgggggcctggctttactgagatctgctcatattctaaaggcagacgtaattttgtcatgctttgacttatttcactcagaatagcacagttaagaaattccacccagatccagttccacatgttcagcactttcgggggcagagctggcccagcagggtcaagcacagagggagatgataggagggagacagcaggaacttgagggaaagatgaataaaggaattgtgctgagagtaggaaagagtgggggtacatgctggaaggaggggaggagaaaggcaaaagcaaacaaccagctactgcccagctctttatcccttagttaggagcagaaagacaagacaccggtgttcctaccctacaaaacgccctgagcctggatggaactgtcctggcatcctcttactaagggtaggggcaccaaccaaatgattcacactgacagcatgtgccacaaatctctaaatccccaggactcagacctaggcagcacccaggaatggcagctctgtgttctgaggggattcccagcctctggtttgagatgccatcctgtgcctcacagctctccaaactggactacaatatgtaacatttattgttattgcaatacgcagtgttactgcattactgcaagctgaagtaatgccttatgtcctcagcatcttttcttcctaactcctgctcccgccaacagacctcttccagatgtctgctccaggggctaggtgcgttaagatgagcatctggatccccttcctttacagtcatcccctccctgacacacaggcctgtgccactggtgccagcctggatgcaggctgggtaggtctggcagtcaggtgatggtggggcctctggcagcctcacccctctggaagtgtggctgagaatgtgctgagagggctgggccagaattttcctgggccactgggggagctgtggtgtttattcacattaggaaaaagaagaaggaaaaagaaagatggaaaataaggtgggagctgctgagcctgagggaggatgagctggcttctgagcagacaggtagggcccctttccaggtgatggttcacagaggcagagtgggcagggacaagggagcctctgggtccagaaaatgcccagaggaaatggaaccatttcacagagaagacacgacaggataggataggtaagagaagaaaactaaatccaaggtgggggcagtaggtacagagccatctgttagctggagagttgaggcaggcagcaaagactgggaaagacacaccaagaaaaggcagagaggccaggatggtggaagagggccagacaaagaaggagtgcaaggtagcggcctaagctaggcctttgtcccaatccaagggaaagtggggaggagccagctctcaggactgtggctggaggctgggtctgctataatgccttcctatctggctagttcctcttcaattaggagtgagaggccaagcgtggtggctcacgcctgtaatcccagcactttgggaagccaagatgagtagatcacctggcatcaggagttcaagaccaacctggccaatgtggcaaaaccctgtctccactaaaaaatacaaaaattagctgggcgtggttgcacacgcctgtaatcccagctgcttgggaggctgagggcaggagaattgcttgaacctggaaggcggaggttgcagtgagccgagatcacgtcactgcactccggcctgggtgacagagccagactccatct

SEQ ID NO: 69438 - DNA, 5428 bp, Homo sapiens
ggagcgagcgagtgcccagggtgaatcaatggaaaccccctcacgaagccggggaaacacttcagccgcagccaaatagcattgattattttccttcacttccctcaccgccgtgaatttatttatttatttttttccgtctccgtccctgacgccccggagcgagcgctggagggagggaggaggaggggaaaaaagaggaatcaacacatcggagaagtcccttccaagagccgccccctcccctccccgcctcgcgctgctcggtggccgcggttcgactcccgtccctgcttccagctgaggtggtactggctgtcacgctgacatgagcccccagcactcctccgtctaccatggccacccttaactcagcctctaccactggtaccaccccctcccctgggcacaatgccccgtccctgccttcggacaccttctcctccagcaccccctctgatcctgtcaccaaagatccccctgctgcctcctccacctctgagaacatgaggtcctcagagccagggggacagctcctggagtcgggctgtggcctcgtcccaccaaaggagattggggagccccaggaagggcctgactgtggtcacttcccaccaaatgacccaggggtggaaaaggacaaggagcaggaggaggaagaagaagggctccctcccatggacctaagcaaccacttattcttcacagctggaggtgaggcctacctagtggccaagctgtccctgccaggtggcagtgaactcctgttaccaaagggcttcccctggggtgaggcgggcatcaaggaagagcccagtctgcccttccttgcctacccacccccctcacacctcactgcccttcacatccaacatggctttgacccaatccaaggctttagctcttctgaccaaattctgtcccatgatacctcagcaccatctccggctgcctgtgaggaaaggcatggagctttctggagctaccagctggctccaaatccacccggagatcccaaagatggccccatggggaacagcgggggcaaccacgtggcggtcttctggctctgccttctgtgccgcctgggtttcagcaagccccaggcctttatggatcacacacagtctcatggggtgaagctaacccctgcccaatatcagggcctgtcaggtagcccagctgtactccaggagggagatgaaggctgcaaggccctcataagctttctggagccaaaactccctgctcgcccctcttctgacataccccttgacaacagcagcacagtgaacatggaggcgaatgtggcccagacagaggatggcccccctgaggcagaagtccaggcccttatcctcctggatgaagaagttatggccctcagcccaccctctccacccacagccacctgggaccccagcccaacccaagccaaagaatcgccagtagcagcaggcgaggcagggccagattggttccctgaggggcaagaagaggatggagggctctgccccccactcaaccaaagctcacccacctccaaggaggggggcactctccctgccccagtgggctcccccgaagaccccagtgacccaccccagccctatcgcctagctgatgactacaccccagcccctgcagccttccagggcctcagcctgtccagccacatgtccctgctccactcacgcaactcctgcaagacactcaagtgtcccaagtgcaactggcactacaagtaccagcagaccctggatgtgcacatgcaagagaagcaccctgagagcaacagtcactgcagctactgcagtgctgggggcgcccacccccgccttgctcgtggagagagctacaactgtggctacaaaccctaccgctgtgacgtctgcaactactctacaaccaccaaaggcaacctcagcatccatatgcagtctgacaagcacctggccaacctacagggcttccaggcgggccctggtgggcagggaagtccaacagaggcatcactcccaccctccgcgggagacaaagagcctaagaccaaatcatcctggcagtgcaaggtgtgcagctacgagacaaacatctcccgtaacctgcgcatccatatgacctctgagaagcacatgcagaatgtcctaatgctgcaccaggggctgccgctgggcctgccacctggattgatggggccaggccctcctcccccaccaggggctacccccactagcccccctgaactcttccagtactttgggccccaggccctagggcagcctcagactcccttggctggcccggggctgaggccagacaagcccctggaagcccagctacttctcaatggtttccaccacgtaggagcacctgcccgcaagttccccacatccgcccctggaagcctatcccctgatgcccacctgcctccaagtcagctcctgggttcctcatctgacagcctgcccacctcaccacccccagacgacagcctgtccctgaaggtgttccgctgcctagtgtgccaggccttcagcacagacagcctggagctgctgctctaccactgcagcataggccggagcctcccggaagctgaatggaaggaggtggctggtgacacccaccgctgcaagctttgctgctatggcacccagctcaaggccaacttccaactccacctcaagactgacaaacatgctcagaagtaccagctggcagcccacctgcgggaggggggtggagccatgggcaccccttccccagcatccctgggagatggggctccttatgggtctgtctccccactacacctgcgctgcaacatctgtgactttgagtccaacagcaaggagaagatgcagctgcatgccaggggtgcagcccacgaagaaaacagccaaatctataaaaggacaggaactggactcttaataaaatgatctcttaggccctaccagttctaatactgtaattttccctctatcttctgtgtgggtgtttctttttgttggcttttcatactctcctacctgctgattgagccatccattttctccttcattgactggctgcttgtcctgcttcctctgtcctatgtcctcccttccctgatgccacacctctttaagctgactctccccccatcctacacagggaaggctcctgtcacccccttagctgagccacccacccctgagaaagatgcccagaacaagacagaacaattgggtgagttttccctcccttccccccagtcctcctaccttctgagacgctcacgggaccttgcagtaatccaggagcccagcaatgtctgtgctcaaggagcaaaactgattaaagaaagggctcatcagggggaagggaggctgagccacgagaggctaggcacttccgccctctttgagaactcagacctgaccatcctactgacccggagtcagcccttgccaagcctcacctatctactgagtttcctgccctttctctagtgcccaactccctaccctggaagctctctgctacaaatcatcttgagggctgtcagggttccttaatctcctcttctttcatcctcagcttcagaagagacagaaaacaagactggcccttccagagacagtgccaaccagaccacggtcagaattggggtaactgggaagagctgaagtgggggcctggctttactgagatctgctcatattctaaaggcagacgtaattttgtcatgctttgacttatttcactcagaatagcacagttaagaaattccacccagatccagttccacatgttcagcactttcgggggcagagctggcccagcagggtcaagcacagagggagatgataggagggagacagcaggaacttgagggaaagatgaataaaggaattgtgctgagagtaggaaagagtgggggtacatgctggaaggaggggaggagaaaggcaaaagcaaacaaccagctactgcccagctctttatcccttagttaggagcagaaagacaagacaccggtgttcctaccctacaaaacgccctgagcctggatggaactgtcctggcatcctcttactaagggtaggggcaccaaccaaatgattcacactgacagcatgtgccacaaatctctaaatccccaggactcagacctaggcagcacccaggaatggcagctctgtgttctgaggggattcccagcctctggtttgagatgccatcctgtgcctcacagctctccaaactggactacaatatgtaacatttattgttattgcaatacgcagtgttactgcattactgcaagctgaagtaatgccttatgtcctcagcatcttttcttcctaactcctgctcccgccaacagacctcttccagatgtctgctccaggggctaggtgcgttaagatgagcatctggatccccttcctttacagtcatcccctccctgacacacaggcctgtgccactggtgccagcctggatgcaggctgggtaggtctggcagtcaggtgatggtggggcctctggcagcctcacccctctggaagtgtggctgagaatgtgctgagagggctgggccagaattttcctgggccactgggggagctgtggtgtttattcacattaggaaaaagaagaaggaaaaagaaagatggaaaataaggtgggagctgctgagcctgagggaggatgagctggcttctgagcagacaggtagggcccctttccaggtgatggttcacagaggcagagtgggcagggacaagggagcctctgggtccagaaaatgcccagaggaaatggaaccatttcacagagaagacacgacaggataggataggtaagagaagaaaactaaatccaaggtgggggcagtaggtacagagccatctgttagctggagagttgaggcaggcagcaaagactgggaaagacacaccaagaaaaggcagagaggccaggatggtggaagagggccagacaaagaaggagtgcaaggtagcggcctaagctaggcctttgtcccaatccaagggaaagtggggaggagccagctctcaggactgtggctggaggctgggtctgctataatgccttcctatctggctagttcctcttcaattaggagtgagaggccaagcgtggtggctcacgcctgtaatcccagcactttgggaagccaagatgagtagatcacctggcatcaggagttcaagaccaacctggccaatgtggcaaaaccctgtctccactaaaaaatacaaaaattagctgggcgtggttgcacacgcctgtaatcccagctgcttgggaggctgagggcaggagaattgcttgaacctggaaggcggaggttgcagtgagccgagatcacgtcactgcactccggcctgggtgacagagccagactccatct

SEQ ID NO: 69439 - DNA, 344 bp, Homo sapiens
gtaagcatgattctctctccagtgcaatactcactccttcaagtttgggccttgttcacctctatatccctagccaagaactcgagtaataatttcaataaatacatgaatttaaagtgaatgaccattcagtcatcagcccttaatttctacattatacaaattttattgtttcacttcaccaaaatttacagtagaagctacggaaagattatatgtatgagattcgcgttgcttctttcttctgaagatctccaagttgtgcacatgaaaaacatttatgcaaaattaatcttattcatgttcttgctaatctgcaaagtcggaactatcatcagtgttgg

SEQ ID NO: 69440 - DNA, 338 bp, Homo sapiens
ggcggattccctccagtttctcccgctggcgggttgcatctaaagtcgtccgagtcaacagccgtgactctgggtgatactagctctcattaaccgtccacagatttggggtgttatgtgactgaaaggaacgaggctgcaggaaagccacaagataacgatccgtttctgtgtgtcagctgtattcttcctcgagtatcttgtttgtgtacatgcttttatttgcattaaggttggtgcaaaagtaactgcggtttttgccatttggcaaaatactttggaatgctcttccttattccctggagatgttatctttcaagggtctgttgtcgttaacc

SEQ ID NO: 69441 - DNA, 381 bp, Homo sapiens
gtgggtactgtacttgaatatcaatccagcaatgttttcagtacagctttaaaataatcaaagagatacttcactgaaggatcatagacacttaagttttttcctataatcttatgaccttaaagcagaaaacactgtaaccacctgtcttagttggctaaggctgctataacaagattaaatatcacagattgggtggcttcaacaacggacatgtatttctcacagttctggaggctgggaagtccaagatgcctgcagattcactgtccggtgaggatcctcttcctgtctggtagacagctgccttcttaactgagtgctcatatagcctttcttctgtgtgtaagtttagagagaaagaaagtgatccctgtcttt

SEQ ID NO: 69442 - DNA, 1847 bp, Homo sapiens
  misc_feature (84)..(84): n is a, c, g, or t
  misc_feature (90)..(90): n is a, c, g, or t
  misc_feature (109)..(110): n is a, c, g, or t
  misc_feature (119)..(122): n is a, c, g, or t
  misc_feature (129)..(129): n is a, c, g, or t
  misc_feature (132)..(132): n is a, c, g, or t
  misc_feature (134)..(134): n is a, c, g, or t
  misc_feature (149)..(149): n is a, c, g, or t
  misc_feature (151)..(152): n is a, c, g, or t
  misc_feature (155)..(155): n is a, c, g, or t
  misc_feature (157)..(157): n is a, c, g, or t
  misc_feature (168)..(168): n is a, c, g, or t
  misc_feature (173)..(174): n is a, c, g, or t
  misc_feature (177)..(177): n is a, c, g, or t
  misc_feature (180)..(180): n is a, c, g, or t
  misc_feature (183)..(183): n is a, c, g, or t
  misc_feature (188)..(190): n is a, c, g, or t
  misc_feature (192)..(193): n is a, c, g, or t
  misc_feature (195)..(195): n is a, c, g, or t
  misc_feature (198)..(199): n is a, c, g, or t
  misc_feature (204)..(207): n is a, c, g, or t
  misc_feature (212)..(214): n is a, c, g, or t
  misc_feature (225)..(226): n is a, c, g, or t
  misc_feature (228)..(228): n is a, c, g, or t
  misc_feature (230)..(230): n is a, c, g, or t
  misc_feature (234)..(234): n is a, c, g, or t
  misc_feature (236)..(238): n is a, c, g, or t
  misc_feature (243)..(243): n is a, c, g, or t
  misc_feature (255)..(255): n is a, c, g, or t
  misc_feature (257)..(257): n is a, c, g, or t
  misc_feature (263)..(264): n is a, c, g, or t
  misc_feature (271)..(272): n is a, c, g, or t
  misc_feature (277)..(277): n is a, c, g, or t
  misc_feature (294)..(294): n is a, c, g, or t
  misc_feature (307)..(307): n is a, c, g, or t
  misc_feature (317)..(317): n is a, c, g, or t
  misc_feature (333)..(333): n is a, c, g, or t
  misc_feature (342)..(342): n is a, c, g, or t
  misc_feature (349)..(349): n is a, c, g, or t
  misc_feature (1234)..(1234): n is a, c, g, or t
  misc_feature (1492)..(1492): n is a, c, g, or t
atgtcgctcatggtcgtcagcatggcgtgtgttgggttgttcttggtccagagggccggtccacacatgggtggtcaggacaancccttnctgtctgcctggcccagcnntgtggtgcnnnnaggacangtnantcttcggtgtcactntnntcntnggtttaacaanttcannctntanaangaagnnngnntnccnntcccnnnntccannncagaatattcnngnanagcntnnncatgngccctgtgaccncngcacanncaggganntacanatgtcggggttcacacncacactcccccantgggtggtcngcacccagcaaccccntggtgatcntggtcanaggagtccacagaaaaccttccctcctggcccacccaggtcccctggtgaaatcagaagagacagtcatcctgcaatgttggtcagatgtcaggtttcagcacttccttctgcacagagaagggaagtttaaggacactttgcacctcattggagagcaccatgatggggtctccaaggccaacttctccatcggtcccatgatgcaagaccttgcagggacctacagatgctacggttctgttactcactccccctatcagttgtcagctcccagtgaccctctggacatcgtcatcacaggtctatatgagaaaccttctctctcagcccagccgggccccacggttctggcaggagagagcgtgaccttgtcctgcagctcccggagctcctatgacatgtaccatctatccagggagggggaggcccatgaacgtaggttctctgcagggcccaaggtcaacggaacattccaggccgactttcctctgggccctgccacccacggaggaacctacagatgcttcggctctttccgtgactctccatacgagtggtcaaactcgagtgacccactgcttgtttctgtcacaggaaacccttcaaatagttggccttcacccactgaaccaagctccgaaaccggtaaccccagacacctgcatgttctgattgggacctcagtggtcatcatcctcttcatcctcctcctcttctttctccttcatcgctggtgctgcaacaaaaaaaatgctgttgtaatggaccaagagcctgcagggaacagaacagtgaacagggaggactctgatgaacaagaccctcaggaggtgacatatgcacagttgaatcactgcgttttcacacagagaaaaatcactcncccttctcagaggcccaagacacccccaacagatatcatcgtgtacacggaacttccaaatgctgagccctgatccaaagttgtctcctgcccatgagcaccacagtcaggccttgaggggatcttctagggagacaacagccctgtctcaaaactgggttgccagctccaatgtaccagcagctggaatctgaaggcgtgagtctgcatcttagggcatcgctcttcctcacaccacaaatctgaacgtgcctctcncttgcttacaaatgtctaaggtccccactgcctgctggagagaaaacacactcctttgcttagcccacaattctccatttcacttgacccctgcccacctctccaacctaactggcttacttcctagtctacttgaggctgcaatcacactgaggaactcacaattccaaacatacaagaggctccctcttaacacggcacttagacacgtgctgttccaccttccctcatgctgttccacctcccctcagactagctttcagccttctgtcagcagtaaaacttatatattttttaaaataatttcaatgtagttttccctccttcaaataaacatgtctgccctcaaaaaaaa

SEQ ID NO: 69443 - DNA, 998 bp, Homo sapiens
agctggggcgcggccgcctgtctgcacagacagcaccatgtcgctcatggtcgtcagcatggtgtgtgttgggttcttcttgctgcagggggcctggccacatgagggagtccacagaaaaccttccctcctggcccacccaggtcccctggtgaaatcagaagagacagtcatcctgcaatgttggtcagatgtcaggtttcagcacttccttctgcacagagaagggaagtttaaggacactttgcacctcattggagagcaccatgatggggtctccaaggccaacttctccatcggtcccatgatgcaagaccttgcagggacctacagatgctacggttctgttactcactccccctatcagttgtcagctcccagtgaccctctggacatcgtcatcacaggtctatatgagaaaccttctctctcagcccagccgggccccacggttctggcaggagagagcgtgaccttgtcctgcagctcccggagctcctatgacatgtaccatctatccagggagggggaggcccatgaacgtaggttctctgcagggcccaaggtcaacggaacattccaggccgactttcctctgggccctgccacccacggaggaacctacagatgcttcggctctttccgtgactctccatacgagtggtcaaactcgagtgacccactgcttgtttctgtcacaggaaacccttcaaatagttggccttcacccactgaaccaagctccgaaaccggtaaccccagacacctgcatgttctgattgggacctcagtggtcatcatcctcttcatcctcctcctcttctttctccttcatcgctggtgctgcaacaaaaaaatgctgttgtaattgaccaagaccttgggggaacgaaccgttgaccgggaggcctctgattaaccagaccctcaggaaggggactatgcccgtggattcctggttttccccaagaaattctcccttttaggccgagaaccaa

SEQ ID NO: 69444 - DNA, 1603 bp, Homo sapiens
  misc_feature (990)..(990): n is a, c, g, or t
  misc_feature (1248)..(1248): n is a, c, g, or t
agctggggcgcggccgcctgtctgcacagacagcaccatgtcgctcatggtcgtcagcatggtgtgtgttgggttcttcttgctgcagggggcctggccacatgagggagtccacagaaaaccttccctcctggcccacccaggtcccctggtgaaatcagaagagacagtcatcctgcaatgttggtcagatgtcaggtttcagcacttccttctgcacagagaagggaagtttaaggacactttgcacctcattggagagcaccatgatggggtctccaaggccaacttctccatcggtcccatgatgcaagaccttgcagggacctacagatgctacggttctgttactcactccccctatcagttgtcagctcccagtgaccctctggacatcgtcatcacaggtctatatgagaaaccttctctctcagcccagccgggccccacggttctggcaggagagagcgtgaccttgtcctgcagctcccggagctcctatgacatgtaccatctatccagggagggggaggcccatgaacgtaggttctctgcagggcccaaggtcaacggaacattccaggccgactttcctctgggccctgccacccacggaggaacctacagatgcttcggctctttccgtgactctccatacgagtggtcaaactcgagtgacccactgcttgtttctgtcacaggaaacccttcaaatagttggccttcacccactgaaccaagctccgaaaccggtaaccccagacacctgcatgttctgattgggacctcagtggtcatcatcctcttcatcctcctcctcttctttctccttcatcgctggtgctgcaacaaaaaaaatgctgttgtaatggaccaagagcctgcagggaacagaacagtgaacagggaggactctgatgaacaagaccctcaggaggtgacatatgcacagttgaatcactgcgttttcacacagagaaaaatcactcncccttctcagaggcccaagacacccccaacagatatcatcgtgtacacggaacttccaaatgctgagccctgatccaaagttgtctcctgcccatgagcaccacagtcaggccttgaggggatcttctagggagacaacagccctgtctcaaaactgggttgccagctccaatgtaccagcagctggaatctgaaggcgtgagtctgcatcttagggcatcgctcttcctcacaccacaaatctgaacgtgcctctcncttgcttacaaatgtctaaggtccccactgcctgctggagagaaaacacactcctttgcttagcccacaattctccatttcacttgacccctgcccacctctccaacctaactggcttacttcctagtctacttgaggctgcaatcacactgaggaactcacaattccaaacatacaagaggctccctcttaacacggcacttagacacgtgctgttccaccttccctcatgctgttccacctcccctcagactagctttcagccttctgtcagcagtaaaacttatatattttttaaaataatttcaatgtagttttccctccttcaaataaacatgtctgccctcaaaaaaaa

SEQ ID NO: 69445 - DNA, 1309 bp, Homo sapiens
  misc_feature (696)..(696): n is a, c, g, or t
  misc_feature (954)..(954): n is a, c, g, or t
agctggggcgcggccgcctgtctgcacagacagcaccatgtcgctcatggtcgtcagcatggtgtgtgttgggttcttcttgctgcagggggcctggccacatgagggagtccacagaaaaccttccctcctggcccacccaggtcccctggtgaaatcagaagagacagtcatcctgcaatgttggtcagatgtcaggtttcagcacttccttctgcacagagaagggaagtttaaggacactttgcacctcattggagagcaccatgatggggtctccaaggccaacttctccatcggtcccatgatgcaagaccttgcagggacctacagatgctacggttctgttactcactccccctatcagttgtcagctcccagtgaccctctggacatcgtcatcacaggaaacccttcaaatagttggccttcacccactgaaccaagctccgaaaccggtaaccccagacacctgcatgttctgattgggacctcagtggtcatcatcctcttcatcctcctcctcttctttctccttcatcgctggtgctgcaacaaaaaaaatgctgttgtaatggaccaagagcctgcagggaacagaacagtgaacagggaggactctgatgaacaagaccctcaggaggtgacatatgcacagttgaatcactgcgttttcacacagagaaaaatcactcncccttctcagaggcccaagacacccccaacagatatcatcgtgtacacggaacttccaaatgctgagccctgatccaaagttgtctcctgcccatgagcaccacagtcaggccttgaggggatcttctagggagacaacagccctgtctcaaaactgggttgccagctccaatgtaccagcagctggaatctgaaggcgtgagtctgcatcttagggcatcgctcttcctcacaccacaaatctgaacgtgcctctcncttgcttacaaatgtctaaggtccccactgcctgctggagagaaaacacactcctttgcttagcccacaattctccatttcacttgacccctgcccacctctccaacctaactggcttacttcctagtctacttgaggctgcaatcacactgaggaactcacaattccaaacatacaagaggctccctcttaacacggcacttagacacgtgctgttccaccttccctcatgctgttccacctcccctcagactagctttcagccttctgtcagcagtaaaacttatatattttttaaaataatttcaatgtagttttccctccttcaaataaacatgtctgccctcaaaaaaaa

SEQ ID NO: 69446 - DNA, 2996 bp, Homo sapiens
  misc_feature (36)..(36): n is a, c, g, or t
  misc_feature (191)..(191): n is a, c, g, or t
  misc_feature (333)..(333): n is a, c, g, or t
  misc_feature (345)..(345): n is a, c, g, or t
  misc_feature (354)..(354): n is a, c, g, or t
  misc_feature (363)..(363): n is a, c, g, or t
  misc_feature (471)..(471): n is a, c, g, or t
  misc_feature (534)..(534): n is a, c, g, or t
  misc_feature (733)..(733): n is a, c, g, or t
  misc_feature (867)..(867): n is a, c, g, or t
  misc_feature (1026)..(1026): n is a, c, g, or t
  misc_feature (1107)..(1107): n is a, c, g, or t
  misc_feature (1397)..(1397): n is a, c, g, or t
  misc_feature (1954)..(1954): n is a, c, g, or t
  misc_feature (2062)..(2062): n is a, c, g, or t
  misc_feature (2422)..(2422): n is a, c, g, or t
  misc_feature (2558)..(2558): n is a, c, g, or t
  misc_feature (2631)..(2631): n is a, c, g, or t
cacttatatatcttaattaaaataaatcaacccatntaaattgtttatttctattgtctttctcagtataatgcacaagatacctttctatctctatatgtatttgtcattttcatgtctgtccctacatgaattgactctatttttctattacatagatatgtgatgttactacaatatatgttaactanaaatggatgatgtaaccttttaaaattatgaccatcacagtgaaaattatgtctctaaaacccaatgaccacagggacattccagtttttagaaaaatatcaggggcttaggtattttcagattaaattttgaaaaatagantatctttccatngatttatgngggcaaatntcccatttgttcacattaaatcttaatggcatattgcctaaatcttcctcagaaaagcttagccaaattgcctaggatgtttcctttctcccatattaccatcactgnataccatcatatttctaataattttaattttggaacatgaaaatggtatttcaatttaaatgngtatgtttttctatttgcaaagagattaaacatctcttcaagtttttaaactatatgcagcccttcttttctgctatacctgttcatttcctcaagctatttttccatcagacagttttatgttttcttattgatttgaagcttctattaaagtattgtatacacatgggtaaatgcacataagtttaaagcttagtgngttttaaaatactatgatcatccagaataagaaaatgtaatagtcacacacctgatttccacccatccctcctaacataacactattctaacttttatcagtaaggaatcaaatagtgtgtgtagtgttttganccgcatttttttgcttaatattacatttgtgagactaattgattatatgacctgcaaatgaaactatttacatttatttctctaatattttattaggtgatcatattacaacttatttgtttactgtactctttataagtattttagtccacttttggnccacagtttggggttattttggtgttattctgaaaagtgttttcatgagtacacattttttagctatatatatgcatgccnttctggagaaaccatctttacaagtagaattttggggcctactacatatctttatccaaattatttgaactaagttatgccaataacatcaatttgagtgttctaattagtcaacattctcatcaatactttgcattttctcttcaacttagaattctaaaacattcctttcaaattcaggattctgaatgacaagtatttacatctcattgtggtttgaattattttttcagataaccaatataaataaaaaccttttaataagttcattggttatttgaatattttanttttgaagtgtctaaaatattttctttttaatccagtccagttatttttctgtggtttgcttcttgttgtcttattgagttcattgcctttttaatattcttttccagttaacatttccccctcattgatctgaaatgttttcattatataccacctttccatatctgtcagtgtcttgattttctatatgatcttcatctatctgtatttataactcattttaatcatagaagctttaagaattgcttaatattttgtattgactccaaattccattgattttataggatatttctagctattcttgcttctttattcctccaagtaaatttgtctatttttctaaatctggacaaagaaattctagaaaatatcgttttgttatgacatagaagatataagtttatttaaagaactggcacatttatgattttaaggctttttcaagagcatggaatttctttccccgtgctcaagtccaaatttgtgccattcagaagtgttttctagttttttttatatataggttttaaacatttctggttaagtttatgcnctcacattttattttagtttggttaatgacgttttacatgtgtgagttcctcaattatttcttttaaatgttctgattcaataggaacactctccttagtatccttancagaaatgattcttgtttatagaattgctaaataagtaaagaaattttgagttaaatcatggcaaggagttataattatactaagcttttttgttcctagagattttggctcactcatatggtaatctatatgaaaatttttctgtgatatctaataggagaaagatcctcaatgatagaatagtgtttcttcctagctgattcatacatctttctctgccaacattttgtttgttgaagtgttccccaacatatgactcattgcttactaaatccctattgagcagccaaagccctggtgactaattatgtcattaatttgggaaagtcagagacaataagactgtcagttgaaacttngtaggaggtaaaaaagtcactgctgtcagctgcaaagatccttaaaatggtctttaataaagtcaaattttgtgacaataattattgcatcaaagtcggggaaatacctcttagatcaaataagatacattgaaangccaaaaattatttttatctcactttgtattctcataaggtctatccactgttacttggatatgagacttaanaaatggaaaagaagacaggggtactatcacactgtattttcctatggcctaatgaccacaatggttgatgaactgcagtaaagtttctataatattttccatctattcatttgctcaatcaccttgtaatggttatgttggttaattccagtctctcatgtgtaagcaacaaaatgagacttaatttgaaatatccagtatttttctattcttacaaataattttcaggatcaatgcgttgaggattaggaatggcaatgtgtattactactttgataccaactatatccgatctaatgttggaatttgtttgacaaagtgttgtgtatttgaaaacaggcagcactgaataaaaagaatatggg

SEQ ID NO: 69447 - DNA, 1545 bp, Homo sapiens
tccttggccgggcgggggagagcgtccccgtcagctgagagcatcctcactcggtcagttcctcgggcgagttacggggacgacctgcgggagcacgcgggcagtggccggacgctgaagcccaggagagcgatggagacgtatgcggaggttgggaaggagggcaagccttcctgtgcatcggtggatctgcagggagacagctccttacaggtggagatttctgacgcagtgagtgagcgggacaaggtgaaattcactgttcaaacaaagagctgcctccctcacttcgcccagaccgagttctcagtcgtgcggcagcacgaggagttcatctggctgcatgatgcctacgtggagaatgaggagtacgccggcctcatcatccccccagcccctccgaggccagactttgaggcttcgagggaaaagctacagaaattgggcgagggggacagctctgtcactcgggaagagtttgccaagatgaagcaggagctggaagcggagtacctggccatctttaagaagacagttgcgatgcacgaagtctttctgcagcgcctggcggcccaccccaccctgcgtcgagaccacaacttctttgtgtttttggaatatggacaggatctgagtgtccgggggaagaacaggaaggagctcctcggagggtttctgaggaatattgtgaagtccgcggatgaagccctcatcacgggcatgtcagggctcaaggaggtggatgacttctttgagcatgagaggaccttcctgttggagtatcacacccgtatccgagaatgcctgcctgcgggccgaccggtcatgcgcgcccacaagtgcctggcagacgattatatccctatctcagctgcgctgagcagtctgggaacacaggaagtcaaccagctaaggacgtgaggactccccccacccctaccctctccctgtgcctgtaataccatgtcttcccatgaggggtcactctgtagatgtctactgtcagctctaggtgggaggtgtaggctctcctgttgggggatggtgttgggaaggaaaggggagagggagattcccaaggagaggctgagacagagaggctttgagctgttcctcagccccctaccctaactccctccctactgcttcctaggagcttcctcaaattggcagagctctttgaacggctgagggtgagtactgccttctgtgctcaaaggctttcctggtgagctttgcagggaagatgagtcctggcagagggaagagctccaggatcatcttgggttcagtgataacttgggcccagtggcaagttgggcttacactccagactagtttaacaaaaggtggggtgaagacaaggatccagcttcgtgtgtgtgttggggggtgcaggggcatgcacatgtatgcacgtgtgcagcagcggagggttgggaggcacaagggtgtgcccaaacctctggcaggctgcacccagctgccagcacactgcccgggcacacatgttccccactcttccctaagaaagtcactggagtg

SEQ ID NO: 69448 - DNA, 1712 bp, Homo sapiens
tccttggccgggcgggggagagcgtccccgtcagctgagagcatcctcactcggtcagttcctcgggcgagttacggggacgacctgcgggagcacgcgggcagtggccggacgctgaagcccaggagagcgatggagacgtatgcggaggttgggaaggagggcaagccttcctgtgcatcggtggatctgcagggagacagctccttacaggtggagatttctgacgcagtgagtgagcgggacaaggtgaaattcactgttcaaacaaagagctgcctccctcacttcgcccagaccgagttctcagtcgtgcggcagcacgaggagttcatctggctgcatgatgcctacgtggagaatgaggagtacgccggcctcatcatccccccagcccctccgaggccagactttgaggcttcgagggaaaagctacagaaattgggcgagggggacagctctgtcactcgggaagagtttgccaagatgaagcaggagctggaagcggagtacctggccatctttaagaagacagttgcgatgcacgaagtctttctgcagcgcctggcggcccaccccaccctgcgtcgagaccacaacttctttgtgtttttggaatatggacaggatctgagtgtccgggggaagaacaggaaggagctcctcggagggtttctgaggaatattgtgaagtccgcggatgaagccctcatcacgggcatgtcagggctcaaggaggtggatgacttctttgagcatgagaggaccttcctgttggagtatcacacccgtatccgagaatgcctgcctgcgggccgaccggtcatgcgcgcccacaagtgtacgcagggcccaaggggtcctggatccccctgcccctctccccagcggttcaactccttgggggagagaagagagcagggcgtgccttgttgtttgtctgtggccacaagcaccaaggcttgacatgcagatgtaggggctctgatgggggctgttccccaacaggcctggcagacgattatatccctatctcagctgcgctgagcagtctgggaacacaggaagtcaaccagctaaggacgtgaggactccccccacccctaccctctccctgtgcctgtaataccatgtcttcccatgaggggtcactctgtagatgtctactgtcagctctaggtgggaggtgtaggctctcctgttgggggatggtgttgggaaggaaaggggagagggagattcccaaggagaggctgagacagagaggctttgagctgttcctcagccccctaccctaactccctccctactgcttcctaggagcttcctcaaattggcagagctctttgaacggctgagggtgagtactgccttctgtgctcaaaggctttcctggtgagctttgcagggaagatgagtcctggcagagggaagagctccaggatcatcttgggttcagtgataacttgggcccagtggcaagttgggcttacactccagactagtttaacaaaaggtggggtgaagacaaggatccagcttcgtgtgtgtgttggggggtgcaggggcatgcacatgtatgcacgtgtgcagcagcggagggttgggaggcacaagggtgtgcccaaacctctggcaggctgcacccagctgccagcacactgcccgggcacacatgttccccactcttccctaagaaagtcactggagtg

SEQ ID NO: 69449 - DNA, 1831 bp, Homo sapiens
tccttggccgggcgggggagagcgtccccgtcagctgagagcatcctcactcggtcagttcctcgggcgagttacggggacgacctgcgggagcacgcgggcagtggccggacgctgaagcccaggagagcgatggagacgtatgcggaggttgggaaggagggcaagccttcctgtgcatcggtggatctgcagggagacagctccttacaggtggagatttctgacgcagtgagtgagcgggacaaggtgaaattcactgttcaaacaaagagctgcctccctcacttcgcccagaccgagttctcagtcgtgcggcagcacgaggagttcatctggctgcatgatgcctacgtggagaatgaggagtacgccggcctcatcgtgaggaggggctgggcaggggctgggagggacaggcagagcacttgggtgaggaccaaaggctgtgatggccgtctcggcagtgagaggcctcccagctccgtccctcctttgagcagatccccccagcccctccgaggccagactttgaggcttcgagggaaaagctacagaaattgggcgagggggacagctctgtcactcgggaagagtttgccaagatgaagcaggagctggaagcggagtacctggccatctttaagaagacagttgcgatgcacgaagtctttctgcagcgcctggcggcccaccccaccctgcgtcgagaccacaacttctttgtgtttttggaatatggacaggatctgagtgtccgggggaagaacaggaaggagctcctcggagggtttctgaggaatattgtgaagtccgcggatgaagccctcatcacgggcatgtcagggctcaaggaggtggatgacttctttgagcatgagaggaccttcctgttggagtatcacacccgtatccgagaatgcctgcctgcgggccgaccggtcatgcgcgcccacaagtgtacgcagggcccaaggggtcctggatccccctgcccctctccccagcggttcaactccttgggggagagaagagagcagggcgtgccttgttgtttgtctgtggccacaagcaccaaggcttgacatgcagatgtaggggctctgatgggggctgttccccaacaggcctggcagacgattatatccctatctcagctgcgctgagcagtctgggaacacaggaagtcaaccagctaaggacgtgaggactccccccacccctaccctctccctgtgcctgtaataccatgtcttcccatgaggggtcactctgtagatgtctactgtcagctctaggtgggaggtgtaggctctcctgttgggggatggtgttgggaaggaaaggggagagggagattcccaaggagaggctgagacagagaggctttgagctgttcctcagccccctaccctaactccctccctactgcttcctaggagcttcctcaaattggcagagctctttgaacggctgagggtgagtactgccttctgtgctcaaaggctttcctggtgagctttgcagggaagatgagtcctggcagagggaagagctccaggatcatcttgggttcagtgataacttgggcccagtggcaagttgggcttacactccagactagtttaacaaaaggtggggtgaagacaaggatccagcttcgtgtgtgtgttggggggtgcaggggcatgcacatgtatgcacgtgtgcagcagcggagggttgggaggcacaagggtgtgcccaaacctctggcaggctgcacccagctgccagcacactgcccgggcacacatgttccccactcttccctaagaaagtcactggagtg

SEQ ID NO: 69450 - DNA, 1990 bp, Homo sapiens
tccttggccgggcgggggagagcgtccccgtcagctgagagcatcctcactcggtcagttcctcgggcgagttacggggacgacctgcgggagcacgcgggcagtggccggacgctgaagcccaggagagcgatggagacgtatgcggaggttgggaaggagggcaagccttcctgtgcatcggtggatctgcagggagacagctccttacaggtggagatttctgacgcagtgagtgagcgggacaaggtgaaattcactgttcaaacaaagagctgcctccctcacttcgcccagaccgagttctcagtcgtgcggcagcacgaggagttcatctggctgcatgatgcctacgtggagaatgaggagtacgccggcctcatcgtgaggaggggctgggcaggggctgggagggacaggcagagcacttgggtgaggaccaaaggctgtgatggccgtctcggcagtgagaggcctcccagctccgtccctcctttgagcagatccccccagcccctccgaggccagactttgaggcttcgagggaaaagctacagaaattgggcgagggggacagctctgtcactcgggaagagtttgccaagatgaagcaggagctggaagcgtgagtgccccctcctttccctgccatccccagagtccagatgtcttccccagctatctccccatgaatgtttagcaaccctgacctctgaccccagaaagggggcaggcaggatgatgggggctgaggagggccggtgagctgctgccactctcgcagggagtacctggccatctttaagaagacagttgcgatgcacgaagtctttctgcagcgcctggcggcccaccccaccctgcgtcgagaccacaacttctttgtgtttttggaatatggacaggatctgagtgtccgggggaagaacaggaaggagctcctcggagggtttctgaggaatattgtgaagtccgcggatgaagccctcatcacgggcatgtcagggctcaaggaggtggatgacttctttgagcatgagaggaccttcctgttggagtatcacacccgtatccgagaatgcctgcctgcgggccgaccggtcatgcgcgcccacaagtgtacgcagggcccaaggggtcctggatccccctgcccctctccccagcggttcaactccttgggggagagaagagagcagggcgtgccttgttgtttgtctgtggccacaagcaccaaggcttgacatgcagatgtaggggctctgatgggggctgttccccaacaggcctggcagacgattatatccctatctcagctgcgctgagcagtctgggaacacaggaagtcaaccagctaaggacgtgaggactccccccacccctaccctctccctgtgcctgtaataccatgtcttcccatgaggggtcactctgtagatgtctactgtcagctctaggtgggaggtgtaggctctcctgttgggggatggtgttgggaaggaaaggggagagggagattcccaaggagaggctgagacagagaggctttgagctgttcctcagccccctaccctaactccctccctactgcttcctaggagcttcctcaaattggcagagctctttgaacggctgagggtgagtactgccttctgtgctcaaaggctttcctggtgagctttgcagggaagatgagtcctggcagagggaagagctccaggatcatcttgggttcagtgataacttgggcccagtggcaagttgggcttacactccagactagtttaacaaaaggtggggtgaagacaaggatccagcttcgtgtgtgtgttggggggtgcaggggcatgcacatgtatgcacgtgtgcagcagcggagggttgggaggcacaagggtgtgcccaaacctctggcaggctgcacccagctgccagcacactgcccgggcacacatgttccccactcttccctaagaaagtcactggagtg

SEQ ID NO: 69451 - DNA, 1962 bp, Homo sapiens
tccttggccgggcgggggagagcgtccccgtcagctgagagcatcctcactcggtcagttcctcgggcgagttacggggacgacctgcgggagcacgcgggcagtggccggacgctgaagcccaggagagcgatggagacccttcctgtgcatcggtggatctgcagggagacagctccttacaggtggagatttctgacgcagtgagtgagcgggacaaggtgaaattcactgttcaaacaaagagctgcctccctcacttcgcccagaccgagttctcagtcgtgcggcagcacgaggagttcatctggctgcatgatgcctacgtggagaatgaggagtacgccggcctcatcgtgaggaggggctgggcaggggctgggagggacaggcagagcacttgggtgaggaccaaaggctgtgatggccgtctcggcagtgagaggcctcccagctccgtccctcctttgagcagatccccccagcccctccgaggccagactttgaggcttcgagggaaaagctacagaaattgggcgagggggacagctctgtcactcgggaagagtttgccaagatgaagcaggagctggaagcgtgagtgccccctcctttccctgccatccccagagtccagatgtcttccccagctatctccccatgaatgtttagcaaccctgacctctgaccccagaaagggggcaggcaggatgatgggggctgaggagggccggtgagctgctgccactctcgcagggagtacctggccatctttaagaagacagttgcgatgcacgaagtctttctgcagcgcctggcggcccaccccaccctgcgtcgagaccacaacttctttgtgtttttggaatatggacaggatctgagtgtccgggggaagaacaggaaggagctcctcggagggtttctgaggaatattgtgaagtccgcggatgaagccctcatcacgggcatgtcagggctcaaggaggtggatgacttctttgagcatgagaggaccttcctgttggagtatcacacccgtatccgagaatgcctgcctgcgggccgaccggtcatgcgcgcccacaagtgtacgcagggcccaaggggtcctggatccccctgcccctctccccagcggttcaactccttgggggagagaagagagcagggcgtgccttgttgtttgtctgtggccacaagcaccaaggcttgacatgcagatgtaggggctctgatgggggctgttccccaacaggcctggcagacgattatatccctatctcagctgcgctgagcagtctgggaacacaggaagtcaaccagctaaggacgtgaggactccccccacccctaccctctccctgtgcctgtaataccatgtcttcccatgaggggtcactctgtagatgtctactgtcagctctaggtgggaggtgtaggctctcctgttgggggatggtgttgggaaggaaaggggagagggagattcccaaggagaggctgagacagagaggctttgagctgttcctcagccccctaccctaactccctccctactgcttcctaggagcttcctcaaattggcagagctctttgaacggctgagggtgagtactgccttctgtgctcaaaggctttcctggtgagctttgcagggaagatgagtcctggcagagggaagagctccaggatcatcttgggttcagtgataacttgggcccagtggcaagttgggcttacactccagactagtttaacaaaaggtggggtgaagacaaggatccagcttcgtgtgtgtgttggggggtgcaggggcatgcacatgtatgcacgtgtgcagcagcggagggttgggaggcacaagggtgtgcccaaacctctggcaggctgcacccagctgccagcacactgcccgggcacacatgttccccactcttccctaagaaagtcactggagtg

SEQ ID NO: 69452 - DNA, 575 bp, Homo sapiens
tccttggccgggcgggggagagcgtccccgtcagctgagagcatcctcactcggtcagttcctcgggcgagttacggggacgacctgcgggagcacgcgggcagtggccggacgctgaagcccaggagagcgatggagacgtatgcggaggttgggaaggagggcaaggtagagaaaggatgaagacccccaccccagcctcccctcactccatgaaagcccgtgatgcccaatcatgcggtggtctgcctctgtgtgtttctgtgtgtgtctgtgtgtgtatagtctgcatgtgtctgtttctctgtgtgtctgtgtgtatgtcgatgtgcctgcatatgtctgtgtgtgtgtgtatctgtgtatgtctgtatttgtgtctctgtgtgtctgtgtgtctgtgtgtgtctcagtgtgtgtctgtgtctttgtgtgtctctgtgtatctgtgtgtgtgtctgtgtgtctccgtgtctctgtgtgtgtgtgtatggcctgtgtgtgtctgtgtgtgtgcacgtatgcgtccatgtgggtgtttgtgcgtgcatgtctgtgtctgtctctgtgtgtgt

SEQ ID NO: 69453 - DNA, 471 bp, Homo sapiens
aattcaagagtataatagagacgcatgttacaatgaacacctttgaacataaattttactcctatctctgattagatttctagttgtgcaattattagggcacatggcttacacatcttgagacttgttccatattgccaaaatgcttttctgatacttgcagtgtatcagatgcccattttgccatacccttgctagcctccagtattatttttagtaactctgccaatttctaggtgaaaaactgtacccccttgttttagagtgctttttaataggaaagtggaacattttctcataggtttagtggacaccactaataaataagcatttaacagattgtaaatcctttccatatatatatatatatgtatatacgtatttatttaacatttattgagtgcctattgtaagaacaggaagtatccctgctgccaaaatactcacagtcaagtgagtgagactgaccaa

SEQ ID NO: 69454 - DNA, 226 bp, Homo sapiens
cgctgttctagtttccagggttaggcctgaagataccagaaacttatattttccgtcttttgtatcattcactctagccagagacatttgcaaaacaatttaagaggggattccttcaatacttttctaatatccctctcccaaaggcctgtttattcttcagctaatttttactgataatttgtattttttagaaagaacgcatctctttattttatagtcatgt

SEQ ID NO: 69455 - DNA, 635 bp, Homo sapiens
gcggtgataaaggttgcccttgatagcatttctcataacagaatttataatatcatctcgtactcttgtcctagaggacttcccaaattctcgacatcaagtatacataaccatttaggttatgcataaaagaatcacacaaataatcaaccaatcttctatacctataggaaaaccttgatgcttattcaagtgctacaaaattcaattacaaaaggacatttctattatttttggcatatgtatttttaacaagaacaagaacaacaaggattttccggttttagtacccaattagccagacaatttaattaatctaattacattccatttcttagaacagtctggttaatttttactatataataatttattatgatatccttttcaaagaatgtacaggccaggtgcagtggctcgcacctgtaatcccagctttaatttgtcatatgtgaccctgctcacagcaaaacaaaatattaaagatgactggatagcaaataatttaactaaaaattaaattttcaattcagacgtttgattcttaactaattttgatttttaattacacagtctagatcctgttttggaagattttcctatgtttgggcaagtcacattttaagccagactac

SEQ ID NO: 69456 - DNA, 649 bp, Homo sapiens
gatgttgcattatatctataaagccaagcataaaataaatctttgcttatttctaggatttttgaacaaatatgatttatttaaaaataattgaaccagtttatgggaatgtcaacagaaaactactgtattaagtccaaattggacattagtaatttgcagtatagcaacatggctcagtctttgcagatcattttgttttccagagtcagtacccaccaatgttgctaccttccttcccaggctaggtactgctgtgacaataatgcaagtcggcagtgttgcctaaagatgtgcaaaatcaagaagatgaaattcattaaatttttttcctagttatttcttccctcaactcaattgttttttgacctggcctgatgttgtttagtgctctgcatggactactgtaattcagctcacagaagaacacacttgaaagaatagtactaaggatttgaaaaaaggatgacttctgacatcatcaaagtgttctccttttcatgattctttgggcagctggacagagcagtatgtccactagaatacttgagtctggttttgtgatttcacaagtaacacttgctcttcagtgacctgagtgagggtcacccatgcccagttatgttcagggcctggctgattatatgtt

SEQ ID NO: 69457 - DNA, 445 bp, Homo sapiens
cccacttcctctcccttttccccacctttatacaatcaccaccaataatggagcaaatgtggcacatccatccaaggatgggttgacatggtttacacattgctttcatttggttgttctttggatgaattcttccttgagaacaagataatgaaaaccatacggtcattgagcacacaatctgccttcactttggctgttccctcgcagcccgtttcattttataaagcctggtccctgagtttacgccagtagaagatcccaagcaggtggaatcctgccccctatgggcttgcagaattcagcaaacactgtcagtttagctcttgcctgtcacccatacatcagagaacttatttgaatggaacatctcttgctagtctggtaaaggtttagaaacttggccttctaagtattcatgtaagttctgttctgggaccttcat

SEQ ID NO: 69458 - DNA, 476 bp, Homo sapiens
aattgcatctctcatcctggggcaacgcatctataaacacagagacagtcatctgaggctctttttacgaggctgatggagtggagggaacccttcttcttggccacctctggctgtccctggaccgagacaaggcctcaggggagctctgagggccaggctgagagagacagtcccaggagcagagcccaccagacccatcacctcggccccagcccggcccccacaaccatgtggtcttagataatttggcttccctgagccccacttcctgcctgcaaggaggagatgatcacagaaccagctcccagggtgtgaggaggaccagatgcagacggagcctgcccactccctgtccagcagagcagaagggcagagggggtgctgcctccctcctgctgggagccccatgccaaggcccacctgcccgctctttactgcacgaaacatagccaagtctgttggtgctggtgcca

SEQ ID NO: 69459 - DNA, 150 bp, Homo sapiens
caaaatcttctaattccatagttttctaaagtagcatagaaaattaatgtcctttgctagccagtagtaaatcctcatctatttctgagactgggtaatatttttaaaaatgcatttaattttaatacatgctcgctgttttgaaaaatc

SEQ ID NO: 69460 - DNA, 324 bp, Homo sapiens
tgaaaggtttctaggatttattagtttgggttgttaagagttatacggctggcaacgctgtgcagggccgtttacttcagctgcatacattttttcgctgcatgaggggttggggagagctactctcttctggtcctgaaaagtaatcaagagagagagggatttttcacatcgtgtcttaattctcacaaaggcacgcttcaaatgacggataaaaacccgtcttcccgactccaagaagctactttctgacagttgtaaacaagcttctttctcttactgcacaggagagtcctcttacagatctcagatcctgacattatt

SEQ ID NO: 69461 - DNA, 361 bp, Homo sapiens
ggaacctatatacatgaaaagttagccctctttacacttgggttcacattctgcaaatactgtgttttcaatctgcatttggttggaaaaaatctttctgtaaatagacccatgcaattcaaacccatgttgcttaagggtcagttgtacattcacactgttgtgctaccatcctcatgatctgcttccaaaaccttttcatcacctcaaatagaaactctgtaatcattaaataataattggagtctgatttttagatactaaaagtaaactgagctctatcaggacagtaacgctattttacttatctccatctatagtatcttagtagcgccttgcagttactaggcaaacaagatat

SEQ ID NO: 69462 - DNA, 330 bp, Homo sapiens
gaagtgtctgtgaagtcaaacaaatgacctgtctacactgcttatgaaagtaacacattatctagtcataatgagcccatgaaaactgtgcctgtataaacaagcgagtctgcatgtattcataagaggcacttgggcgtgggaagagcagtccattggatctggtttgcaattctagctctaccagttactagttgtgtgaccttagacagctcacagttttctcagctatcacctgtggggtctcagttccccatctttgggaagattagctgtattaaacattatatcaagggtgacaccggtgactgctacattatgaagtcattt

SEQ ID NO: 69463 - DNA, 341 bp, Homo sapiens
tcttcctaataagagtaacaaagtatccgactcgatctggaaaacttgggagggaagtatcacgtattttactgttcttctacggtttggaattttctattgcacttacacactcaatatacagctgttccaatttgtttcgaagacaaaatgatcttacatctgttactgaggaagctgagagcactccttaaaaaccctagaaatatgagaattttgctgttgctgatgcctggtgtgggtcctaatgatatctctgtataacaaagcagttacgaagcctacagattttgtgcaaaataaaatacaaacaaggtgaatttttctcctcattcaaaaat

SEQ ID NO: 69464 - DNA, 356 bp, Homo sapiens
aaataaaataccttctcaaataaacccactgcttctttataccctgaaatgcatgttgagcaacatgagacacattctaactctatagaattattgcttctttgataattcaagaaaagacaaaggcactgatcaaacttgtttggtgccatttctatataatctaataaggttgttgttgttgttgttgttgttgttgttttgaaacggagtctcgctctgtcgcccaggctggagtgcagtggtgcgatctcggctcactgcaagctccgcctcccaggttcatgccagtctcccgcctcagcctcctgagtagctgggaatacaggcgcccaccaccacgcctggctaatttt

SEQ ID NO: 69465 - DNA, 326 bp, Homo sapiens
gtaaaaactgaatatctatatgcagaagaatggaactagactctcacctcttaccctttataaaaatctaattataatggtttaaagacctaaaactcagatatggaactagaagaaaacataagggaaaaacttccagacattggtcttagaaaacattttatgaataagacttcaaaaggagtcaagaaaagcaaaaataaataaataacatcatatcaaactaaaatgcttctgcacagcaaacaaaacaacagtgaaaagacaacctacagaatggtagaaaatatttgcaaaccattcatctgacaggggatttatatgca

SEQ ID NO: 69466 - DNA, 98 bp, Homo sapiens
gagctgttccaggcattgctatgtttaatttttgcacaaagtatcaagtaggttcctattatttagatgaaaaggaaaagattaaatatatcaagtat

SEQ ID NO: 69467 - DNA, 353 bp, Homo sapiens
agaccaagtttcagacaaaaatcttttccccagtatcctaaaatataaaaagcatgtgagtctctgtcttttgtatagccacgggggttgcagggcaggggagggtgcaggaaaaaaaaatagatgcaatgagaatataaatagtttttttgggatttacgcatttcaaacagggttaagttgtatatggctaccaaagcttgacggctttgtgagttaaaaacaaaaattatggcatattcttttatttcaagtgaaaagttttcatctaaaattcggtagcagttaggaaattatggctcatttttacctcctggaagcttggaatactgttttctctggaaaatgctttg

SEQ ID NO: 69468 - DNA, 333 bp, Homo sapiens
aagacagagagcagagactaccagagggtgagtggaggtacttgggtgggtctggctagtggggaaacaccctcattataccaggtgaaatataaagttaccattttgtagacaagaaggcatagaatattggcaatttcaaatgatcccatctaatatgttctatgtagcagtcttttgcatttgcccacctttcctccctctctccctcccttcctgctttcctttttcccttccttccattttttccttgctaggaatacaaagttgataaagattcaatgcccgcccttgagaaactcacagtatgcttggaaaaaacaaaatacaaac

SEQ ID NO: 69469 - DNA, 444 bp, Homo sapiens
cagccacaaaacctaaaataattcatccaaaaatccagactggaagatgaaatgacactcttcggaaagcaactgcttttattcaagagctctgacagttgagaaacaagatcaaatcaataagatacagaagtgtagtaatcatgcatgctgtttaaacacccagaagatagctcttgattttctgtgaaaattaaggagaggtgggccagtccacctgttagtaaaaaatgttatttaagtatttctgaagatcttttatcccaagtgcctctgcttctgcctcaactctgtgccttaaatgttcccaaaacggacagccaggcgcggtggctcacgcctgtaatcccagcactttgggaggccaaagcaggcagctcacgaggtcaggagttcaagaccagtctggccaacacagtgaaaccccgtcactactaaaaatac

SEQ ID NO: 69470 - DNA, 779 bp, Homo sapiens
cgtgaaccaacccactttgcactgtttgggagacagaaacctggctaaacatggcactgcaatgggcctgaacaaaaggcagaatctttaaaaattcctcttaaatgactctggagatacctggaaatgaaagtgccaagaaaggtgttccattttatttgctaactatttatgcattagctccccaagggtcattctcagattctcctggaattcttctccctcaggacccatggttcaaggaaggaagcttaggccctgttccttcctgtcctttgctggtctttcccttttttcctttctaggagggaagcttctgtgctgctgccctgagcccttccttcaggccagcacagtacctggggacctccacgggggaatgggatccaggccaggttgcttgctgagcctcatcacccaggaggcctgagcctctggggagggcacgcatgtacactgccagacccaggggagatcttgggaacagaggatgctacgtgatttcctctggcttccaacccaatcagcctgcatcacagtgaaacacaacacaaaaggccataaaaggcatacccctgagaaatgtttaagggcaggtgctagagtcagtgccagctccctgggaggagggatagggacgggcagatcagtagccagcttgtcctcaccctccggaagggagcaccggagaagacttgcacacgtccctgcctcccttgcggccttgtcaccagagggacacatctcctgggcacaatgtgcagggctgacctgggaga

SEQ ID NO: 69471 - DNA, 831 bp, Homo sapiens
gagcttgtgtaggcgctggggattcagagccgagtcggacacagcccctgtccttaaggagcccacgcttcgactgaaaccgcggcgtccctgcctttcttcgtttgcaccttatctcctctcttctctcaaggctggtgtccttgcagaaggcggcgacgctcagcccatcttacctcagggaccctctccgaggcttccacacttctgaaagcagctgttgaacacggaaaggcctggcgtggaatcctggctagcgctcaatcactgagccgcttcacccactttacattcacctctgaaagcatgatgcaggcgtccccaacttagggtggctcgacttaggggatttttcaactttgcgatgggcttatcgggaagcaacccatcataaatcgaggagcatctgtatagttatcttgcagagggcagtgaggtttaaaatgagctttggtgcttatcttgaggttgagtccgagtttcttccttacacgattattgtgaggatatgagatatttatgccaagcacattgcacattgcctgccagataagagtttcataaatgaggctgggattacagctgtgagccactgcacggcctccatgcggtcgtaacaccatgaggtagccacgttgggcagcttgtgcgttgtcagggagacactcttcctcagcccctgggcacctctgttgaaaacttcctggctgtctggcaggctggaaatcagctctatttgttttgccctgaagatatgttttatttataactcattctgactctgtagaaaataattcaataaaaactcaattggttttccactagccctga

SEQ ID NO: 69472 - DNA, 708 bp, Homo sapiens
ctacatcattagctagttaaggttttctgacctgacttctctttgtcttcctaggtatttatttgttatcttttaatcttgtgtatctaaattaacttagttaatagttacccaccgaataactatgccaagcaactagtaaagaatgtttattttatttccccttataggggaagagtggactgggaacaaaaatgtatgggccaaaaggccttagggttgtcattcattgactttcttattcctctcatgagctataattgagtatagtatttttttagtgctgatgtcattacttctcatgtcttcccctgagttgaaagcctacgacaaacatgtataaaatacatttaagaattttcagaatatgaaccacaaaactcagtatcttatatttaaatgctacttaagttattattggaatccaagtctcactaactagggtacatttttataaaatgtttctctgtatcttgaattgaaattacttgcccagaggcaagagttctggggatataacatgatttgagatcttttttaaaaaagggtggggcggcgggggagagagcgacaagtttatactagtttatgcttttgatattagtattttaagatacatcagttgatcccgaaacctgacattagaattactctgaggagcttttaaaatagattcctggagcctacccctggaaaattgtctcgctg

SEQ ID NO: 69473 - DNA, 346 bp, Homo sapiens
cggccaagtatttttattagttaaaaaattcagaataaaaatgtataaaaggaagatatgaaataagaatttattcaggaatcaaaaagacaaaatcatctcagatgagaacgatgattaaattactagaaaccaagggagaatagatttcacttaaaattataaacgtcaatgaggagaaaacaagcatagccaataaaaatagacttttgaaacacattaaaagctcagaaacgatagaagacaaataaatttcaatatatctgtaattggagtccttgagatacaaaccaaaaaaaagtaacagaatttatatttaaaactataattcaaaagaacattccag

SEQ ID NO: 69474 - DNA, 2229 bp, Homo sapiens
ctcaaaaaaggaaaatatataatgtatgccctcggaagggtaaaaagatttttattcatatgcatgagattattcagatagatggtcatatataccagtgccttgaatgcaagcaaaacttctgtgaaaacttagctcttattatgtgtgagagaacccatactggggagaaaccttataaaagtgatatgtgtgagaaaacctttgtccaaagctcagatcttacttcacaccagaggatccacaattacgagaaaccttataaatgtagcaaatgtgagaagagcttttggcatcacttagcgctttcaggacatcagagaacacatgcaggtaaaaaattctatacatgtgacatttgtggcaagaattttggtcagagttctgatctgcttgtccaccagcgaagccatactggcgagaaaccatatctatgtagtgagtgtgacaaatgcttcagtagaagtacaaacctcataaggcatcgaagaactcacacaggtgagaaaccatttaagtgtctcgagtgtgaaaaagcttttagtgggaaatcagatcttattagccaccagagaactcacactggggaaaggccctacaaatgtaataagtgtgagaaaagttaccgacaccgttcagccttcattgtacataaaagagttcatactggggagaagccctataagtgtggtgcctgtgaaaaatgctttggccagaaatcagaccttatcgtgcaccagagagtccacacaggtgagaagccgtataaatgcctggaatgtatgagaagttttactcggagtgccaacctaattaggcaccaggcaactcacactcacacttttaaatgccttgaatatgaaaaaagctttaactgtagctcagatcttattgtacatcagagaatccacatggaagagaaaccacatcagtggtctgcgtgtgagagtggcttcctcctaggaatggactttgttgcccaacagaaaatgagaactcaaacagaggagctacactataaatacactgtatgtgataaaagcttccaccagagttcagcccttcttcaacatcagacagtacacattggtgaaaaaccgtttgtctgtaatgtgagtgaaaaaggtcttgagcttagccctccccatgcgtcagaagcctcacagatgtcttgaccaggcgagaagctgtaataccaatattaaaaattatttatgtatcagagaactcattaagatgaggacaaatctcagactttgctcagagctcagaattcagtggggaccagagagcctgcaattggaaatatgagaaattctttgcccagagagctgccctaacagaacacttcatcctcactccaacgagaaatctacagatgcccagaggttttgaaaacttaccgtctgagctcaagtttgatcactcacaagaggattcatacaagtgggaaaccttagaaatgcactgagtgtgagagagctttctactaatgctcagcccttctcgttgtaagagaattcacaccggagaacaactttttaaatgccttcagtgtcagttgtgctgcagacagtatgaacatctcattggacctcagaaaacccaccctggggagaagccccagcaagtgtgaaaaaagcttctaacaaaactctgacttacccatcagagaagccatactggtgaaaaattgtatatttgtcttaagtatggcaaaagcattcattggagagccttacttgggtttgcacccaaaaaaaaaaacccaatctgaggaaagactgcaagtgtctgaatgaagagtgcttgtcaatgatcaactcttgtggtacatcagggaactcacataggtgaaaaaacccatacttaccttgagtctgagaaaacctttggtagaagctcctgtcttatcaggccccaaaaaacctgttctgcagtgagagatttaattgtgggtgagaatctatgtacatataatatgtatgagaagactgttctcatagttagttgactcatatggtagagaggactttacatgaaatcagtatgaaaatagttttttagatacccagaagcttgttctgggagaagctagggcgggtcagagtagacctgatgggtaactcaggtaaagatgcttttcttttatctgaactacttaatgattgctttacttttactttttaaaaaattcagaaatccaataaaggaaaggacggtaacctt

SEQ ID NO: 69475 - DNA, 2269 bp, Homo sapiens
ctcaaaaaaggaaaatatataatgtatgccctcggaagggtaaaaagatttttattcatatgcatgagattattcagatagatggtcatatataccagtgccttgaatgcaagcaaaacttctgtgaaaacttagctcttattatgtgtgagagaacccatactggggagaaaccttataaaagtgatatgtgtgagaaaacctttgtccaaagctcagatcttacttcacaccagaggatccacaattacgagaaaccttataaatgtagcaaatgtgagaagagcttttggcatcacttagcgctttcaggacatcagagaacacatgcaggtaaaaaattctatacatgtgacatttgtggcaagaattttggtcagagttctgatctgcttgtccaccagcgaagccatactggcgagaaaccatatctatgtagtgagtgtgacaaatgcttcagtagaagtacaaacctcataaggcatcgaagaactcacacaggtgagaaaccatttaagtgtctcgagtgtgaaaaagcttttagtgggaaatcagatcttattagccaccagagaactcacactggggaaaggccctacaaatgtaataagtgtgagaaaagttaccgacaccgttcagccttcattgtacataaaagagttcatactggggagaagccctataagtgtggtgcctgtgaaaaatgctttggccagaaatcagaccttatcgtgcaccagagagtccacacaggtgagaagccgtataaatgcctggaatgtatgagaagttttactcggagtgccaacctaattaggcaccaggcaactcacactcacacttttaaatgccttgaatatgaaaaaagctttaactgtagctcagatcttattgtacatcagagaatccacatggaagagaaaccacatcagtggtctgcgtgtgagagtggcttcctcctaggaatggactttgttgcccaacagaaaatgagaactcaaacagaggagctacactataaatacactgtatgtgataaaagcttccaccagagttcagcccttcttcaacatcagacagtacacattggtgaaaaaccgtttgtctgtaatgtgagtgaaaaaggtcttgagcttagccctccccatgcgtcagaagcctcacagatgtcttgaccaggcgagaagctgtaataccaatattaaaaattatttatgtatcagagaactcattaagatgaggacaaatctcagactttgctcagagctcagaattcagtggggaccagagagcctgcaattggaaatatgagaaattctttgcccagagagctgccctaacagaacacttcatcctcactccaacgagaaatctacagatgcccagaggttttgaaaacttaccgtctgagctcaagtttgatcactcacaagaggattcatacaagtgggaaaccttagaaatgcactgagtgtgagagagctttctactaatgctcagcccttctcgttgtaagagaattcacaccggagaacaactttttaaatgccttcagtgtcagttgtgctgcagacagtatgaacatctcattggacctcagaaaacccaccctggggagaagccccagcaagtgtgaaaaaagcttctaacaaaactctgacttacccatcagagaagccatactggtgaaaaattgtatatttgtcttaagtatggcaaaagcattcattggagagccttacttgggtttgcacccaaaaaaaaaaacccaatctgaggaaagactgcaagtgtctgaatgaagagtgcttgtcaatgatcaactcttgtggtacatcagggaactcacataggtgaaaaaacccatacttaccttgagtctgagaaaacctttggtagaagctcctgtcttatcaggccccaaaaaacctgttctgcagtgagagatttaattgtggttctgccaaggaaagagaaaataccttttaatcccagggaaaggattgcaatcaccacattataagcataacctgaggttggagaggaccacttgggagcctgtaaccaaaactagaaggtaacttctgggatggacggaggttcccttgaagcagtgccaacctaaatctacctcaggtaagtagttagattaactttttcaagatttcagaccaaacaagacaacttgtattcagttgatgtattcctatgctttaatgtttttgtttgcccttaattattaaataaacatttgttctgaaaaactcca

SEQ ID NO: 69476 - DNA, 740 bp, Homo sapiens
agcaaatcaagacccataatgatacgtctttcatttatttcagttctgccaaggaaagagaaaataccttttaatcccagggaaaggattgcaatcaccacattataaggtatatggcgtggaatgcagaattctaaatactagaagggaaaagtagttggcagattcatcagaggcttaaggataagtacttgtttccaatttaaaagtataattaggattgtctttaatgttctctagaaatactataattaatctagagatctatcaatggtcacatctcagtttttttcttccctgagattcaaagacgtgtaataccaatacttcagattcctatagtatttgggactttgtagactagtgaatagatactttgttgctagtccaaatcctctgattttggtttgatttgtcctagcagatccctgaacttcagagagtattgccatttggattcatggagttggcgaactgctacactgctaccttgtgtatggctctaagctttgatcctaatgactggttgatgatcatgataatattagggccagtgaatatagctcatagtgataataaggattctagggtatttttttttcttttagaaaaagatcctggaagtttatttgatctgacatgtttttgtaatatttagaaatagctcttgtatcataaaaagttgcccagtataagacacacaagatgtatttttttctctggtgaaaatcatgcctatc

SEQ ID NO: 69477 - DNA, 1431 bp, Homo sapiens
tcttttatatatagttaattttttgccagttacaacgtccatagaaccccaagatttagaatgtatcatttatatttcctctaaaaggtagtaagatatttcttctgctgttttgtgaagccactcttctacagtatctgtagccttatagcaaattaattggttgtactaaaaattttagagactgcataggtctcccttttctatcctaattacctgcaatagcctagagacgctgagcatgattacattagcaacttgactgtttaaaaaatttgttatacttgataatgaccagactgtgtgctggagtcatttgtttccttcttttctgctccccgaatacactatttaatttggttacttttatttttaaactatatggcacccttttaaataaacattcattgctaattaaaatctgccaataaatggtctcagcatttaaataccatatattttataactcatactgtggctatcaaacagaagttaacacagtaggggtaaagatatacataatgtgtacctataggtgtatttataatgcctgtgtgcagtatacagacataattacaaaatactgcattttattaatgtttattttaatattgagaattggcattcttgtaaattgaactgacaattgcttctattcagtacactttattttgagcagatatttccgaaaagagaaaaaatcactgttgacatgctttttaaaactgttttcacctgtattttgtctttcaaaaagaaaagtgatctaagttggcattgtaaagaaattgttagcaaagaatatttttttttattttttcttttggtagaaagtcatgttaatagtacaacaaagaatcaaagaataaaacataatgtttaagaacattatttataagcagtcatggtctttgtgctttaaatgtttcccttttaccttagagttattttttaaaagttgaaagtactttaaaaatttgtttaaatgagtacccattgacaattatcatttaatagtgcagttaagttcaccgaaaaatttcaatatctcaaaaaaattagagaaaaatattggtaaatgtatttgattcacaaatgtattcatagccgattgtgagctgctctaccacattttcctgtttttattgtttctgtgaagcttgattagactaacttgcttaaggtctctttcccctcaaggattctgtgattctaatgtaacaaggtacacacgctctctctgaccacttaaagtatcagagttcaaatctgttacaatcactccatttccttttggaaagttgtgcctctcataaagctgcttggacattttaagtgttttgtaatatgcattgaagtgttgagttttgtttgctgtaagaggcatttcactatgttgattaaacttatcttttctcccaaaaaaaaaaa

SEQ ID NO: 69478 - DNA, 1402 bp, Homo sapiens
ccttagttacaaaaatactgcgttattgcagatctcaatactgtttaatagaatttggaaacattcctgtacgcgtgttcttgggagattattctgtacttcagttaggaatcctttaagtctgtaaacttcagtttcagcctaggtttttaagtagattaagcaaagttaatacttttcttttcttttcttttctttttgagacagagtctccctgtgtcgcccaggctggagtgcagtggcgcgatcttggctcagtgcaagctccgcctcccgggttcacgccattctcctgcctcagcctcccgagtagctgggactacaggcgcccgccaccacacctggctaattttgtttttgtatttttagtagagacagggtttcactgtgttagccaggatggtcttgatctcctgacctcgtgatctgcctgcctcagcctcccaaagtgctgggattacaggcgtgagccgccacacccagccattaatacgttttaaaaggccactatttttatcagctaaatcacttttgaaaattttgtgtgttatgtgttatactcaaaatattatcaaaacattctgttttcatttgaacctattgattagaatggtgcttatttatttggctgttgttcaagtacctgaattggcttggtcagaaggacttgggtgttctagctagctgtcgtataactaaatatttttggttaagtggtacatgtttagcattggcttgtcattttgaaatttttccatgcttcctgttaagaaatagaaccttaccaaattagtcatatttaaatataatctgtatagagttggtatggaaaacgatttgatctaaatacaaccaacaataaatatttttattgaaacttccttttaattgatgagtagtaatatggatgtcttcattagttgtaatgtcatttctattttactttcctaaatgtgaaagaaaagatgaaagaccatttcttggacatatcaaatgatttttaaggaatttctggtgattatttaaattttctagttaagctgtctaggtcagaattcatcattcaaaaatgctgctcaaacttgaagtgggtaggaatttctggggattttgattaagatgcagattctgactcattaaatctgagatgggcaagagtctgcatttctgacaagctcataggtgatgccagtgttcctgactacactttcagtagcagagttacagattatcccacattttgggggattttggagaatgatcttagtagaaaagataacaacagatgtttgcagtgatttgcctggatgtagttggtctgagatttaaaactatgataaatgttgccacaaatgtttaatagtgtttgggaccccaaggaaagattaggaacattgtctgc

SEQ ID NO: 69479 - DNA, 641 bp, Homo sapiens
cttttccagtcccacactggtcagttacagcctcctacgtcccagctgtgcgtttcctgtgaaaagaataagctcgcctaagaccatggcctgaggggactccagtgacgttcccagtgccagcagacagaactgcgcagaccccgcgggacgccatcctccatcaccatcatcgccggctgccctccacccccagcccactccacggccagaggtgcatctccggcctccagacacgcacaacaggtttcaggggtccctcaaacatctgggctgtcatccttcggagagactggaactgagacacaaggagagacctagtgatgtgggagagttaggagaagaagcagtgatttcaaacgcatgcccctcacacggaagaagggcagggggaaagccatgcaggtgtgggcgtggcacttgagcagcctctcccatgggcacccagtggttaatgcacaatgtttagcacgtcgcccagggaggccatccccttccgctacccctttcatggcaaatgctgaaacatcgttgaagactcctctcaagggtctcctcttccaggaagccttcggtcaggaataggtgccccttctggctcctcctagcctgaaagccaacatgaaatctccctgggctga

SEQ ID NO: 69480 - DNA, 501 bp, Homo sapiens
acttctccaccattcttcaaagcaaaccccttctcctggaagttctccctgattccattcagcctaactgaccactctctcctctgtacttctgacctccctctgcccaagtgatcagcagcacaagttctataagggcagaaccatgtctgtctccagagcctggcacaaggcctgacacctaaagagcacccaaagaacatctgtgccatcaatgaatgaatgaatgaatgaagcaatggttccatcttgctcttgtctgggctccagagcctggtattcagaaaatgtcatttcagcagagaactaactggatgtggctgcggcagccctgaagagcccatagaagaaaagtttgaattccccagaatcagcccattcttgcattaatttcaaaacatagttgagtgcctactgtgtgtgccaggcactggtggtggtgatacagcagtaagcaagagagacagtaaaaaatacagacaagcaaacaggcctggcagc

SEQ ID NO: 69481 - DNA, 461 bp, Homo sapiens
cttttccagtcccacactggtcagttacagcctcctacgtcccagctgtgcgtttcctgtgaaaagaataatgatcagcagcacaagttctataagggcagaaccatgtctgtctccagagcctggcacaaggcctgacacctaaagagcacccaaagaacatctgtgccatcaatgaatgaatgaatgaatgaagcaatggttccatcttgctcttgtctgggctccagagcctggtattcagaaaatgtcatttcagcagagaactaactggatgtggctgcggcagccctgaagagcccatagaagaaaagtttgaattccccagaatcagcccattcttgcattaatttcaaaacatagttgagtgcctactgtgtgtgccaggcactggtggtggtgatacagcagtaagcaagagagacagtaaaaaatacagacaagcaaacaggcctggcagc

SEQ ID NO: 69482 - DNA, 316 bp, Homo sapiens
tctgaaggaagagtgaatgggatcctttatggattggatggaaggaggtgataaaagaagagggggtgcagaggatgcctacaatgttttgtagacagtgaccctgagatctagagaagatgtagtgtgaggccacacagctagtcagtgggtgggggtggaggagaggaggatgggaccagggtggcgggaaggtcctcaggtctaggacagcatctgggagaggatagggggaaggactctggcatagctggtcacaaaccagccccagggcaactgagcattgatttgatcaatggctttttcctcttccctt

SEQ ID NO: 69483 - DNA, 206 bp, Homo sapiens
ctagccacaaaaacactcaattatgaatgaattgcaaaataaaaatttaaatatacatcctcatttaaaaaacaaaatctctgtggccttaagagaaatatttcttaaataaaaaatatttaatatactgggaaaaataacaaataaaattttattaaaattaagagcttattaaaatacagaaagagagagactgagtgagagag

SEQ ID NO: 69484 - DNA, 585 bp, Homo sapiens
caattgaagaagaaaactctacaataatagtgaaattagtggaaagtccttattttgaatattaaaggattgattaaaagattgatttgagcatcacatgattgagaggcccttgaggaaactgatgatacccttgatttttttctgtaagaattaccttctctgattctgctacaaaaagaccaacatgaagtgatgaatgttagatggtgctgtaatataattttgttagaacaattacaaatacaattaatatttggttcattctttgctgtttttgagaattagtacatggttgcagttttaacctacatattgttaacattgttaaatatttcatcaatttatttttgtagtttgtagttttgtttcaaggtgaagtatttggtttttgttgttgtttttttgacacaagagtctccctctgttgctgaggctggagtgtagtgctgcagtctctgctcactgcaacctccgcctcccgggtacaggagaactgcttgaacccgggaggtggaggttgcagtgagccgagatcgtgccattgcattccagcttgggcaatagaatgagactccatctcgg

SEQ ID NO: 69485 - DNA, 398 bp, Homo sapiens
aattacctccaaacaattacatttgtattgcactcatatcctgtaatccaaatcccattcttccaaattgcctgcaatatgaaacatgactaactccttccttgcaagaatattttttctgacacgtgtggtgacatcttttaaatagattcttacaaactgaacttgctacacagtatgtaagtactacttggaatgtgtgaagaaatcttcactgcataaacccaagagttcaccaagaacataagctcccgccctacccccacctctctcctctttgggacatattgaagttcctgggaaaagtggggcacccccagagcacctgtgtacccctgtacccacctgtcctgagtggtccaaatgccagtgaaatgctatttggtgagtgtttccta

SEQ ID NO: 69486 - DNA, 462 bp, Homo sapiens
gtttcaaacaccccagtgttggaacctgaagatagaattcctgtggtttagacacaaatgcctgctactaggatttacagatggggctctcctttaagtcttaggagacatggctcagaaatgatcatgcaatctctcaacaatttctcaggaatgaccaacagtctctcagaatacagcaaaacatctgtttcttacatgtaactccaccgaacacaggctgccttccccatacacatgtttttctggcggggattgtatgacatgtgaattcaaaggaccatttcttttgccccatgacaagcctttcagagggtgaagtgcttggatttagagtgattctccttagaggatttacccccagttgttgaaatatggcaaataccaagtgtccacgatttattataagacaataaagtgattgttccttatggagtactccctacactctggagaaaagca

SEQ ID NO: 69487 - DNA, 484 bp, Homo sapiens
tgaaaaagtacaaaattttgttgcaaaacattcagaccagcaaaagtaaacacacaggggaaaggaacaatcaccagaacttgtaatattgttgtgaggagttgtttagcagtggctgaaggctgggttcctgccagagctactgatctacactcaaacgcccttagataaataattacactcttaagctgtgtcgagtgctgatacacttgaccttgtaaatagaaatgtttgcagtaggaataaactccggcattggaaaatcttttaaacattaacacaaaagagagcgctctgtcctctagggatttgagcctgaacctcgccaagctaggcacttgcaagggggaaaaaaagtttatttatcttctattcctggtgtttgtttaaagcttttcattttaaacgcggtgattggaaggcaagtcgggagtttaaaagtcaccacaaataaactttgtctgaggggtcgacagattagcaa

SEQ ID NO: 69488 - DNA, 520 bp, Homo sapiens
caactggctcacttaaccatgaatgtgaaaggttgaaaagcttatttaaatgtgggctactgaactttcctggggctacaagaactgatactttgttcagccattacactcagtgaaactctctttttaaatgaacctcgtttcacattatacaaactggaccagactggctggaaagggcaggaggctccctgtgcaggcccacggtggaagggggccagcgtgattgcagacagggtccccctctgctggaaagcttccaattctctaactaccagcatcttccattttccctattagctttctcctgtgataatttttctacttttaccttgtaaaccaaaaataagattcacagccccctgaccatctgaacggacccctcctcttggcaagggcattccaaagctaacctgaaaaactagctcaggccatgatgggaaagaggagctggacatgcctcgttatgccctattcccttttggaattactgatagaacagactatttaagtctcataa

SEQ ID NO: 69489 - DNA, 353 bp, Homo sapiens
gcgcaccagtcagcagccaggtggcaaacatcaattttaggtagggacgttgcaagtgccccaagtcacatgtcaacatagagaataggggaggtaggagtgggggtggcagctgcagagaacaaaagaggaaacgaataagataggtccgacctaagaaaaaggaggtgtctatgggctgacctgatggagtgaaccagaaattcagacggcagcacagctagatactttagaactaccggcatcctaaaatctggctcccaagcctctgtcataaagtaggtctgtgtcctcggtatagtcacttaaccacactttgcatcactctcctcatttgtaaaatcagagaggct

SEQ ID NO: 69490 - DNA, 449 bp, Homo sapiens
ttctctgtgccatgtgagaacacagctacaacatggcgatcagcaagacaggaagacagccctcaccaggagctgaatcactggcgctttgatcttgcacttccagatcctgggcaagactcaccagggcagacttctgtagctgcctggaattgtctgatctggaattaatgccctggaatgctgtggttgttaactcagaaggcacaaagctaagaatcttcctctggtcctctttaatctgcccccactccttgttatttgtcttattttgattttcaagtaaggaatttattttcccagttaacataaccaaccagcccatgccacagtatattaaaccaagaagtacaaatccaagaaaggtaacgtctttattgggttgcaaaactttgggaaatcaatgtagtactttttattacaataaaagcatatttttattagagaca

SEQ ID NO: 69491 - DNA, 297 bp, Homo sapiens
ggggggggggtctaaattattattaatagcgtattttaatctatttaattttaagatggctataatgtaattaaagcactactttaaatatacgccgagtactaggcaatgagtaaacattataaaagtataaaagtcggccgggcgcggtggctcacgcctgtaatcccagcactttgggacgccgaggcaggcggttcacaaggtcagcagatcgagaccatcctggctaacacggtgaaaccccgtctctactaaaaatacaaaaaattagccaggcgtggtggcgggcgcctg

SEQ ID NO: 69492 - DNA, 362 bp, Homo sapiens
gaattgcaaattagctcaaaccagatcatgcagaaaatctggatatatggaatgaaaagtattgcacaaatgtgttgcataagtaatttattgtcttctggctgctaatttataggtgtaacctcacatactatcttttgatcgccattaagggactgttttgcaccaatagactgagagcaaacattttaatacaacatattcagtctaattaagctggataattactgctggagaagagctatggtagcaacagcatgtaaataaatttttgcaagtatagaagggaaacctaacatttcatattcatgtagattacctcttttcaaatacaagaagacaaatgttattctagcccgttt

SEQ ID NO: 69493 - DNA, 881 bp, Homo sapiens
  misc_feature (843)..(843): n is a, c, g, or t
gactcgactcagggaccggagcagccctcaactcactcttcagcttccctgctgtgttgcagcccagccgctccatcatgtccttcagtgctgaccagattgctgaattcaaggaggcatttctcctgtttgacagaacaggtgattccaagatcaccttaagccaggtcggtgatgtccttcgagctctgggcacaaatcccaccaatgcagaggtcaggaaagttctgggaaaccccagcaatgaagagctgaatgccaagaaaattgagtttgaacaatttctgcctatgatgcaagccatttccaacaacaaggaccaggccacctatgaagactttgttgagggtctgcgtgtctttgacaaggaaggcaatggcacagtcatgggtgctgaactccgccatgttctagccaccctgggtgaaaagatgaaagaggaagaagtggaagccctgatggcaggtcaagaagactccaatggctgcatcaactacgaagcttttgtcaagcacatcatgtctatctgaatggagctctcaagaacaagcattgtttaggaagactggctggaaacttattttaatcacacccatgacaaactctccagatctgtttaccatcattcaggaaaacaaagcaatctggacggttcaagactgagcaatccctgaattttatacatcttcagttttctctgaattgattctaccacacaacaaggtctgtgtctagatgagaagataaatttggcattctcaatccagccatttttttttccggtcccacttttacatatctacacttggcgccaaaaaaaaaaaagtggggccccgaataaangggccgaaatatcacaaaaggtcaacccggggtaccag

SEQ ID NO: 69494 - DNA, 869 bp, Homo sapiens
gactcgactcagggaccggagcagccctcaactcactcttcagcttccctgctgtgttgcagcccagccgctccatcatgtccttcagtgctgaccagattgctgaattcaaggaggcatttctcctgtttgacagaacaggtgattccaagatcaccttaagccaggtcggtgatgtccttcgagctctgggcacaaatcccaccaatgcagaggtcaggaaagttctgggaaaccccagcaatgaagagctgaatgccaagaaaattgagtttgaacaatttctgcctatgatgcaagccatttccaacaacaaggaccaggccacctatgaagactttgttgagggtctgcgtgtctttgacaaggaaggcaatggcacagtcatgggtgctgaactccgccatgttctagccaccctgggtgaaaagatgaaagaggaagaagtggaagccctgatggcaggtcaagaagactccaatggctgcatcaactacgaagcttttgtcaagcacatcatgtctatctgaatggagctctcaagaacaagcattgtttaggaagactggctggaaacttattttaatcacacccatgacaaactctccagatctgtttaccatcattcaggaaaacaaagcaatctggacggttcaagactgagcaactccctgaatttttatacatcttcagtttttctctgaattgaattcataccacacaaacaaagtgtctgctgctctagatgagaagaataaaatattgacaatctcaaatccaagcaccattctttattatctaccatgaatcaacaaacattcttaaaacaataaatcaataaacaattttggtcagtctggaaaaaaaaa

SEQ ID NO: 69495 - DNA, 773 bp, Homo sapiens
gactcgactcagggaccggagcagccctcaactcactcttcagcttccctgctgtgttgcagcccagccgctccatcatgtccttcagtgctgaccagattgctgaattcaaggaggcatttctcctgtttgacagaacaggtgattccaagatcaccttaagccaggtcggtgatgtccttcgagctctgggcacaaatcccaccaatgcagaggtcaggaaagttctgggaaaccccagcaatgaagagctgaatgccaagaaaattgagtttgaacaatttctgcctatgatgcaagccatttccaacaacaaggaccaggccacctatgaagactttgttgagggtctgcgtgtctttgacaaggaaggcaatggcacagtcatgggtgctgaactccgccatgttctagccaccctgggtgaaaagatgaaagaggaagaagtggaagccctgatggcaggtcaagaagactccaatggctgcatcaactacgaagcttttgtcaagcacatcatgtctatctgaatggagctctcaagaacaagcattgtttaggaagactggctggaaacttattttaatcacacccatgacaaactctccagatctgtttaccatcattcaggaaaacaaagcaatctggacggttcaagactgagcaactccctgaatttttatacatcttcagtttttctctgaattgaattcataccacacaaacaaagtgtctgctgctctagatgagaagaataaaatattgacaatctc

SEQ ID NO: 69496 - DNA, 880 bp, Homo sapiens
gactcgactcagggaccggagcagccctcaactcactcttcagcttccctgctgtgttgcagcccagccgctccatcatgtccttcagtgctgaccagattgctgaattcaaggaggcatttctcctgtttgacagaacaggtgattccaagatcaccttaagccaggtcggtgatgtccttcgagctctgggcacaaatcccaccaatgcagaggtcaggaaagttctgggaaaccccagcaatgaagagctgaatgccaagaaaattgagtttgaacaatttctgcctatgatgcaagccatttccaacaacaaggaccaggccacctatgaagactttgttgagggtctgcgtgtctttgacaaggaaggcaatggcacagtcatgggtgctgaactccgccatgttctagccaccctgggtgaaaagatgaaagaggaagaagtggaagccctgatggcaggtcaagaagactccaatggctgcatcaactacgaagcttttgtcaagcacatcatgtctatctgaatggagctctcaagaacaagcattgtttaggaagactggctggaaacttattttaatcacacccatgacaaactctccagatctgtttaccatcattcaggaaaacaaagcaatctggacggttcaagactgagcaactccctgaattttatacatcttcagtttctctgattgattctaccacacaacaaggtctgtggcctgatgagagaataatattgcttcgaaaaaaaaaaaaaaaaaaatgtgggggcgcggccgaaaatttaacacgtggggggccggtggaaaggagtcagaacgggggaggggttccaaacggggggggaaaagggtggtgtacgggccgg

SEQ ID NO: 69497 - DNA, 967 bp, Homo sapiens
tcaaagccagtgtccttgaagatggacccttttaaaaaaaaaaatggcaccaaagaaagacgtgaagaaacctgtggctgcggctgcggctgccccagccccggcaccggcacctgcacctgcccctgccccagccaaacccaaagaagaaaaaattgacctctctgccattaagatcgagttctctaaggaacagcaggatgaattcaaggaggcatttctcctgtttgacagaacaggtgattccaagatcaccttaagccaggtcggtgatgtccttcgagctctgggcacaaatcccaccaatgcagaggtcaggaaagttctgggaaaccccagcaatgaagagctgaatgccaagaaaattgagtttgaacaatttctgcctatgatgcaagccatttccaacaacaaggaccaggccacctatgaagactttgttgagggtctgcgtgtctttgacaaggaaggcaatggcacagtcatgggtgctgaactccgccatgttctagccaccctgggtgaaaagatgaaagaggaagaagtggaagccctgatggcaggtcaagaagactccaatggctgcatcaactacgaagcttttgtcaagcacatcatgtctatctgaatggagctctcaagaacaagcattgtttaggaagactggctggaaacttattttaatcacacccatgacaaactctccagatctgtttaccatcattcaggaaaacaaagcaatctggacggttcaagactgagcaactccctgaatttttatacatcttcagtttttctctgaattgaattcataccacacaaacaaagtgtctgctgctctagatgagaagaataaaatattgacaatctcaaatccaagcaccattctttattatctaccatgaatcaacaaacattcttaaaacaataaatcaataaacaattttggtcagtctggaaaaaaaaa

SEQ ID NO: 69498 - DNA, 398 bp, Homo sapiens
tggggccgtccctgttatacttaggatccccttttgtcaagcacatcatgtctatctgaatggagctctcaagaacaagcattgtttaggaagactggctggaaacttattttaatcacacccatgacaaactctccagatctgtttaccatcattcaggaaaacaaagcaatctggacggttcaagactgagcaactccctgaatttttatacatcttcagtttttctctgaattgaattcataccacacaaacaaagtgtctgctgctctagatgagaagaataaaatattgacaatctcaaatccaagcaccattctttattatctaccatgaatcaacaaacattcttaaaacaataaatcaataaacaattttggtcagtctggaaaaaaaaa

SEQ ID NO: 69499 - DNA, 395 bp, Homo sapiens
ggggatcgattggtaacttaggatccccttttgtcaagcacatcatgtctatctgaatggagctctcaagaacaagcattgtttaggaagactggctggaaacttattttaatcacacccatgacaaactctccagatctgtttaccatcattcaggaaaacaaagcaatctggacggttcaagactgagcaactccctgaatttttatacatcttcagtttttctctgaattgaattcataccacacaaacaaagtgtctgctgctctagatgagaagaataaaatattgacaatctcaaatccaagcaccattctttattatctaccatgaatcaacaaacattcttaaaacaataaatcaataaacaattttggtcagtctggaaaaaaaaa

SEQ ID NO: 69500 - DNA, 801 bp, Homo sapiens
gactcgactcagggaccggagcagccctcaactcactcttcagcttccctgctgtgttgcagcccagccgctccatcatgtccttcagtgctgaccagattgctgatcgagttctctaaggaacagcaggatgaattcaaggaggcatttctcctgtttgacagaacaggtgattccaagatcaccttaagccaggtcggtgatgtccttcgagctctgggcacaaatcccaccaatgcagaggtcaggaaagttctgggaaaccccagcaatgaagagctgaatgccaagaaaattgagtttgaacaatttctgcctatgatgcaagccatttccaacaacaaggaccaggccacctatgaagactttgttgagggtctgcgtgtctttgacaaggaaggcaatggcacagtcatgggtgctgaactccgccatgttctagccaccctgggtgaaaagatgaaagaggaagaagtggaagccctgatggcaggtcaagaagactccaatggctgcatcaactacgaagcttttgtcaagcacatcatgtctatctgaatggagctctcaagaacaagcattgtttaggaagactggctggaaacttattttaatcacacccatgacaaactctccagatctgtttaccatcattcaggaaaacaaagcaatctggacggttcaagactgagcaacaccctgaatttttatacatcttcagtttttctctgaattgaattcataccacacaaacaaagtgtctgctgctctagatgagaagaataaaatattgacaatctc

SEQ ID NO: 69501 - DNA, 675 bp, Homo sapiens
gactcgactcagggaccggagcagccctcaactcactcttcagcttccctgctgtgttgcagcccagccgctccatcatggtgggtcctatgagacaataatttagctgaatgccaagaaaattgagtttgaacaatttctgcctatgatgcaagccatttccaacaacaaggaccaggccacctatgaagactttgttgagggtctgcgtgtctttgacaaggaaggcaatggcacagtcatgggtgctgaactccgccatgttctagccaccctgggtgaaaagatgaaagaggaagaagtggaagccctgatggcaggtcaagaagactccaatggctgcatcaactacgaagcttttgtcaagcacatcatgtctatctgaatggagctctcaagaacaagcattgtttaggaagactggctggaaacttattttaatcacacccatgacaaactctccagatctgtttaccatcattcaggaaaacaaagcaatctggacggttcaagactgagcaatccctgaattttatacatcttcagttttctctgaattgattctaccacacaacaaggtctgtgtctagatgagaagataaatttggcattctcaatccagccatttttatattacatgatcaaaaatttaaacataattataacattggtcgc

SEQ ID NO: 69502 - DNA, 762 bp, Homo sapiens
gactcgactcagggaccggagcagccctcaactcactcttcagcttccctgctgtgttgcagcccagccgctccatcatgtccttcagtgctgaccagattgctgaattcaaggaggcatttctcctgtttgacagaacaggtgattccaagatcaccttaagccaggtcggtgatgtccttcgagctctgggcacaaatcccaccaatgcagaggtcaggaaagttctgggaaaccccagcaatgaagagctgaatgccaagaaaattgagtttgaacaatttctgcctatgatgcaagccatttccaacaacaaggaccaggccacctatgaagactttgttgagggtctgcgtgtctttgacaaggaaggcaatggcacagtcatgggtgctgaactccgccatgttctagccaccctgggtgaaaagatgaaagaggaagctgatcctgatggtttcgagttcttagagactctcaaggctgtggcccagatagcactgaaaacccagatcttagcatcatctggattgaccctgatgacttccccctgcgtggtcccatactgggagaagacgtgtgacatcgacttgtctggcccacaaataggagtcgtcatgtgactggtgcggatgcgtctggtggccactggccgtgggaggactgcttctgctgggagctgaggctggctgaggtgtctggaggcggtcaccgaggcgggcgggtttgtgctgtgtgggcctttcgccgggttggcgccgg

SEQ ID NO: 69503 - DNA, 562 bp, Homo sapiens
ggggatcgattggtaacttaggatccccttttgtcaagcacatcatgtctatctgaatggagctctcaagaacaagcattgtttaggaagactggctggaaacttattttaatcacacccatgacaaactctccagatctgtttaccatcattcaggaaaacaaagcaatctggacggttcaagactgagcaactccctgaatttttatacatcttcagtttttctctgaattgaattcataccacacaaacaaagtgtctgctgctctagatgagaagaataaaatattgacaatctcaaatccaagcaccattctttattatctaccatgaatcaacaaacattcttaaaacaataaatcaataaacaattttggtcagtctggaaaaaaaaactgcataattggcccccctcggcctaatcgctcgcactccggcggccgctcccctcacaagaggcttcaccctgaacaccgcttactgcacctccccaattcgtcaatctgcttccttaacccccctaagcccactaacaggccgcaatcatgttctccccccaccc

SEQ ID NO: 69504 - DNA, 299 bp, Homo sapiens
ggggatcgattggtaacttaggatccccttttgtcaagcacatcatgtctatctgaatggagctctcaagaacaagcattgtttaggaagactggctggaaacttattttaatcacacccatgacaaactctccagatctgtttaccatcattcaggaaaacaaagcaatctggacggttcaagactgagcaactccctgaatttttatacatcttcagtttttctctgaattgaattcataccacacaaacaaagtgtctgctgctctagatgagaagaataaaatattgacaatctc

SEQ ID NO: 69505 - DNA, 559 bp, Homo sapiens
gactcgactcagggaccggagcagccctcaactcactcttcagcttccctgctgtgttgcagcccagccgctccatcatgtccttcagtgctgaccagattgctgaattcaaggaggcatttctcctgtttgacagaacaggtgattccaagatcaccttaagccaggtcggtgatgtccttcgagctctgggcacaaatcccaccaatgcagaggtcaggaaagttctgggaaaccccagcaatgaagaggtcaagaagactccaatggctgcatcaactacgaagcttttgtcaagcacatcatgtctatctgaatggagctctcaagaacaagcattgtttaggaagactggctggaaacttattttaatcacacccatgacaaactctccagatctgtttaccatcattcaggaaaacaaagcaatctggacggttcaagactgagcaactccctgaatttttatacatcttcagtttttctctgaattgaattcataccacacaaacaaagtgtctgctgctctagatgagaagaataaaatattgacaatctc

SEQ ID NO: 69506 - DNA, 394 bp, Homo sapiens
gtcttttagttactcttcgcatcctccttttgtcaagcacatcatgtctatctgaatggagctctcaagaacaagcattgtttaggaagactggctggaaacttattttaatcacacccatgacaaactctccagatctgtttaccatcattcaggaaaacaaagcaatctggacggttcaagactgagcaactccctgaatttttatacatcttcagtttttctctgaattgaattcataccacacaaacaaagtgtctgctgctctagatgagaagaataaaatattgacaatctcaaatccaagcaccattctttattatctaccatgaatcaacaaacattcttaaaacaataaatcaataaacaattttggtcagtctggaaaaaaaaa

SEQ ID NO: 69507 - DNA, 434 bp, Homo sapiens
  misc_feature (1)..(1): n is a, c, g, or t
  misc_feature (11)..(13): n is a, c, g, or t
  misc_feature (41)..(41): n is a, c, g, or t
  misc_feature (51)..(51): n is a, c, g, or t
ncgaagagtcnnncccacacgggaaaacgggcgccgcagcnacctacaggnagcaaagggacccatttctttgtcaagcacatcatgtctatctgaatggagctctcagaacaagcattgtttaggaagactggctggaaacttattttaatcacacccatgacaaactctccagatctgtttaccatcattcaggaaaacaaagcaatctggacggttcaagactgagcaactccctgaatttttatacatcttcagtttttctctgaattgaattcataccacacaaacaaagtgtctgctgctctagatgagaagaataaaatattgacaatctcaaatccaagcaccattctttattatctaccatgaatcaacaaacattcttaaaacaataaatcaataaacaattttggtcagtctggaaaaaaaaa

SEQ ID NO: 69508 - DNA, 393 bp, Homo sapiens
  misc_feature (1)..(1): n is a, c, g, or t
  misc_feature (15)..(16): n is a, c, g, or t
ntcgttaggtcttcnncggcaccttggctttgtcaagcacatcatgtctatctgaatggagctctcagaacaagcattgtttaggaagactggctggaaacttattttaatcacacccatgacaaactctccagatctgtttaccatcattcaggaaaacaaagcaatctggacggttcaagactgagcaactccctgaatttttatacatcttcagtttttctccgctccgttttcataccacacaaacaaagtgtctgctgctctagatgagaagaataaaatattgacaatctcaaatccaagcaccattctttattatctaccatgaatcaacaaacattcttaaaacaataaatcaataaacaattttggtcagtctggaaaaaaaaa

SEQ ID NO: 69509 - DNA, 1033 bp, Homo sapiens
gactcgactcagggaccggagcagccctcaactcactcttcagcttccctgctgtgttgcagcccagccgctccatcatgctttttatgttcctagattcaaaagtatcctaaggcaaccttctaatgccaagacacctacatagcttcctaaaaatctcagagcaaccagcactcattcttctgtcaatgcatttgaaagagtactagttttttttctttctttctcttcttcgccactgcagtccttcagtgctgaccagattgctgaattcaaggaggcatttctcctgtttgacagaacaggtgattccaagatcaccttaagccaggtcggtgatgtccttcgagctctgggcacaaatcccaccaatgcagaggtcaggaaagttctgggaaaccccagcaatgaagagctgaatgccaagaaaattgagtttgaacaatttctgcctatgatgcaagccatttccaacaacaaggaccaggccacctatgaagactttgttgagggtctgcgtgtctttgacaaggaaggcaatggcacagtcatgggtgctgaactccgccatgttctagccaccctgggtgaaaagatgaaagaggaagaagtggaagccctgatggcaggtcaagaagactccaatggctgcatcaactacgaagcttttgtcaagcacatcatgtctatctgaatggagctctcaagaacaagcattgtttaggaagactggctggaaacttattttaatcacacccatgacaaactctccagatctgtttaccatcattcaggaaaacaaagcaatctggacggttcaagactgagcaactccctgaatttttatacatcttcagtttttctctgaattgaattcataccacacaaacaaagtgtctgctgctctagatgagaagaataaaatattgacaatctcaaatccaagcaccattctttattatctaccatgaatcaacaaacattcttaaaacaataaatcaataaacaattttggtcagtctggaaaaaaaaa

SEQ ID NO: 69510 - DNA, 1616 bp, Homo sapiens
gactcgactcagggaccggagcagccctcaactcactcttcagcttccctgctgtgttgcagcccagccgctccatcatggtgggtcctatgagacaataatttgtcatttataggagaaaatagatagaggatatgatcttatgagaagaaagataggcaaaaatggaactgaggagagaacatattcaatatgagtctttagtatctacttttgggttttgtgagatccattaaagataggagaaaataattagagctgtttatcagctggaaaaatacatcttccaagagctgtgctttatgcttcaccaactcttgctgtatcacataagattcattatatctaaatttagaagaaaaaaacctgtagctacagcaaaatattatacattaaaatacaatccagtgatgctgatagctaaaactaagtaaactgcttttgatgcattgggtttggtgtactatttttttaagcactggttaaatagaagacagacttaaggtagtctttttaatgtgtatatctgtactttaacaccgtgtatcttattagacatatcttaaatatactatagattatttttctaggaagtattaaatgtagcatttagttaaatcattaagatgcagaaagatattccctaattatcttttgcaatagctttttatgttcctagattcaaaagtatcctaaggcaaccttctaatgccaagacacctacatagcttcctaaaaatctcagagcaaccagcactcattcttctgtcaatgcatttgaaagagtactagttttttttctttctttctcttcttcgccactgcagtccttcagtgctgaccagattgctgaattcaaggaggcatttctcctgtttgacagaacaggtgattccaagatcaccttaagccaggtcggtgatgtccttcgagctctgggcacaaatcccaccaatgcagaggtcaggaaagttctgggaaaccccagcaatgaagagctgaatgccaagaaaattgagtttgaacaatttctgcctatgatgcaagccatttccaacaacaaggaccaggccacctatgaagactttgttgagggtctgcgtgtctttgacaaggaaggcaatggcacagtcatgggtgctgaactccgccatgttctagccaccctgggtgaaaagatgaaagaggaagaagtggaagccctgatggcaggtcaagaagactccaatggctgcatcaactacgaagcttttgtcaagcacatcatgtctatctgaatggagctctcaagaacaagcattgtttaggaagactggctggaaacttattttaatcacacccatgacaaactctccagatctgtttaccatcattcaggaaaacaaagcaatctggacggttcaagactgagcaactccctgaatttttatacatcttcagtttttctctgaattgaattcataccacacaaacaaagtgtctgctgctctagatgagaagaataaaatattgacaatctcaaatccaagcaccattctttattatctaccatgaatcaacaaacattcttaaaacaataaatcaataaacaattttggtcagtctggaaaaaaaaa

SEQ ID NO: 69511 - DNA, 607 bp, Homo sapiens
gtgtctagacggatccctggcaggtgctatgatgcaagccatttccaacaacaaggaccaggccacctatgaagactttgttgagggtctgcgtgtctttgacaaggaaggcaatggcacagtcatgggtgctgaactccgccatgttctagccaccctgggtgaaaagatgaaagaggaagaagtggaagccctgatggcaggtcaagaagactccaatggctgcatcaactacgaagcttttgtcaagcacatcatgtctatctgaatggagctctcaagaacaagcattgtttaggaagactggctggaaacttattttaatcacacccatgacaaactctccagatctgtttaccatcattcaggaaaacaaagcaatctggacggttcaagactgagcaactccctgaatttttatacatcttcagtttttctctgaattgaattcataccacacaaacaaagtgtctgctgctctagatgagaagaataaaatattgacaatctcaaatccaagcaccattctttattatctaccatgaatcaacaaacattcttaaaacaataaatcaataaacaattttggtcagtctggaaaaaaaaa

SEQ ID NO: 69512 - DNA, 958 bp, Homo sapiens
gactctgggtccatcttcaagacactgggctgtggatcaacccaaccaccactcctcttccaagaatcattttgacaggttcttttggaggaactccttctctttttaacccacccttttaaaaaaaaaaatggcaccaaagaaagacgtgaagaaacctgtggctgcggctgcggctgccccagccccggcaccggcacctgcacctgcccctgccccagccaaacccaaagaagaaaaaattgacctctctgccattaagatcgagttctctaaggaacagcaggatgaattcaaggaggcatttctcctgtttgacagaacaggtgattccaagatcaccttaagccaggtcggtgatgtccttcgagctctgggcacaaatcccaccaatgcagaggtcaggaaagttctgggaaaccccagcaatgaagagctgaatgccaagaaaattgagtttgaacaatttctgcctatgatgcaagccatttccaacaacaaggaccaggccacctatgaagactttgttgagggtctgcgtgtctttgacaaggaaggcaatggcacagtcatgggtgctgaactccgccatgttctagccaccctgggtgaaaagatgaaagaggaagaagtggaagccctgatggcaggtcaagaagactccaatggctgcatcaactacgaagcttttgtcaagcacatcatgtctatctgaatggagctctcaagaacaagcattgtttaggaagactggctggaaacttattttaatcacacccatgacaaactctccagatctgtttaccatcattcaggaaaacaaagcaatctggacggttcaagactgagcaactccctgaatttttatacatcttcagtttttctctgaattgaattcataccacacaaacaaagtgtctgctgctctagatgagaagaataaaatattgacaatctc

SEQ ID NO: 69513 - DNA, 891 bp, Homo sapiens
gactcgactcagggaccggagcagccctcaactcactcttcagcttccctgctgtgttgcagcccagccgctccatcatgtccttcagtgctgaccagattgctgaattcaaggaggcatttctcctgtttgacagaacaggtgattccaagatcaccttaagccaggtcggtgatgtccttcgagctctgggcacaaatcccaccaatgcagaggtcaggaaagttctgggaaaccccagcaatgaagagctgaatgccaagaaaattgagtttgaacaatttctgcctatgatgcaagccatttccaacaacaaggaccaggccacctatgaagactttgttgagggtctgcgtgtctttgacaaggaaggcaatggcacagtcatgggtgctgaactccgccatgttctagccaccctgggtgaaaagatgaaagaggaagaagtggaagccctgatggcaggtcaagaagactccaatggctgcatcaactacgaagcttttgtcaagcacatcatgtctatctgaatggagctctcaagaacaagcattgtttaggaagactggctggaaacttattttaatcacacccatgacaaactctccagatctgtttaccatcattcaggaaaacaaagcaatctggacggttcaagactgagcaactccctgaatttttatacatcttcagtttttctctgaattgaattcataccacacaaacaaagtgtctgctgctctagatgagaagaataaaatattgacaatctcaaatccaagcaccattctttattatctaccatgaatcaacaaacattcttaaaacaataaatcaataaacaattttggtcagtctggaaaaaaaaatgcacaccgggatcctctagac

SEQ ID NO: 69514 - DNA, 805 bp, Homo sapiens
gactcgactcagggaccggagcagccctcaactcactcttcagcttccctgctgtgttgcagcccagccgctccatcatgtccttcagtgctgaccagattgctgaattcaaggaggcatttctcctgtttgacagaacaggtgattccaagatcaccttaagccaggtcggtgatgtccttcgagctctgggcacaaatcccaccaatgcagaggtcaggaaagttctgggaaaccccagcaatgaagagctgaatgccaagaaaattgagtttgaacaatttctgcctatgatgcaagccatttccaacaacaaggaccaggccacctatgaagactttgttgagggtctgcgtgtctttgacaaggaaggcaatggcacagtcatgggtgctgaactccgccatgttctagccaccctgggtgaaaagatgaaagaggaagaagtggaagccctgatggcaggtcaagaagactccaatggctgcatcaactacgaagcttttgtcaagcacatcatgtctatctgaatggagctctcaagaacaagcattgtttaggaagactggctggaaacttattttaatcacacccatgacaaactctccagatctgtttaccatcattcaggaaaacaaagcaatctggacggttcaagactgagcaacaccctgaatttttatacatcttcagtttttctctgaattgaattcataccacacaaacaaagtgtctgctgctctagatgagaagaataaaatattgacaatctcgacacaagtgaagagggggatcctctagggcg

SEQ ID NO: 69515 - DNA, 399 bp, Homo sapiens
gtgtaggttgaatgtcgcatcaaggagcagacttttgtcaagcacatcatgtctatctgaatggagctctcaagaacaagcattgtttaggaagactggctggaaacttattttaatcacacccatgacaaactctccagatctgtttaccatcattcaggaaaacaaagcaatctggacggttcaagactgagcaactccctgaatttttatacatcttcagtttttctctgaattgaattcataccacacaaacaaagtgtctgctgctctagatgagaagaataaaatattgacaatctcaaatccaagcaccattctttattatctaccatgaatcaacaaacattcttaaaacaataaatcaataaacaattttggtcagtctggaaaaaaaaa

SEQ ID NO: 69516 - DNA, 1059 bp, Homo sapiens
gactcgactcagggaccggagcagccctcaactcactcttcagcttccctgctgtgttgcagcccagccgctccatcatgctttttatgttcctagattcaaaagtatcctaaggcaaccttctaatgccaagacacctacatagcttcctaaaaatctcagagcaaccagcactcattcttctgtcaatgcatttgaaagagtactagttttttttctttctttctcttcttcgccactgcagtccttcagtgctgaccagattgctgatcgagttctctaaggaacagcaggatgaattcaaggaggcatttctcctgtttgacagaacaggtgattccaagatcaccttaagccaggtcggtgatgtccttcgagctctgggcacaaatcccaccaatgcagaggtcaggaaagttctgggaaaccccagcaatgaagagctgaatgccaagaaaattgagtttgaacaatttctgcctatgatgcaagccatttccaacaacaaggaccaggccacctatgaagactttgttgagggtctgcgtgtctttgacaaggaaggcaatggcacagtcatgggtgctgaactccgccatgttctagccaccctgggtgaaaagatgaaagaggaagaagtggaagccctgatggcaggtcaagaagactccaatggctgcatcaactacgaagctttgtcaagcacatcatgtctatctgaatggagctctcagaacaagcattgtttaggaagactggctggaaacttattttaatcacacccatgacaaactctccagatctgtttaccatcattcaggaaaacaaagcaatctggacggttcaagactgagcaactccctgaatttttatacatcttcagtttttctctgaattgaattcataccacacaaacaaagtgtctgctgctctagatgagaagaataaaatattgacaatctcaaatccaagcaccattctttattatctaccatgaatcaacaaacattcttaaaacaataaatcaataaacaattttggtcagtctggaaaaaaaaa

SEQ ID NO: 69517 - DNA, 554 bp, Homo sapiens
gactcgactcagggaccggagcagccctcaactcactcttcagcttccctgctgtgttgcagcccagccgctccatcatgtccttcagtgctgaccagattgctgaattcaaggaggcatttctcctgtttgacagaacaggtgattccaagatcaccttaagccaggtcggtgatgtccttcgagctctgggcacaaatcccaccaatgcagaggtcaggaaagttctgggaaaccccagcaatgaagagctgaatgccaagaaaattgagtttgaacaatttctgcctatgatgcaagccatttccaacaacaaggaccaggccacctatgaagactttgttgagggtctgcgtgtctttgacaaggaaggcaatgacaaactctccagatctgtttaccatcattcaggaaaacaaagcaatctggacggttcaagactgagcaactccctgaatttttatacatcttcagtttttctctgaattgaattcataccacacaaacaaagtgtctgctgctctagatgagaagaataaaatattgacaatctc

SEQ ID NO: 69518 - DNA, 1402 bp, Homo sapiens
gactcgactcagggaccggagcagccctcaactcactcttcagcttccctgctgtgttgcagcccagccgctccatcatggtgggtcctatgagacaataatttgtcatttataggagaaaatagatagaggatatgatcttatgagaagaaagataggcaaaaatggaactgaggagagaacatattcaatatgagtctttagtatctacttttgggttttgtgagatccattaaagataggagaaaataattagagctgtttatcagctggaaaaatacatcttccaagagctgtgctttatgcttcaccaactcttgctgtatcacataagattcattatatctaaatttagaagaaaaaaacctgtagctacagcaaaatattatacattaaaatacaatccagtgatgctgatagctaaaactaagtaaactgcttttgatgcattgggtttggtgtactatttttttaagcactggttaaatagaagacagacttaaggtagtctttttaatgtgtatatctgtactttaacaccgtgtatcttattagacatatcttaaatatactatagattatttttctaggaagtattaaatgtagcatttagttaaatcattaagatgcagaaagatattccctaattatcttttgcaatagctttttatgttcctagattcaaaagtatcctaaggcaaccttctaatgccaagacacctacatagcttcctaaaaatctcagagcaaccagcactcattcttctgtcaatgcatttgaaagagtactagttttttttctttctttctcttcttcgccactgcagtccttcagtgctgaccagattgctgaattcaaggaggcatttctcctgtttgacagaacaggtgattccaagatcaccttaagccaggtcggtgatgtccttcgagctctgggcacaaatcccaccaatgcagaggtcaggaaagttctgggaaaccccagcaatgaagaggtcaagaagactccaatggctgcatcaactacgaagcttttgtcaagcacatcatgtctatctgaatggagctctcaagaacaagcattgtttaggaagactggctggaaacttattttaatcacacccatgacaaactctccagatctgtttaccatcattcaggaaaacaaagcaatctggacggttcaagactgagcaactccctgaatttttatacatcttcagtttttctctgaattgaattcataccacacaaacaaagtgtctgctgctctagatgagaagaataaaatattgacaatctcaaatccaagcaccattctttattatctaccatgaatcaacaaacattcttaaaacaataaatcaataaacaattttggtcagtctggaaaaaaaaa

SEQ ID NO: 69519 - DNA, 636 bp, Homo sapiens
  misc_feature (1)..(1): n is a, c, g, or t
  misc_feature (11)..(13): n is a, c, g, or t
  misc_feature (46)..(46): n is a, c, g, or t
  misc_feature (51)..(51): n is a, c, g, or t
  misc_feature (53)..(53): n is a, c, g, or t
naagtagagannnaaccccgagaccagagcccggggccttaacggnaaccngnggtccccttttgtcaagcacatcatgtctatctgaatggagctctcaagaacaagcattgtttaggaagactggctggaaacttattttaatcacacccatgacaaactctccagatctgtttaccatcattcaggaaaacaaagcaatctggacggttcaagactgagcaactccctgaatttttatacatcttcagtttttctctgaattgaattcataccacacaaacaaagtgtctgctgctctagatgagaagaataaaatattgacaatctcaaatccaagcaccattctttattatctaccatgaatcaacaaacattcttaaaacaataaatcaataaacaattttggtcagtctggaaaaaaaaaagtcgacgaaaacaacggttggggcgcgggccgaaaagcttaaaccacgcgtgcggccggccaaggaaagaagggcccgtgccggagccgggagacggggtccccaaaagcggcgggccgcgcgcaccagggcctgggcctcgctcccggcgcgagcacccccgcggcgcgggacacgacccagccaaagcggcggcaaccaaagcgac

SEQ ID NO: 69520 - DNA, 540 bp, Homo sapiens
gactcgactcagggaccggagcagccctcaactcactcttcagcttccctgctgtgttgcagcccagccgctccatcatgtccttcagtgctgaccagattgctgaattcaaggaggcatttctcctgtttgacagaacaggtgattccaagatcaccttaagccaggtcggtgatgtccttcgagctctgggcacaaatcccaccaatgcagaggtcaggaaagttctgggaaaccccagcaatgaagagctgaatgccaagaaaattgagtttgaacaattaaatctgcacctaaccaaggtcccttgtaagaaatgtccattcaagcagtcattctctgggtatataatatgattttgactaccttatctggtgttaagatttgaagttggccttttattggactaaaggggaactcctttaagggtctcagttagcccaagtttctttgcttatatgttaatagttttaccctctgcattggagagaggagtgctttactccaagaagctttcctcatggttaccgttctctccat

SEQ ID NO: 69521 - DNA, 1054 bp, Homo sapiens
gactctgggtccatcttcaagacactgggctgtggatcaacccaaccaccactcctcttccaagaatcattttgacaggttcttttggaggaactccttctctttttaacccacccttttaaaaaaaaaaatggcaccaaagaaagacgtgaagaaacctgtggctgcggctgcggctgccccagccccggcaccggcacctgcacctgcccctgccccagccaaacccaaagaagaaaaaattgacctctctgccattaagatcgagttctctaaggaacagcaggatgaattcaaggaggcatttctcctgtttgacagaacaggtgattccaagatcaccttaagccaggtcggtgatgtccttcgagctctgggcacaaatcccaccaatgcagaggtcaggaaagttctgggaaaccccagcaatgaagagctgaatgccaagaaaattgagtttgaacaatttctgcctatgatgcaagccatttccaacaacaaggaccaggccacctatgaagactttgttgagggtctgcgtgtctttgacaaggaaggcaatggcacagtcatgggtgctgaactccgccatgttctagccaccctgggtgaaaagatgaaagaggaagaagtggaagccctgatggcaggtcaagaagactccaatggctgcatcaactacgaagcttttgtcaagcacatcatgtctatctgaatggagctctcaagaacaagcattgtttaggaagactggctggaaacttattttaatcacacccatgacaaactctccagatctgtttaccatcattcaggaaaacaaagcaatctggacggttcaagactgagcaactccctgaatttttatacatcttcagtttttctctgaattgaattcataccacacaaacaaagtgtctgctgctctagatgagaagaataaaatattgacaatctcaaatccaagcaccattctttattatctaccatgaatcaacaaacattcttaaaacaataaatcaataaacaattttggtcagtctggaaaaaaaaa

SEQ ID NO: 69522 - DNA, 1078 bp, Homo sapiens
gactcgactcagggaccggagcagccctcaactcactcttcagcttccctgctgtgttgcagcccagccgctccatcatgtccttcagtgctgaccagattgctgaattcaaggaggcatttctcctgtttgacagaacaggtgattccaagatcaccttaagccaggtcggtgatgtccttcgagctctgggcacaaatcccaccaatgcagaggtcaggaaagttctgggaaaccccagcaatgaagagctgaatgccaagaaaattgagtttgaacaatttctgcctatgatgcaagccatttccaacaacaaggaccaggccacctatgaagactttgttgagggtctgcgtgtctttgacaaggaaggcaatggcacagtcatgggtgctgaactccgccatgttctagccaccctgggtgaaaagatgaaagaggaagaagtggaagccctgatggcaggtcaagaagactccaatggctgcatcaactacgaagcttttgtcaagcacatcatgtctatctgaatggagctctcaagaacaagcattgtttaggaagactggctggaaacttattttaatcacacccatgacaaactctccagatctgtttaccatcattcaggaaaacaaagcaatctggacggttcaagactgagcaactccctgaatttttatacatcttcagtttttctctgaattgaattcataccacacaaacaaagtgtctgctgctctagatgagaagaataaaatattgacaatctcaaatccaagcaccattctttattatctaccatgaatcaacaaacattcttaaaacaataaatcaataaacaattttggtcagtctggaaaaaaaaaagtcgacgaaaacaacggttggggcgcgggccgaaaagcttaaaccacgcgtgcggccggccaaggaaagaagggcccgtgccggagccgggagacggggtccccaaaagcggcgggccgcgcgcaccagggcctgggcctcgctcccggcgcgagcacccccgcggcgcgggacacgacccagccaaagcggcggcaaccaaagcgac

SEQ ID NO: 69523 - DNA, 857 bp, Homo sapiens
gactcgactcagggaccggagcagccctcaactcactcttcagcttccctgctgtgttgcagcccagccgctccatcatgtccttcagtgctgaccagattgctgatcgagttctctaaggaacagcaggatgaattcaaggaggcatttctcctgtttgacagaacaggtgattccaagatcaccttaagccaggtcggtgatgtccttcgagctctgggcacaaatcccaccaatgcagaggtcaggaaagttctgggaaaccccagcaatgaagagctgaatgccaagaaaattgagtttgaacaatttctgcctatgaagactttgttgagggtctgcgtgtctttgacaaggaaggcaatggcacagtcatgggtgctgaactccgccatgttctagccaccctgggtgaaaagatgaaagaggaagaagtggaagccctgatggcaggtcaagaagactccaatggctgcatcaactacgaagcttttgtcaagcacatcatgtctatctgaatggagctctcaagaacaagcattgtttaggaagactggctggaaacttattttaatcacacccatgacaaactctccagatctgtttaccatcattcaggaaaacaaagcaatctggacggttcaagactgagcaactccctgaatttttatacatcttcagtttttctctgaattgaattcataccacacaaacaaagtgtctgctgctctagatgagaagaataaaatattgacaatctcaaatccaagcaccattctttattatctaccatgaatcaacaaacattcttaaaacaataaatcaataaacaattttggtcagtctggaaaaaaaaa

SEQ ID NO: 69524 - DNA, 773 bp, Homo sapiens
gactcgactcagggaccggagcagccctcaactcactcttcagcttccctgctgtgttgcagcccagccgctccatcatgtccttcagtgctgaccagattgctgaattcaaggaggcatttctcctgtttgacagaacaggtgattccaagatcaccttaagccaggtcggtgatgtccttcgagctctgggcacaaatcccaccaatgcagaggtcaggaaagttctgggaaaccccagcaatgaagagctgaatgccaagaaaattgagtttgaacaatttctgcctatgatgcaagccatttccaacaacaaggaccaggccacctatgaagactttgttgagggtctgcgtgtctttgacaaggaaggcaatggcacagtcatgggtgctgaactccgccatgttctagccaccctgggtgaaaagatgaaagaggaagaagtggaagccctgatggcaggtcaagaagactccaatggctgcatcaactacgaagcttttgtcaagcacatcatgtctatctgaatggagctctcaagaacaagcattgtttaggaagactggctggaaacttattttaatcacacccatgacaaactctccagatctgtttaccatcattcaggaaaacaaagcaatctggacggttcaagactgagcaacaccctgaatttttatacatcttcagtttttctctgaattgaattcataccacacaaacaaagtgtctgctgctctagatgagaagaataaaatattgacaatctc

SEQ ID NO: 69525 - DNA, 867 bp, Homo sapiens
gactcgactcagggaccggagcagccctcaactcactcttcagcttccctgctgtgttgcagcccagccgctccatcatgtccttcagtgctgaccagattgctgaattcaaggaggcatttctcctgtttgacagaacaggtgattccaagatcaccttaagccaggtcggtgatgtccttcgagctctgggcacaaatcccaccaatgcagaggtcaggaaagttctgggaaaccccagcaatgaagagctgaatgccaagaaaattgagtttgaacaatttctgcctatgatgcaagccatttccaacaacaaggaccaggccacctatgaagactttgttgagggtctgcgtgtctttgacaaggaaggcaatggcacagtcatgggtgctgaactccgccatgttctagccaccctgggtgaaaagatgaaagaggaagaagtggaagccctgatggcaggtcaagaagactccaatggctgcatcaactacgaagctttgtcaagcacatcatgtctatctgaatggagctctcagaacaagcattgtttaggaagactggctggaaacttattttaatcacacccatgacaaactctccagatctgtttaccatcattcaggaaaacaaagcaatctggacggttcaagactgagcaactccctgaatttttatacatcttcagtttttctctgaattgaattcataccacacaaacaaagtgtctgctgctctagatgagaagaataaaatattgacaatctcaaatccaagcaccattctttattatctaccatgaatcaacaaacattcttaaaacaataaatcaataaacaattttggtcagtctggaaaaaaaaa

SEQ ID NO: 69526 - DNA, 460 bp, Homo sapiens
  misc_feature (422)..(422): n is a, c, g, or t
gactcgactcagggaccggagcagccctcaactcactcttcagcttccctgctgtgttgcagcccagccgctccatcatgcttttgtcaagcacatcatgtctatctgaatggagctctcaagaacaagcattgtttaggaagactggctggaaacttattttaatcacacccatgacaaactctccagatctgtttaccatcattcaggaaaacaaagcaatctggacggttcaagactgagcaatccctgaattttatacatcttcagttttctctgaattgattctaccacacaacaaggtctgtgtctagatgagaagataaatttggcattctcaatccagccatttttttttccggtcccacttttacatatctacacttggcgccaaaaaaaaaaaagtggggccccgaataaangggccgaaatatcacaaaaggtcaacccggggtaccag

SEQ ID NO: 69527 - DNA, 672 bp, Homo sapiens
acagttccatggatcctgttcctttgttggtagacatttggcttttcacagggttccttctgctgcaataaattccagaaaacacagacatgtttctgttgcatagattaagaaatggcattgtattgtcagagtgtctgcacttgggtcctaatggatgttacctgtccttcctccaccacagctgccttcgtaacaaccagtgtgactacgtcagagctcctcatgttcttgcatggcccaaggtgaggtctaggaattcaggccaagtgagcagaggttgggtggcctggggattgaacttgggcttccggttctgctgatctcccagctccctcctgcacttcctctcggccaagggcaagatcctagagaaggccctcacacagactgacctaggatcctgaaaacaaagccctaagaggaaatccttaagtgtcataatcttcagcctcatcatcttccctgtatttttgttccaatagatgtatttccctgtgactgaaccaggagatctggctggggctaagaagccgaagcccaactcacagggctgactctcatccttccaaaggggccagttgttctgtgcacttgtccacccctgttacccccaggatctctgttccttttcacaataaagtatggtgtcttgttatgtcaaatccctgc

SEQ ID NO: 69528 - DNA, 1918 bp, Homo sapiens
cagcagccctcctcaatcttctccaaactcccgtccccaggccacacagattctcctcaagagagccctataaggacattggtaaaatgtcactgccttcaggacacactacgggtcacactgatcaagttgttcaaagaagagcaagatgttgggatatttaccaaaggagatttagcagtaggtctgaacctgtcaatcctggcatgcattcttcatcccatcagcagcaagatggagatgcagcaatgcatggtgcccacatggactctccagtaagatacactccctatactatttcaccctataatcggaaaggcagttttcgtaaacaagaccaaacccacgttaacatggagagagagcaaaaacctccagagagaagaatggaggggaacatgccggatgggaccttagggagctggttcaagatcacagttccctttggcataaaatacaatgagaagtggctgctgaatttgattcagaatgaatgcagtgtacccttcgtcccagttgagtttcactatgaaaacatgcatgccagcttctttgtggagaatgccagcatcgcctatgcactgaagaatgtcagtggcaagatttgggatgaggataatgaaaagatatcaatctttgtcaaccctgctggcataccccactttgtgcacagggagctgaagtcagaaaaggtggagcagataaagctggccatgaaccaacagtgtgatgtctcccaggaagctcttgatatccagagactcccattttacccagacatggtgaaccgtgatactaagatggcatcgaatcctagaaagtgcatggctgcctccctggacgtccatgaagagaacatacctacagtgatgtctgcaggggagatggacaagtggaaagggatagagccaggagagaagtgtgcggacagaagcccagtgtgcacgaccttctcggatacctccagcaacataaactccatcctggaattgttccccaaattattatgcctggatggccagcagtcacccagagcaactttatgtggtactgaagcccacaagaggttaccaacctgtaagggaagcttctttggatctgagatgttgaagaatctggtcctgcaattcctgcagcagtattacttgatctatgactctggagatcgacagggtctccttagtgcttaccacgatgaggcctgcttctccctgagcattcccttcaatcctgaggactcagccccgagcagcttctgcaagttcttcaaggatagcaggaatataaaaattctcaaggacccctaccttcggggggagctgctgaagcacacaaaacttgatattgtggactccctcagtgcgttgcctaaaactcagcatgacctcagctccttcctggtggacatgtggtaccagacggaatggatgctctgcttttctgtcaacggggtgttcaaggaagtggaaggacagtctcagggttctgttctcgccttcacccggaccttcattgctacccctggcagcagttccagtctgtgcatcgtgaatgacaagctctttgtgcgggataccagccaccaagggacccagagtgccttgttcaccctagtgcccacagccttctccagctccgtgcctgccttctcccaggagcagcagaaaatgctgccttcgtaacaaccagtgtgactacgtcagagctcctcatgttcttgcatggcccaagatgtatttccctgtgactgaaccaggagatctggctggggctaagaagccgaagcccaactcacagggctgactctcatccttccaaaggggccagttgttctgtgcacttgtccacccctgttacccccaggatctctgttccttttcacaataaagtatggtgtcttgttatgtcaaatccctgc

SEQ ID NO: 69529 - DNA, 2158 bp, Homo sapiens
cagcagccctcctcaatcttctccaaactcccgtccccaggccacacagattctcctcaagagagccctataaggacattggtaaaatgtcactgccttcaggacacactacgggtcacactgatcaagttgttcaaagaagagcaagatgttgggatatttaccaaaggagatttagcagtaggtctgaacctgtcaatcctggcatgcattcttcatcccatcagcagcaagatggagatgcagcaatgcatggtgcccacatggactctccagtaagatacactccctatactatttcaccctataatcggaaaggcagttttcgtaaacaagaccaaacccacgttaacatggagagagagcaaaaacctccagagagaagaatggaggggaacatgccggatgggaccttagggagctggttcaagatcacagttccctttggcataaaatacaatgagaagtggctgctgaatttgattcagaatgaatgcagtgtacccttcgtcccagttgagtttcactatgaaaacatgcatgccagcttctttgtggagaatgccagcatcgcctatgcactgaagaatgtcagtggcaagatttgggatgaggataatgaaaagatatcaatctttgtcaaccctgctggcataccccactttgtgcacagggagctgaagtcagaaaaggtggagcagataaagctggccatgaaccaacagtgtgatgtctcccaggaagctcttgatatccagagactcccattttacccagacatggtgaaccgtgatactaagatggcatcgaatcctagaaagtgcatggctgcctccctggacgtccatgaagagaacatacctacagtgatgtctgcaggggagatggacaagtggaaagggatagagccaggagagaagtgtgcggacagaagcccagtgtgcacgaccttctcggatacctccagcaacataaactccatcctggaattgttccccaaattattatgcctggatggccagcagtcacccagagcaactttatgtggtactgaagcccacaagaggttaccaacctgtaagggaagcttctttggatctgagatgttgaagaatctggtcctgcaattcctgcagcagtattacttgatctatgactctggagatcgacagggtctccttagtgcttaccacgatgaggcctgcttctccctgagcattcccttcaatcctgaggactcagccccgagcagcttctgcaagttcttcaaggatagcaggaatataaaaattctcaaggacccctaccttcggggggagctgctgaagcacacaaaacttgatattgtggactccctcagtgcgttgcctaaaactcagcatgacctcagctccttcctggtggacatgtggtaccagacggaatggatgctctgcttttctgtcaacggggtgttcaaggaagtggaaggacagtctcagggttctgttctcgccttcacccggaccttcattgctacccctggcagcagttccagtctgtgcatcgtgaatgacaagctctttgtgcgggataccagccaccaagggacccagagtgccttgttcaccctagtgcccacagccttctccagctccgtgcctgccttctcccaggagcagcagaaaatgctgccttcgtaacaaccagtgtgactacgtcagagctcctcatgttcttgcatggcccaaggtgaggtctaggaattcaggccaagtgagcagaggttgggtggcctggggattgaacttgggcttccggttctgctgatctcccagctccctcctgcacttcctctcggccaagggcaagatcctagagaaggccctcacacagactgacctaggatcctgaaaacaaagccctaagaggaaatccttaagtgtcataatcttcagcctcatcatcttccctgtatttttgttccaatagatgtatttccctgtgactgaaccaggagatctggctggggctaagaagccgaagcccaactcacagggctgactctcatccttccaaaggggccagttgttctgtgcacttgtccacccctgttacccccaggatctctgttccttttcacaataaagtatggtgtcttgttatgtcaaatccctgc

SEQ ID NO: 69530 - DNA, 1822 bp, Homo sapiens
cagcagccctcctcaatcttctccaaactcccgtccccaggccacacagattctcctcaagagagccctataaggacattggtaaaatgtcactgccttcaggacacactacgggtcacactgatcaagttgttcaaagaagagcaagatgttgggatatttaccaaaggagatttagcagtaggtctgaacctgtcaatcctggcatgcattcttcatcccatcagcagcaagatggagatgcagcaatgcatggtgcccacatggactctccagtaagatacactccctatactatttcaccctataatcggaaaggcagttttcgtaaacaagaccaaacccacgttaacatggagagagagcaaaaacctccagagagaagaatggaggggaacatgccggatgggaccttagggagctggttcaagatcacagttccctttggcataaaatacaatgagaagtggctgctgaatttgattcagaatgaatgcagtgtacccttcgtcccagttgagtttcactatgaaaacatgcatgccagcttctttgtggagaatgccagcatcgcctatgcactgaagaatgtcagtggcaagatttgggatgaggataatgaaaagatatcaatctttgtcaaccctgctggcataccccactttgtgcacagggagctgaagtcagaaaaggtggagcagataaagctggccatgaaccaacagtgtgatgtctcccaggaagctcttgatatccagagactcccattttacccagacatggtgaaccgtgatactaagatggcatcgaatcctagaaagtgcatggctgcctccctggacgtccatgaagagaacatacctacagtgatgtctgcaggggagatggacaagtggaaagggatagagccaggagagaagtgtgcggacagaagcccagtgtgcacgaccttctcggatacctccagcaacataaactccatcctggaattgttccccaaattattatgcctggatggccagcagtcacccagagcaactttatgtggtactgaagcccacaagaggttaccaacctgtaagggaagcttctttggatctgagatgttgaagaatctggtcctgcaattcctgcagcagtattacttgatctatgactctggagatcgacagggtctccttagtgcttaccacgatgaggcctgcttctccctgagcattcccttcaatcctgaggactcagccccgagcagcttctgcaagttcttcaaggatagcaggaatataaaaattctcaaggacccctaccttcggggggagctgctgaagcacacaaaacttgatattgtggactccctcagtgcgttgcctaaaactcagcatgacctcagctccttcctggtggacatgtggtaccagacggaatggatgctctgcttttctgtcaacggggtgttcaaggaagtggaaggacagtctcagggttctgttctcgccttcacccggaccttcattgctacccctggcagcagttccagtctgtgcatcgtgaatgacaagctctttgtgcgggataccagccaccaagggacccagagtgccttgttcaccctagtgcccacagccttctccagctccgtgcctgccttctcccaggagcagcagaaaatggtacaggttttctctgcccagtctgggggatgaactaccagttgcctcagaagtgagtgctgggccgggcgcggtggctcacgcctgtaatcccagcactttgggaggccgaggcgggcgaatcacgaggtcaggagattgagaccatcctg

SEQ ID NO: 69531 - DNA, 2333 bp, Homo sapiens
cagcagccctcctcaatcttctccaaactcccgtccccaggccacacagattctcctcaagagagccctataaggacattggtaaaatgtcactgccttcaggacacactacgggtcacactgatcaagttgttcaaagaagagcaagatgttgggatatttaccaaaggagatttagcagtaggtctgaacctgtcaatcctggcatgcattcttcatcccatcagcagcaagatggagatgcagcaatgcatggtgcccacatggactctccagtaagatacactccctatactatttcaccctataatcggaaaggcagttttcgtaaacaagaccaaacccacgttaacatggagagagagcaaaaacctccagagagaagaatggaggggaacatgccggatgggaccttagggagctggttcaagatcacagttccctttggcataaaatacaatgagaagtggctgctgaatttgattcagaatgaatgcagtgtacccttcgtcccagttgagtttcactatgaaaacatgcatgccagcttctttgtggagaatgccagcatcgcctatgcactgaagaatgtcagtggcaagatttgggatgaggataatgaaaagatatcaatctttgtcaaccctgctggcataccccactttgtgcacagggagctgaagtcagaaaaggtggagcagataaagctggccatgaaccaacagtgtgatgtctcccaggaagctcttgatatccagagactcccattttacccagacatggtgaaccgtgatactaagatggcatcgaatcctagaaagtgcatggctgcctccctggacgtccatgaagagaacatacctacagtgatgtctgcaggggagatggacaagtggaaagggatagagccaggagagaagtgtgcggacagaagcccagtgtgcacgaccttctcggatacctccagcaacataaagtcagttgtaccctctgtcaccacctgggaccctgacctgtgtttgatagcgcccttctgcaggaggaggcagcactagtcttctgggaggaccacagaccctctccttccccctcgccccactcctctctctgtgtcactcattcatctgtgcttagacatctcctttccttcctctgacatggtccccttttcacccgctctgggatgtgtttcccacctgtctccacccagcctcctctagcgtgccctctgacgtaggtgtgattgctcccatgaggaggacagctccacagtttcacttaccgttgtccattttgttttgattttcggcagctccatcctggaattgttccccaaattattatgcctggatggccagcagtcacccagagcaactttatgtggtactgaagcccacaagaggttaccaacctgtaaggtgagaagagaggatccagcagggtggtgcatgaggaagggggggtaccatctgtggtcctggggactctttattccagggaagcttctttggatctgagatgttgaagaatctggtcctgcaattcctgcagcagtattacttgatctatgactctggagatcgacagggtctccttagtgcttaccacgatgaggcctgcttctccctgagcattcccttcaatcctgaggactcagccccgagcagcttctgcaagttcttcaaggatagcaggaatataaaaattctcaaggacccctaccttcggggggagctgctgaagcacacaaaacttgatattgtggactccctcagtgcgttgcctaaaactcagcatgacctcagctccttcctggtggacatgtggtaccagacggaatggatgctctgcttttctgtcaacggggtgttcaaggaagtggaaggacagtctcagggttctgttctcgccttcacccggaccttcattgctacccctggcagcagttccagtctgtgcatcgtgaatgacaagctctttgtgcgggataccagccaccaagggacccagagtgccttgttcaccctagtgcccacagccttctccagctccgtgcctgccttctcccaggagcagcagaaaatgctgccttcgtaacaaccagtgtgactacgtcagagctcctcatgttcttgcatggcccaagatgtatttccctgtgactgaaccaggagatctggctggggctaagaagccgaagcccaactcacagggctgactctcatccttccaaaggggccagttgttctgtgcacttgtccacccctgttacccccaggatctctgttccttttcacaataaagtatggtgtcttgttatgtcaaatccctgc

SEQ ID NO: 69532 - DNA, 2254 bp, Homo sapiens
cagcagccctcctcaatcttctccaaactcccgtccccaggccacacagattctcctcaagagagccctataaggacattggtaaaatgtcactgccttcaggacacactacgggtcacactgatcaagttgttcaaagaagagcaagatgttgggatatttaccaaaggagatttagcagtaggtctgaacctgtcaatcctggcatgcattcttcatcccatcagcagcaagatggagatgcagcaatgcatggtgcccacatggactctccagtaagatacactccctatactatttcaccctataatcggaaaggcagttttcgtaaacaagaccaaacccacgttaacatggagagagagcaaaaacctccagagagaagaatggaggggaacatgccggatgggaccttagggagctggttcaagatcacagttccctttggcataaaatacaatgagaagtggctgctgaatttgattcagaatgaatgcagtgtacccttcgtcccagttgagtttcactatgaaaacatgcatgccagcttctttgtggagaatgccagcatcgcctatgcactgaagaatgtcagtggcaagatttgggatgaggataatgaaaagatatcaatctttgtcaaccctgctggcataccccactttgtgcacagggagctgaagtcagaaaaggtggagcagataaagctggccatgaaccaacagtgtgatgtctcccaggaagctcttgatatccagagactcccattttacccagacatggtgaaccgtgatactaagatggcatcgaatcctagaaagtgcatggctgcctccctggacgtccatgaagagaacatacctacagtgatgtctgcaggggagatggacaagtggaaagggatagagccaggagagaagtgtgcggacagaagcccagtgtgcacgaccttctcggatacctccagcaacataaagtcagttgtaccctctgtcaccacctgggaccctgacctgtgtttgatagcgcccttctgcaggaggaggcagcactagtcttctgggaggaccacagaccctctccttccccctcgccccactcctctctctgtgtcactcattcatctgtgcttagacatctcctttccttcctctgacatggtccccttttcacccgctctgggatgtgtttcccacctgtctccacccagcctcctctagcgtgccctctgacgtaggtgtgattgctcccatgaggaggacagctccacagtttcacttaccgttgtccattttgttttgattttcggcagctccatcctggaattgttccccaaattattatgcctggatggccagcagtcacccagagcaactttatgtggtactgaagcccacaagaggttaccaacctgtaagggaagcttctttggatctgagatgttgaagaatctggtcctgcaattcctgcagcagtattacttgatctatgactctggagatcgacagggtctccttagtgcttaccacgatgaggcctgcttctccctgagcattcccttcaatcctgaggactcagccccgagcagcttctgcaagttcttcaaggatagcaggaatataaaaattctcaaggacccctaccttcggggggagctgctgaagcacacaaaacttgatattgtggactccctcagtgcgttgcctaaaactcagcatgacctcagctccttcctggtggacatgtggtaccagacggaatggatgctctgcttttctgtcaacggggtgttcaaggaagtggaaggacagtctcagggttctgttctcgccttcacccggaccttcattgctacccctggcagcagttccagtctgtgcatcgtgaatgacaagctctttgtgcgggataccagccaccaagggacccagagtgccttgttcaccctagtgcccacagccttctccagctccgtgcctgccttctcccaggagcagcagaaaatgctgccttcgtaacaaccagtgtgactacgtcagagctcctcatgttcttgcatggcccaagatgtatttccctgtgactgaaccaggagatctggctggggctaagaagccgaagcccaactcacagggctgactctcatccttccaaaggggccagttgttctgtgcacttgtccacccctgttacccccaggatctctgttccttttcacaataaagtatggtgtcttgttatgtcaaatccctgc

SEQ ID NO: 69533 - DNA, 1064 bp, Homo sapiens
gaacttcggagtgtaggtggacacactgcactgtgtctctgacgtaggtgtgattgctcccatgaggaggacagctccacagtttcacttaccgttgtccattttgttttgattttcggcagctccatcctggaattgttccccaaattattatgcctggatggccagcagtcacccagagcaactttatgtggtactgaagcccacaagaggttaccaacctgtaagggaagcttctttggatctgagatgttgaagaatctggtcctgcaattcctgcagcagtattacttgatctatgactctggagatcgacagggtctccttagtgcttaccacgatgaggcctgcttctccctgagcattcccttcaatcctgaggactcagccccgagcagcttctgcaagttcttcaaggatagcaggaatataaaaattctcaaggacccctaccttcggggggagctgctgaagcacacaaaacttgatattgtggactccctcagtgcgttgcctaaaactcagcatgacctcagctccttcctggtggacatgtggtaccagacggaatggatgctctgcttttctgtcaacggggtgttcaaggaagtggaaggacagtctcagggttctgttctcgccttcacccggaccttcattgctacccctggcagcagttccagtctgtgcatcgtgaatgacaagctctttgtgcgggataccagccaccaagggacccagagtgccttgttcaccctagtgcccacagccttctccagctccgtgcctgccttctcccaggagcagcagaaaatgctgccttcgtaacaaccagtgtgactacgtcagagctcctcatgttcttgcatggcccaagatgtatttccctgtgactgaaccaggagatctggctggggctaagaagccgaagcccaactcacagggctgactctcatccttccaaaggggccagttgttctgtgcacttgtccacccctgttacccccaggatctctgttccttttcacaataaagtatggtgtcttgttatgtcaaatccctgc

SEQ ID NO: 69534 - DNA, 1251 bp, Homo sapiens
cagcagccctcctcaatcttctccaaactcccgtccccaggccacacagattctcctcaagagagccctataaggacattggtaaaatgtcactgccttcaggacacactacgggtcacactgatcaagttgttcaaagaagagcaagatgttgggatatttaccaaaggagatttagcagtaggtctgaacctgtcaatcctggcatgcattcttcatcccatcagcagcaagatggagatgcagcaatgcatggtgcccacatggactctccagtaagatacactccctatactatttcaccctataatcggaaaggcagttttcgtaaacaagaccaaacccacgttaacatggagagagagcaaaaacctccagagagaagaatggaggggaacatgccggatgggaccttagggagctggttcaagatcacagttccctttggcataaaatacaatgagaagtggctgctgaatttgattcagaatgaatgcagtgtacccttcgtcccagttgagtttcactatgaaaacatgcatgccagcttctttgtggagaatgccagcatcgcctatgcactgaagaatgtcagtggcaagatttgggatgaggataatgaaaagatatcaatctttgtcaaccctgctggcataccccactttgtgcacagggagctgaagtcagaaaaggtggagcagataaagctggccatgaaccaacagtgtgatgtctcccaggaagctcttgatatccagagactcccattttacccagacatggtgaaccgtgatactaagatggcatcgaatcctagaaagtgcatggctgcctccctggacgtccatgaagagaacatacctacagtgatgtctgcaggggagatggacaagtggaaagggatagagccaggagagaagtgtgcggacagaagcccagtgtgcacgaccttctcggatacctccagcaacataaagtcagttgtaccctctgtcaccacctgggaccctgacctgtgtttgatagcgcccttctgcaggaggaggcagcactagtcttctgggaggaccacagaccctctccttccccctcgccccactcctctctctgtgtcactcattcatctgtgcttagacatctcctttccttcctctgacatggtccccttttcacccgctctgggatgtgtttcccacctgtctccacccagcctcctctagcgtgccctctgtgagtgtgctccaggaagcg

SEQ ID NO: 69535 - DNA, 1011 bp, Homo sapiens
taggtccagggccatgtgactcccctgcagaaagacaccagctcctggagatgcctgcactggccagaccacccactcctgctcctctttttcttctaggagcagcttctgcaagttcttcaaggatagcaggaatataaaaattctcaaggacccctaccttcggggggagctgctgaagcacacaaaacttgatattgtggactccctcagtgcgttgcctaaaactcagcatgacctcagctccttcctggtggacatgtggtaccagacggaatggatgctctgcttttctgtcaacggggtgttcaaggaagtggaaggacagtctcagggttctgttctcgccttcacccggaccttcattgctacccctggcagcagttccagtctgtgcatcgtgaatgacaagctctttgtgcgggataccagccaccaagggacccagagtgccttgttcaccctagtgcccacagccttctccagctccgtgcctgccttctcccaggagcagcagaaaatgctgccttcgtaacaaccagtgtgactacgtcagagctcctcatgttcttgcatggcccaaggtgaggtctaggaattcaggccaagtgagcagaggttgggtggcctggggattgaacttgggcttccggttctgctgatctcccagctccctcctgcacttcctctcggccaagggcaagatcctagagaaggccctcacacagactgacctaggatcctgaaaacaaagccctaagaggaaatccttaagtgtcataatcttcagcctcatcatcttccctgtatttttgttccaatagatgtatttccctgtgactgaaccaggagatctggctggggctaagaagccgaagcccaactcacagggctgactctcatccttccaaaggggccagttgttctgtgcacttgtccacccctgttacccccaggatctctgttccttttcacaataaagtatggtgtcttgttatgtcaaatccctgc

SEQ ID NO: 69536 - DNA, 256 bp, Homo sapiens
aggcaagagaaggctaggtcagatgaatttacccaagtacaagtctgcctacagtcagactttcaagactcatttggcacccaggccacagagatagcctgtcctcactggtctccaacaggtattacttgatctatgactctggagatcgacagggtctccttagtgcttaccacgatgaggcctgcttctccctgagcattcccttcaatcctgaggactcagccccgtgagtatcacagctccgaccctaggt

SEQ ID NO: 69537 - DNA, 132 bp, Homo sapiens
gctaagttcatggatatcaatttaaggatatttttccaattttctatgtgtacatatgtagaatgcacacaaacaactgaatattcaaacattagtgcagactctattatatgatatccattatatgtatat

SEQ ID NO: 69538 - DNA, 1283 bp, Homo sapiens
gtctgaaagtctttagtagcctctcatttcttgttcagcatcagagtattcatactgaagaaaaaccctttgaatgtcagaaatgcaggaaatccttcaaccagcttgaatcactgaatatgcatttgagaaatcacattagattgaaaccctacgaatgcagtatatgtgggaaagcctttagtcataggtcatccctgcttcaacatcacagaattcatactggagagaaaccttatgaatgtattaaatgtgggaagaccttcagctgtagttcaaaccttaccgtacatcagagaattcacactggagaaaagccatataaatgtaatgagtgtgggaaagcttttagcaaaggctcaaatcttactgcccatcaaagagtacataatggagagaaacccaatagtgtggtaagtgtggaaaagcctttagactatatgaatcactatacatgtgagaaatcttacagaagagaaactgtatgaagcagtggttatcatggtaaatttcctagattctcccttatttaacattagaaaaatttatactggggaaagtcttatgaatgtggtgaatataggaagaccttttagcaaagatgcaggccagtttgtttattagactttatactgtagagaaatcatatgaagaccataaatgtgggaaagcctttgtcagtattaatcccttaattgacataagtatactcacactaggataaaaccctgtacatgtagcaaatgtgggaaagactatagacaataggaatcttttacaaactcctacaggagagaagctgtatgaatgtagaaaatttagaaattgagggaagtcttcagttccaagtatatcccttattctacagcagagaactcaaaatggagagaaatctcatttaagagatgtagcaaagtgttcactaagagtgtttatcttggtacacatcagaagattaatggtagaacaacctgaaggatttaggagttatgtgtaaatctttgcagtcatgctatttgtaaactggattctacaggagagcaaataaacattataataaaatatgcatttcttagagcagtagcttgcagtttcagttgagttctacttagaaattctttttagctagtgggcatgtgaagatatttagtcacccagaggagccagtaagtgttataatattgaaaattaaagctgcaaaagaaataaagtgatgttaataaaagttttggcatctaataaaatcattttgtatatcaaaaactctttcactgtgactattt

SEQ ID NO: 69539 - DNA, 636 bp, Homo sapiens
gcgagaccctgtctcaattaaaaaaaaattaaattaattataaggggaatgaagagggactgatgagaaaagacaaatccacataataatttataagtctaagattgaaatcccaatgaaaaggtaaagagaagctctgagtctagcactagaagtagtatgcccagttcatgaagatgttaaataagtaggaatgtgtttccagtggcatactgtctttatttctgtttaatttgactcaaagaatgtctctgagttccaaggaaattattgttgatatagattgcaatgaaaagaatcagatacataaatccaatttagataatgatggagttcagtgtacattaagaattgcttggggctgggcacagtggctcatgcctttaatcgcagcactttgggaggccaaggtaggcagatcacttgagcccaggagtttgagacctgcctgcacaacgttgcaaaaccctgtctctacaaaaaatacaaaaaattagctgtgcatggtggtgttgtgcctgtagtcccaactacttgggaggtgggaggatcactcgagaccagaaaaatcaaagctgcagtgagctgagatcctaccattgcactccagcctgggcaacaagtgagaccctgttt

SEQ ID NO: 69540 - DNA, 309 bp, Homo sapiens
tggagttatgaagatagtgtatgaataaaaagcctaggcatccttagaagtacgttttaaaaaggagaatagggccttggaaaagcacagagttgagtctatcagagaaggcttcctggtggaagcagaatgtcatagagacaggagatagatgagcaagagggcactcatgaggtatgaggcggttggtaggttatcttgattaaagaatcaggttgtaaataagttactgttaagtacatatgtactagtatgtactagagcgtggcgtttgtgaccaagattatgtgggctgctgtatggagaagg

SEQ ID NO: 69541 - DNA, 167 bp, Homo sapiens
tgaacttttcgtaactgaagctagttcttataggcctcattagattcaggctcaatatttttcacaggagccaaaataggtggagctatgtagtctactccatcctattaggggtgagaaaagaactttctttcttttttttttttttttttagacggagtcttgct

SEQ ID NO: 69542 - DNA, 284 bp, Homo sapiens
cgggacaggctgaggcaggagaatggcgtgaacccgggaggcggagcttgcagtgagctgagatcgcgccactgcactccagcctgggtgacacagcgagacttcgtctcaaacaaacaaacaaaaaaaaaaacaaattcaaaaaatatataatgaaattaactttcccaaagctcaacgtactttataaattagaagtgataggccaaacactaaagcacaggattctgggaatgcttaatagacactaacaaccatacaattgcacactcttacagcaaaat

SEQ ID NO: 69543 - DNA, 1853 bp, Homo sapiens
gggtaatgtgtgttcactggaaatttctaacattcaaaaaggagaagggggagagtacatgtgtcatgctgtaaacatcataggggaagcaaagagctttgcaaatgtagacataatgccccaggaagaaagagtggtggcactaccacctccagtaacacatcagcatgtcatggagtttgatttggaacacaccacatcatcaagaacaccttctcctcaagaaattgtcctggaagttgaattaagtgaaaaagacgttaaagaatttgagaagcaggtgaaaatagtgacagttcccgaatttactcctgaccataaaagtatgattgtgagtctagatgttcttccatttaattttgtagatccaaatatggattcaagggagggagaagacaaagaactaaaaattgatttagaagtatttgaaatgcctcctcgctttataatgcctatttgtgattttaaaattccagaaaattcagatgctgtattcaaatgttcagtcatagggatcccgactcccgaagttaagtggtataaagaatatatgtgtattgagccagataatattaaatacgtgattagcgaggagaagggaagtcacactcttaaaattcgaaatgtctgtctttctgatagtgcaacatacaggtgcagagctgtgaattgtgtaggagaggctatctgtcggggattcctcaccatgggagattctgaaatatttgctgtgatagcaaagaaaagcaaagtgactttaagcagtttaatggaagaatggtcttaaagagcaactacacagacagtttttttgaatttcaggtggtggaagggcctcccaggtttatcaaaggtatttctgactgttatgcaccaataggtacagcagcatattttcagtgcttagttcgtggctctccaagacccacggtttactggtacaaagatggaaaattagtccaaggaagaaggttcactgttgaggaaagtggcacagggttccataacctgtttataacaagcttagtaaagagtgatgaaggagagtataggtgtgtagctacaaacaaatcaggaatggctgagagctttgcagcactcaccttaacttaaaatgtaatgttttagtgcctcagtaattattagcattgatctgagtgctttcatattttccaaattatgtggatctaataaacttccaaacaggtccaccatatttgaattcattaccttggagacccctaaagaaataatctctatgtagaaatctcatctttgtaatacatgtaaatattttgttatctgaactgtggaatcatcacttgtgtcaatcatgctgtgtaatatcaaacacaattaaatctctccttggctacctaattgtttgtacttctatttaccctcatgcctcctccacaaagtgtttcagtggaatggactctcttttagcagataaaccatatatgcaaaagtacaatgtaaaagtggagaccatatcagatgaccacgcagacaaattggtaagggcaaatctctctgctcccattctaagttatttttggaattttaacccctttgcatccaaactcatgtttatttactttgacttagaataggcaaaacaaacaacaaaaaccagcttctcccaattggcaactaactctataatctgtttgacatttcaatcttaatatattaacttcatctcttttaaaaatgttttcgttattaatattcctcttcataagtgctttaattctcactggcttcaagggaccaattgtgctctttgtgggcagggttcacctagacatttgcaaaataagcaaatagatctttccacttttggagat

SEQ ID NO: 69544 - DNA, 871 bp, Homo sapiens
  misc_feature (796)..(796): n is a, c, g, or t
gggtaatgtgtgttcactggaaatttctaacattcaaaaaggagaagggggagagtacatgtgtcatgctgtaaacatcataggggaagcaaagagctttgcaaatgtagacataatgccccaggaagaaagagtggtggcactaccacctccagtaacacatcagcatgtcatggagtttgatttggaacacaccacatcatcaagaacaccttctcctcaagaaattgtcctggaagttgaattaagtgaaaaagacgttaaagaatttgagaagcaggtgaaaatagtgacagttcccgaatttactcctgaccataaaagtatgattgtgagtctagatgttcttccatttaattttgtagatccaaatatggattcaagggagggagaagacaaagaactaaaaattgatttagaagtatttgaaatgcctcctcgctttataatgcctatttgtgattttaaaattccagaaaattcagatgctgtattcaaatgttcagtcatagggatcccgactcccgaagttaagtggtataaagaatatatgtgtattgagccagataatattaaatacgtgattagcgaggagaagggaagtcacactcttaaaattcgaaatgtctgtctttctgatagtgcaacatacaggtgcagagctgtgaattgtgtaggagaggctatctgtcggggattcctcaccatgggagattctgaaatattcaacagatgatggtggggtataaaactgatctaactcagatatttcttcactggttgtacttcccacacncaatggaaatgtcagactcaggagaaagtgacgacctagtatcctgtttctagttgtagtattataccgtgtagt

SEQ ID NO: 69545 - DNA, 828 bp, Homo sapiens
gttcttttatagagctaagaatgatgaaaccatcaatacttccttcttcctaaaaatccagatcaaaacttcaggttaggtttctaagtttaggacatgaatattatttttttctggaaaagaagatgagtatatgtgtaataagacaagtagaactgagagatttagttttttttttttttaagttttagttcagaataacattaattttgagagattgaggtaaagaaccttaactaatgctaaggagtttattttgattaacataggttattctgaccaccacctcttccttccttaatctccttagaatctgacagtctcaaagctgtcacacaaattagactaattttgacactttgaaatgaaaacttcaaggaagaagtagccacggacagttatgtttataatcagtaggtggcactctttcctcaggtagccccccattttcacatgatgtgtttgaaggttaaatgccaccaaaagtgctgagtcagctataaaactaagtccctgaattccatggcccttttaaatatgtaatcattcaagattgaaaaaaaaaattaagcattttttgtttgtttgcttgtttgtttttgagacggagtttcactcttgttggccaggctggagtgcaatggcgccatctcagctcactgcaacctctgcctcccggattcaagcaattctccttcagccctccaagtagctggggttacaggtgcccgccaccatgcccagctagtttttgtatttttagtagagatgaggtttcaccatgttggccaggctggtcttgaactcctgacctcgtgatccccccac

SEQ ID NO: 69546 - DNA, 392 bp, Homo sapiens
tgggagccaggcatttggcccattgcccagttgatagcaggggctgagttggggaatgttccatcctctgtggttaatctattctgagcaggttttggggctttgtaaccatgtgaattttgtatctttgttggtgaataatttaccaaatactgttatgttgttatataatataaaacttactcttcatcttttatttttagatacttggagagaaataccaaagtaatgttcctcactcagtaacactggttggaaggatatgcgatgacttgttgctctctatgaggttttgtttttttgtttgttttttgagactgagtctgcactccagcctgggtgcagagggagaccctgtctccaaaaagaaaaaatgaaaaaaaaacacatac

SEQ ID NO: 69547 - DNA, 259 bp, Homo sapiens
aataacactgtcacgtccacttttgtaagtctccccacctcccagggccctaaatttcttgaatatccttcctacagcatttgatacatatgcaggcatacactcccttttttttgttttttgagacggagttttgctcttgttgcctaggctggagtgcaatggcatgatctcagcttattgcaacctctgcctcccagattcaagcgattctcctgccacagcctccggagtagctgggattataggtgcccaacac

SEQ ID NO: 69548 - DNA, 401 bp, Homo sapiens
gaaatggacttcatttagaagatggtgtgtgtgtgtgtgtgtgtgtatttacacgtgtatacctttgtacagaaatttcctccacaaaattcctgctagatgaagtcatctctgttgataaatgtgatgaactgttgattttgttaatgaaatcggattcagcttggtttctcttctcctgcagatgtgcttggtccagcagtattcccctgggaactgttctccaggcgctgcagagctcctctgtgctgtctgtatccacctgtggtctgtttccgggctctctttcatgtcacattgacctgtttttgtatcttatgccagtcttttttcttttatttatttatttatattattattttttttgatggagcctgggcgacagagattccatctcaaaa

SEQ ID NO: 69549 - DNA, 340 bp, Homo sapiens
tgcttctctcatcaggtactgtgctattagtacttaaagccttgatacctgacttcgcaggaagatgggtcagaaatgccaatctaccagcttgttacttttcttagtttctcacattgctttccagctgtgtcctctaagttgaatgatgtctgcctcccaccacaacaggagactcatttcactttagaaggagttatttgagtcttaaaaccttataaattgctgggtacagtggctcacacctgtaatccaagcactttgggaggccgaggcaggcagatcacttgaggccaggagtttgagaccagcctggccaacatggtgaaaccccatctct

SEQ ID NO: 69550 - DNA, 531 bp, Homo sapiens
tgggatcgtcgggtcaggccttgggccaacgtaggcactctcgcagttcctccgccttcaggaaggtctttttggcaggggccctacgggtgcgcgcttcggtcctggaggccttatccaagcctcctctccatcagcgccacccgtctggggtccgaaaggagggagctttccctctgtcccccagcctttggactgtcaccaaacaagccattcgttcaccaaatacttattaagcgcctaccaggcactatcctcaattgtcctgtgatatttacaatctagaaggcaggagagagaactaagaacagagagcatgttctgagatgtctgctgtgtttgcagaaagaggcttctccccaggaccaggattccacgaaggcagcccttttctagatggagaaaatagaacctgaaggcagccgtttccctaaactgctctcgctcatgtctgtcagagaaaggaaatgaagcagtgaaagcatcctcccaaaagggacttttaaatccttctacctgggctgaactaca

SEQ ID NO: 69551 - DNA, 584 bp, Homo sapiens
attttctagctgactgattccagaacacacaagtacatggtaggaaaaaaaaggccagctacacactcatggcccatttcgatataacatgtaaatgatgttacgattcctacaggaaaaacaggaagggcaattgttgaagagctgtcctttgtccttgccacatacatctcaacaacctctctgctcatgacactagatttgatgacttatgagactagaaacttagtctcatcagtttcataaaaattaggcattgaaggaataaagcttcagtgcaaacagatggaatattgactacagaaagaatcacaggtgaccttgaagttggttgagttgaagttacatttaagaaaatttataagaaagattgggccgggtgagctagactagaagagctatcttggccaggaccctgcagaaaaagaggtggaagtgagatagaggaataaagggaattagaataaatcagcctccagagatagagggtaacaggaggaacagttgtttcagtgagaggcttccaatgagaagatgcagatcttgggagagcctgaagttcaggccagttgctgacagagctc

SEQ ID NO: 69552 - DNA, 394 bp, Homo sapiens
  misc_feature (3)..(3): n is a, c, g, or t
atntatttatttatttttggagaccagagtcctcagcctgttgcccccggcctagagtgccagtggagtttgcagtgagcccaagattgtgccattgcactccagccctgggtgacaagagtgaaactctgtctcacaaaaaaaagaaaaagaaaaaaaaagttccaaaaggaaagtggctgatttaggataaaaagccagataattttaatattatatccgttgtgatcataagaaagtacaggtacgaaaagagaaaaaagtacaccaactataacagtggctgtggtgggtggtggtagatcagatgactttctacccatttaccagacttcttgcattatggttatattacttccatccctagagaaaacattcagattgttatttttta

SEQ ID NO: 69553 - DNA, 452 bp, Homo sapiens
aggctttgctctcctgcattccttgtagtcagcagggaaggaccccttgttatgatgtgagttactctcaacatttcaggcttttgaagattaattcctgatctgagggaagattctggcagaactgggatatctctagaatgcactgataagggccttgtcagtttctggggtgggcaggtccttcttatagacggttttgtgactaagatacctgatcagtaggctttttttcctggctgtaactagtgatgggttgcaggtgggtgcgtgtggggatggaacatcttagagttgtctacaaagttaggcatcagagagcatgggtatcatggagagaactttttgattgagatttggggccaatttaagtcagttctctaatattttcttgcatttgagttataagctgttcctataagtaagtgataagggagtagtgggaaaatgca

SEQ ID NO: 69554 - DNA, 416 bp, Homo sapiens
tgaggtgggaggatcacttgagatcagaagattgaggctgcagtgagccatgatcgcaccactgcaccccagactgggtgacacagcaagaccctgtctcaaaaactaaaaaaaaaattttttaagtgacaaaagcaagttgaagaataaaatgtctaagatgaggctataaaaaatcattcaaaatttggaagcaagagtaagacgggaagaataatgactacccctacttaagatctccatgtcctgctcctcagaacctgtgaatatgttatgttacatagctgggggaattaaggttgcaaatcagtttaccttgaaataggggagttaccttgaattatccaggtgtgcctggtgtaatcccaaggatccttataagagaaaaggtgatgcgaagatggaggcagagagat

SEQ ID NO: 69555 - DNA, 453 bp, Homo sapiens
ccatctcaaaaaaaaaaaaaaaggaacagccagcgatatacaaaacaacatggaagaatctcatcaacattacgttaagtgaaaaaagccaaacaaaaaagtatattccatttgtatgacattctaggataggctaaataacatacaggacaattcccaacaagcagtaatcatttgggccacaatgtcagtagtgctgaggttgagaaacctcaactaaactaatttatggtggaaaaaactagaatagtggttgttgtctccgtgaaagcagagattgcctgtgaatgggcatgaaggatgtttttcaggtgatggtaatgtctcatatttcaatataaattttcattacacaggtgtatgcatctgtcaaaacttagcaaatgtatatttaagatttttgcatttatttgtaaagttcatattaaaagaaaagaatgggtacaataaaaa

SEQ ID NO: 69556 - DNA, 405 bp, Homo sapiens
ggactgagtaagggtaaagaagggactagggagaagtggatagataccaaaactgtttaggatatagaattggtaatacaattattattattattttcttttaaataaaaaataaaaccccaataacttttgttctaattcataagacttaatagcagagttatattattttttcatcatgttattcattcatacaataacacataattgtgtgttttttgcatgtcactagcttagttgtgaaataattcctacttcttcccctcatagaatgaaagagattcatgagtaggtaataatagcatattcttataattgaaatgatagaattattatgtgagtgcttaacctagcttaattatgcagagaaggcttgctggaggaggtggcaccagaaatgtgtat

SEQ ID NO: 69557 - DNA, 795 bp, Homo sapiens
tctggatctcctgtatatcattaaaaacaaaagctctacaaaatactggatattacagagtgactgagaaacaatttaaccacacggtcacttttcatgtgccatggcgcaggcactccgcagcattgcgattactatgaattagacaaaatccctgctgtaatggaacttacaatcaagggagtgaaagagtaaacataaataaatctaagcgaattttaggtagtgataaatacaatgaagagatcagcaccatacccatgattgtcatagctctatcagtttgctagggctgccataacaaattaccatagactgtgtgacttaaaccacagaaattgattttctcggttccggaggccagaggtcccagataaaggtgtcagcaggtcggctgcttctggggccttcctcaatatgtaggcgccactttttctccctgtgccctcacctggtcacccctctgtgcgcgagcatcccactgtctctctgggtgtccaaacttcctcttcttaggaggacacaagtcagattggattagggcccaccccaatggcctcattttaacttaatcacctcccttttgtttgggctttttaacttaatcacctctttaaagaccttatctccaactaaggtttcattctgaggtatactggaggttaagactttaaaacacgaatttggaggggacgtaattcagcccataacaataacaataatgacatcttacaacttactgccaccaccaagcttgcctggccaccattccctcttgcctgcaccactgcaata

SEQ ID NO: 69558 - DNA, 949 bp, Homo sapiens
gagttggtgaagagatcaggaagagatttcttcgagactaaggatggatgacccttagcaacagtgaccgtctcctcccggcatagcaagatggcctgccctcaggtacaggaagaaggaatggaatcggaaggaagaaaattcattccagagacaaaatagctcccctcctctgttgtagctgttcctctggcaatacaaactttctgctttcaggttctgcagcattccagaccttgagcactgaatcaggatgggaaaaagacgttgtgttcctccactcgagcccaagttggcagcaggctgttgtggggtcaagaagcccaaattatctggaagtggaacgcacagtcacgggaatcagtccacaactgtccccggctctagttcaggacctcttcaaaaccaccagcatgtggacagcagcagtggacgggagaatgtgtcagacttaactctgggacctggaaactctcccatcacacgaatgaatcccgcatcgggagcgctgagccctcttccccggcctaatggaactgccaacaccactaagaatctggtggtgactgcagagatgtgctgctactgcttcgacgtactctactgtcacctctatggcttcccacagccacgacttcctagattcaccaatgacccctatccggatctttgtgacgtggaaggacagggaggggacaagacgagatacgaggactgggaaatggggagaacaaatcacaaagaacgatagaaatatctgacatacaacggaacacacggggaaataaacgggataaaacaaaaggaagcttaaaaagacaaagagcgaattaaccccacacactgacaccgaaagaggcaggcagcctaaaaacaaaacagagacataacaaacccataaccatagaaacatatagaaggaaagcacaaaagaaaacaagaacctggg

SEQ ID NO: 69559 - DNA, 1394 bp, Homo sapiens
gagttggtgaagagatcaggaagagatttcttcgagactaaggatggatgacccttagcaacagtgaccgtctcctcccggcatagcaagatggcctgccctcaggtccctgcctctggcgtgctgtccagtaattcttcagttctgtctttgcagaggattgggaaatttatttgtgttctgaaaccggcggagagcttttaaatggtctcttctggcctgagagcaacttttgctctgcatctgtggtggggaagttttaatgtgcgtctcatgctcgagttcaataaataaaacctttgattctcagtgtcctcccttcttgctgatgacgctaaggatgagatgattcagggcatgggacttcacggctgcctcagatttagagtttgcaaggttttgaaataaggagagcctgttctctagctatttgctgtgccccccacccccccgaaattgctctgtcgagttgtgatttttcagaaaccgtatctatcttacctctgcactacctgggtgtttgttcactgcacctgcatttccgtcttaggtacaggaagaaggaatggaatcggaaggaagaaaattcattccagagacaaaatagctcccctcctctgttgtagctgttcctctggcaatacaaactttctgctttcaggttctgcagcattccagaccttgagcactgaatcaggatgggaaaaagacgttgtgttcctccactcgagcccaagttggcagcaggctgttgtggggtcaagaagcccaaattatctggaagtggaacgcacagtcacgggaatcagtccacaactgtccccggctctagttcaggacctcttcaaaaccaccagcatgtggacagcagcagtggacgggagaatgtgtcagacttaactctgggacctggaaactctcccatcacacgaatgaatcccgcatcgggagcgctgagccctcttccccggcctaatggaactgccaacaccactaagaatctggtggtgactgcagagatgtgctgctactgcttcgacgtactctactgtcacctctatggcttcccacagccacgacttcctagattcaccaatgacccctatccggatctttgtgacgtggaaggacagggaggggacaagacgagatacgaggactgggaaatggggagaacaaatcacaaagaacgatagaaatatctgacatacaacggaacacacggggaaataaacgggataaaacaaaaggaagcttaaaaagacaaagagcgaattaaccccacacactgacaccgaaagaggcaggcagcctaaaaacaaaacagagacataacaaacccataaccatagaaacatatagaaggaaagcacaaaagaaaacaagaacctggg

SEQ ID NO: 69560 - DNA, 794 bp, Homo sapiens
ttttttcctctccttttaactaaccagtcaaattaatgcttaacttctcattttggttagggttctgcagcattccagaccttgagcactgaatcaggatgggaaaaagacgttgtgttcctccactcgagcccaagttggcagcaggctgttgtggggtcaagaagcccaaattatctggaagtggaacgcacagtcacgggaatcagtccacaactgtccccggctctagttcaggacctcttcaaaaccaccagcatgtggacagcagcagtggacgggagaatgtgtcagacttaactctgggacctggaaactctcccatcacacgaatgaatcccgcatcgggagcgctgagccctcttccccggcctaatggaactgccaacaccactaagaatctggtggtgactgcagagatgtgctgctactgcttcgacgtactctactgtcacctctatggcttcccacagccacgacttcctagattcaccaatgacccctatccggatctttgtgacgtggaaggacagggaggggacaagacgagatacgaggactgggaaatggggagaacaaatcacaaagaacgatagaaatatctgacatacaacggaacacacggggaaataaacgggataaaacaaaaggaagcttaaaaagacaaagagcgaattaaccccacacactgacaccgaaagaggcaggcagcctaaaaacaaaacagagacataacaaacccataaccatagaaacatatagaaggaaagcacaaaagaaaacaagaacctggg

SEQ ID NO: 69561 - DNA, 990 bp, Homo sapiens
gagttggtgaagagatcaggaagagatttcttcgagactaaggatggatgacccttagcaacagtgaccgtctcctcccggcatagcaagatggcctgccctcaggtccctgcctctggcgtgctgtccagtaattcttcagttctgtctttgcagaggattgggaaatttatttgtgttctgaaaccggcggagagcttttaaatggtctcttctggcctgagagcaacttttgctctgcatctgtggtggggaagttttaatgtgcgtctcatgctcgagttcaataaataaaacctttgattctcagtgtcctcccttcttgctgatgacgctaaggatgagatgattcagggcatgggacttcacggctgcctcagatttagagtttgcaaggttttgaaataaggagagcctgttctctagctatttgctgtgccccccacccccccgaaattgctctgtcgagttgtgatttttcagaaaccgtatctatcttacctctgcactacctgggtgtttgttcactgcacctgcatttccgtcttaggtacaggaagaaggaatggaatcggaaggaagaaaattcattccagagacaaaatagctcccctcctctgttgtagctgttcctctggcaatacaaactttctgctttcagtgagtattatcttgggcatatttagagtagagcatcgttgtagtttttgattttaggcatgtgctaggattttgggatgtaggtgtgttttcatttgtatttttctacttccatgagggggtcctaatgttgatgaagtttttccgcttgttcccttttaaaataatttaaatatgcaaaggcaagtttgtttttcatactcccattagagtgagctaggtggtggcgtggcatgatctttcctttatatttctagtttgtaaggtctggctcctcacccttcccaaatgagtttctcaatacaaccaaagaggttgtcttaagtttta

SEQ ID NO: 69562 - DNA, 1105 bp, Homo sapiens
aatatattcttcattatttagttttgtgattgtggttagttttcatttttcttaagtatctgctagtagcatctgtaattaagtgaagtgacctgttaaccattttcctctttctcctcctttcctcctccttgaaacatatcagagcatgtttgaaattctttggcttttatggtatgcatttgctgatatgcattgaccagttaccttactcacagatacttcttaggcacttgattgtgccagggccttggctagatgataagaatacagtagtgaacttaacagtttccctgccctggtgaagcgtatggtcttgtaggtgagatagatatcagataatcatgtgaataaatgtacaattccagctgtgatacatgctgaggaggaggtttttggtgatccaagagctgatcatgcagagataggactgagaaaggagggtgggacgttgtcacagctgataatgcagagataggactgagaaaggagggtgggacatcaggaaggtcagagaattccttatgaaagtgatgcttgagtcaaaatatgatggatgaagagagtttaaatagattacatagaatttttaataatgtcgattggttatatactgggcactgatagctgatttttctttggggaaaggtatgtcagcctagtcattcagattcctttatttttttaaatgttttttcattttttgctttgcattgcattcatttgctgaagagctggcttgtactttggcaggtgtcatacttggttattctccttaggatattggcccaacaatctgggagttgtgaaaggcgcttcgcttttcagacctgggcgtctgtatcatgactatcataaatttaggattaagacacctagcctcctaccaggatgaatgaggtgtccatgtgacctgctgtgccctggaattttatacatctttctctcatagcacacaccatattacaatataatcctgcctcatctaagccaaactttcgagagaatcatttacactcagtggctacttcagctcccattcacttatcaacctgctgcaatttttcacagcccccaaaggactgcagtctgtgccttcagggag

SEQ ID NO: 69563 - DNA, 793 bp, Homo sapiens
cctacatcctgaacctggagagtaccccacctcagaggcctgggcacatcggaccccagcgtggctccctgaagcccatgagattgggctgcccaagtgtggagaagccaggggagcccagggctgtggtgtatgaggccccaggctttcagggccgcagctgggaagtgagccgagacatctacaaccttcagcagccagaggacagccagagcccccacctggcctctgtggggtccctgagagttctcggaggctgctgggtgggctacgagaaggagggcttccggggccaccagtatctgctggaggagggggaatacccagactggtcacactggggaggctatgacgagttgctgacctccctccgggtcatccggacggacttcggggacccggccgtcgtgctatttgaggccatggacttcgaggggcacggcgtggaggtgagcaaggcattgccggatgtggagctggtgcaacacggccccagcacacaggccatccacgtgctcagcggcgtgtgggtggcctaccaggaggtgggcttctccggggaacagtacgtgctggagaagggcgtgtatcgtaactgcgaggactggggcgctggcaacagcaccctcgcctcgctgcagccggtcctacaggtgcgtgccggccgcggggggcggggcctccccggtggcgggacctggagttcgggtgcgccccgcccccacgcagaggtagcgggctggaggacctgcctgggcgcttggggcggggccttagaagggggcggggccga

SEQ ID NO: 69564 - DNA, 341 bp, Homo sapiens
cctgtatgaatgataatctagcaaaacaaaaaaatagagcattctcatagttgtattaaagttattgggtgatactcctattatttggtgataaaaattaaataccttttatggctagagtgaatattcccaccaatgttaccaatctgatacacaaaaataaatagtagggtttaagtaataagggaaagatcaacttttccttaagataccatttaatgtacataattattaaaacctataattttcaaatcaatgaaattgaggaaaactagaaattttggatagttttttagcgcatgctacttaaattttacgtttttttccttctaggtgctaaa

SEQ ID NO: 69565 - DNA, 6386 bp, Homo sapiens
  misc_feature (2059)..(2059): n is a, c, g, or t
  misc_feature (2443)..(2443): n is a, c, g, or t
  misc_feature (3518)..(3518): n is a, c, g, or t
  misc_feature (5196)..(5196): n is a, c, g, or t
  misc_feature (5235)..(5235): n is a, c, g, or t
  misc_feature (5237)..(5237): n is a, c, g, or t
  misc_feature (6208)..(6208): n is a, c, g, or t
gttttaccttacggtcgctgggaatctaagcaacaaagactagaagcctccgatatgccattatcaacacacaagagacaaacagcccgaggaagcactcaatgatgagagcagtagacctgccctggcagatgagagaggagaaactctccacaatgaaggaaaagcactgacagtatttgatagctttagtcaaactgtgcttgagtttggcttagatttatgccagtggaacctgtccttaccaaattcagagatgacccaagattctactctgtggtatgagggaaagacctctcgatatttatctcacaccaacggctttatcgtaggagcgtcttcgcctcccccgtttccagtagaaaagacagctttgctcctttgaaagcgcagaccgccgcacctccagccccttctccccggggaagtaggccccgctaagaatgtgggaaggtggtggggcggcgactgaagtcgcttccgattggcgttgtcccaaggaagcctgcgcggattgatcggcggcaggcctccaatagagcctgctaggcggattggctgctacgcggctgggccctgtttccggtacctaggcgggcagccatggtgaccggcgagcggcatgcgacgccgcctctgtggcctgtggaggcccgcttggcggcgctgcttcccgacctactggtctttcggaagcctcggggatgggaacccgagctcgccacggcccagggcgtcctcctaggcgtccatgtgacgggtgagggcgacggccggcacttgcacttaagtctcctggcctgcgggagaggcggccgttgggtctaagcccctggaggcctcgacggttacaggcctagcctcccgcgagctaaggcacagtttaacttcgtgctgcggcttccttaggaaactttgagtatcttcgttttagcgtgggaggacatcttttgggatgaaccggctcagtccttgagctcaccccaaagatgatgaaattgaaactcagaggaaaggatttttacaggaccacgccccgggctttgaacccgtttttcccaaccccgagcattttctattaagcgttctgtttcaattattttattcgttcagttaattcgttcttggcgtcataagtatatgcccgccgttgttctggccgtagctatctagcagccactccgcgagtcgttcatttaacaaatacttactctgtgtcagggatatgaagatgggtaataccaggtgcctgtcctcactgtgtgagtggttctctagccagacatgaggagggatcctattgtttcccatagctaggcagcctaagagagtaggggaaagagctggctccagatgaaaagggcaccatctccagctcttggaagcagagagggtggtcctttggattcccagtggcagcagcaaccaacctggcccttagtagtttctaagttacaccatgttaatggataaaggaattactcagcttgaagggatctgtttcctttacactggcctgatgtgtggggagaaaggggccaaaaagtttaggatttggagttaacatcgtaatttctgctttgttggtcagggtttacagcattaatggacaggttcaccctgacctacaagtcggaacgtgacatggacaaactggcccatatcttcagttattacattagtgacatcgtggagcgtgagtgatcattgtagggtaacaaggtgtggtgctgggctcctgggggtttataaaagaagggggccagaagtactttaaaacaggtaccaaagggtcattcctttagcatcattcatctttggtttcttcaagttgccactgaaaagctagacctttgcctattatctgctaatctacccagtctcacattctattgactcattgttcaaagggggggcaggaggagctaatttcctttgcacatttgtattttatttcaaaataaagtattctcttctaacaataacgtatctcaagtgtgtattcagacaaaatttataaaacatctttttattattatattttgatcctgtgaggaangaataggtgttttcttattttctgccatgtattaagcttttagatatttgccagatatccagtatctggaaaaaactcatttatgtagtacccatgttttgagtacctaccctgtgacatggactgtaataggtgcaggcagggcaagaacccactcttgaactttttagttaggcctacccaacagaaattactctgaccttataccttttagtacttacgtaacattctcatcctttactgacagtgccctgtatgcttccgtccatcattctgagattcaccagaataattactttgaggcatctccgttaagaatttgattatttgacttacctcttatccttaaggaacacatggaaggtcgtttgctttttcttatangtttggatgaaggggaagataaacattctatatcgtgtatgtactctaataccagcaacttctgggtactagaactacaggggaaagtaagacagagtaccctcgtggagtttccattttagtgggacagacaataaacacaataattgtagcttatatattctatcaaggaaataaacatagtatagtggtaaaaaaaaaacacaaaaaataattttagggtaggggagtatatgagacagggtggtcataggctcctctgaggaggtattatttaagctgacacttgaaggatgaggggaacagcttgtgaagaactaggggtaaagcatttcagacagaataccaagtgcaaaggtcctgagacaggagaaagctcggcatgctctaggagctaaaagaaggccagtgcaggccaaaacgtagctcgcagggtgaagagtggtttgaggcaaggttgggggatggtagctatgagaccaccacgctctgtagtccatagtgaagagttggaattatatatttctgtataaaggaaaactgtggaaaggtctagcaggggagtaatatgatctgattaacactttaaagctgattttggctaccttgtggagattgaatgctggtggaaagtgaatttaagaatagaagctggaagaggcaattgtcctggaaagatgttggagatttggtctagagcagtggttctcaacctcagctgtggttgcctgaggagctttttaattgttttttcttttttcttttttttttttgtaagagactggggtctcagtatgttgccaagtttgtcttgaactctagagcttaaaagattcttctgcctcaacctctcaaatagctaggactgcaggtaccataccaccttgtctaacaaaaaatcttaatgcctaagcttcaccccaggccatttaaatcggactttcttaaggttggcccaggaataagaccttttaaagtttcataggcaattccaatgtgcggtcaagactgaagattgttggtgtagaggtatggcaggggagctgtgtggggtagattaacctgaaatatattntgcaggttcaacagacaggagttgctaatacgttgaatttcagtgggaagtggtgagaaaaaggactcagttttttggctttcataaatgaattgatcgtgtcatttaccaagacaggaaagactgaacattgagaaagaaaatcaagagttctgttttgagtatgttgagtttgagatgccaataagtcattcaagtggagaatgactccattcaagtggagaatccagctatgattgagcctggagctcagagaagagatccctgttagagatgaaaatgtgagttgatggcataaagtgggacttaaagttaagaaccgattgagttcatgttgggagagcataaataaagagaaagagcctttggctgaggcttgaggaactccaggggaggattatgataagggagaaagaacctgaaaaagagactacaaacagccagtgaggtaggatattgtggtgttcctgaagccaaaggagaggtagtgtctctagaagaaagctgcagctagctgggttgaaaatgacagctgtcaagtacagtgaggtcagagaggtattgaatttagcaagattaatgctgttgatgaccttgataatttgaagtggtggaggtagaagtcagagtggagtaagctgagaaaaagaatgacagagaaaacatttaagaggaagagtaaatgggagatgaggaaaatatatatagccaacttttttgagatttgggggttttgtttgttgtgaatgtagcaggaaaaaaaatggagctaataggcagaagataaggtagaaccaagaatatgtgggttatttttgtgtgttttggttttgttttttaagctattgatgagaatatttcagtagagagattaggaacggtgtgaagttcttgagaaggtaaaaggggataagattcctatcacaaatggggtggctttgaagagagcaggaattcttccattttagaaacgatgtatgtaggtgcagatagatttggggagaaaatgaaaagaaggaagaaggagcctgagtcttggagtgagcaaatggacaagaatgatgtcaggataaactcagtaggccattcttttgaccatatatgattctgccctgatctggtttatatctgattttgactcattttcctctctcttccttacttgatttcagatgttctctgttttggaggggatatcctaaatatcacaggtatttttttagtttttctgaatacttaaaagactgagtgaggaggactatatttaggtggaattcagcatattggtttattcagcattgtttgattaataggtactggaccctggggatacaaagatgaggaagacatagtctgtgcctcaaaggatcccccagtctaatggaaaagctttgcccaaattaaactctcacatgctttgcatttttgtttagattgaaggacagcaaaataagtgccaataaagcgttcttgagaaaactaatgagaaatttggtcattaatagcagaagctaagcatgagatggggaggagttaagcatgtcctatctggagaactcaggatcactaacagctgtatgccccggagttggcctgtcttcttatttaaacataataaaaccagccatcaaattagatatgaacttgaacccacattttatgaatcttttgctagtanctctcctcctctgttagtatactggtggaaggaagattncnaaaaatatccttaggatcatttaaacttctacctagttacgtttttactgaatgattttgaggatctgaagcagtattttaacctagcataatgtatacagccaagaaaccttgcctgataacttacttgatatccacactgggtcaagttgatcttctgcattactgggactttgccctggaccaagtaagtctagatatttggtccccatcagcctatcctgtgtgtctgcagggaacatgctcctggcactctggagagtagaacaaaatcaactgagtgacatcattaccttggtggcaaaatgcagtctggagatacaggagaaatttgggatctatcataccagggaaggccaggacctgcagttaaagataggtagtacctcctaaaagagtgatccagttgggcaagggggaacccactataaaaacctcaaaagataaatgataaactgggaaaaaatgtttgcaattcatatagacaaagggtgaattgctctactagggaaagagcacttagaaatcaagaaaacaatagtactcttaagagaaaaattggacaaaggacatgagtaaattgtatatagacaaggaaatgcatgtcttttaacacgtaaaaagatgatcaacattcataataagaaaaatgccaattggaagtacactgactacctgtcttacctatagataggcaaaacttcagatgctgacaatgtactctttggtgagtctgaggaatgagctttttcttactgtgagtgaacaacggtataaggtgatttggcaatctttatttatttttattgtctattgtattttttatgtcaacaaaaactaaaccatataaaaatatatattaaaaagtcttgttttcacttatataccatctatactatttactcttacaagtgcatttattccttaacctagcaatccttctggacatctataggtatacgttcacacanctgaaatgttgcatgtgcaaggttattgattgtaatatggtttgtaattttaaaacattgaaaactatttataggagactggttaagtaaataatatgtatacttaataagattacctgcaacttaaaaaaaataagatgtcttgatatggcagtatctccaagatacagttaagtga

SEQ ID NO: 69566 - DNA, 292 bp, Homo sapiens
ataggtaggctattagtagttaagtttttggggagtcaagttatactcggattttcaactgcacagggagtcggtgcctctcagccatgcattgcttgagtcaactgcatatatctggaatataatcattttaatgtgtaatcaatataaaaaagttttgagatattctacacttcttaaattccagtgtgtactttatacttagagcattagccatatttcaagtggtcaacagccacatgtggctagtggctactatactgaacagggtggtagcataaactacgatatt

SEQ ID NO: 69567 - DNA, 939 bp, Homo sapiens
gttagatggtagaaatggtaacaaatatggcaagagttcctattatctagaaacatggcagtatagtggcacctcaatctcaaataatatggcctgctgcaggagctaaacataaggatttgtggacactattcatggctcttaatgagatcaaaatttggaaaagaataaaaaagcatctagaaagacactctacaaacttgtctttggatattgcaaaattaaaagaacaaatatttaaagcatcccaggcacacctgaccttaatgcaaggaactggagtgcttgaaggagctgcagacaaattagcagctagtaacccattaaaatggataaaaacactggaagctctgtaatttcaatgataattgtgtttttaatctgtgttttttgtctttatatagtctgcagatatggatcccaattcctgtgagaagtagctcaccatgataaggtcacctttgcttttatcatcttgcaaaaacaaaaggggggaacatgttgcgaacaggtccctaaatctggccataaactggccccaaaactggccataaacaaaacctctgcagcactgtgacatgttcatgatggccatgatgcccacgctgaaggttgttggtttattggaacgagggcaaggaacacctggcccacccatggcgggcagaaaactgcttaaacacattcctaaaccacatacaatagcatgagtgttctatgccttaaggacatgttcctgctgcagaaaactagccaaagcccatccatttgtttcagcccatccttttgtttctcctaaggaatacttttagttaatccatactctatagaaaaaagccttcttactagcttgttgtcaataaatatttgggtaaatctctgtttgtggcttccagctccaaaagctgtcaggccactgatttcccactccacactata

SEQ ID NO: 69568 - DNA, 688 bp, Homo sapiens
gtgtgactgaagaggagctcacagttcccagcgtctgctcccacggtgtccagcgcccagaatgcggcttctggtcctgctatggggttgcctgctgctcccaggttatgaagccctggagggcccagaggaaatcagcgggttcgaaggggacactgtgtccctgcagtgcacctacagggaagagctgagggaccaccggaagtactggtgcaggaagggtgggatcctcttctctcgctgctctggcaccatctatgcagaagaagaaggccaggagacaatgaagggcagggtgtccatccgtgacagccgccaggagctctcgctcattgtgaccctgtggaacctcaccctgcaagacgctggggagtactggtgtggggtcgaaaaacggggccccgatgagtctttactgatctctctgttcgtctttccagcttctcctgggctctacccggcagccaccacagccaagcaggggaagacaggggctgaggcccctccattgccagggacttcccagtacgggcacgaaaggacttctcagtacacaggaacctctcctcacccagcgacctctcctcctgcagggagctcccgcccccccatgcagctggactccacctcagcagaggacaccagtccagctctcagcagtggcagctctaagcccaggtgagcccca

SEQ ID NO: 69569 - DNA, 790 bp, Homo sapiens
gtgtgactgaagaggagctcacagttcccagcgtctgctcccacggtgtccagcgcccagaatgcggcttctggtcctgctatggggttgcctgctgctcccaggttatgaagccctggagggcccagaggaaatcagcgggttcgaaggggacactgtgtccctgcagtgcacctacagggaagagctgagggaccaccggaagtactggtgcaggaagggtgggatcctcttctctcgctgctctggcaccatctatgcagaagaagaaggccaggagacaatgaagggcagggtgtccatccgtgacagccgccaggagctctcgctcattgtgaccctgtggaacctcaccctgcaagacgctggggagtactggtgtggggtcgaaaaacggggccccgatgagtctttactgatctctctgttcgtctttccaggaccctgctgtcctccctccccttctcccaccttccagcctctggctacaacacgcctgcagcccaaggcaaaagctcagcaaacccagcccccaggattgacttctcctgggctctacccggcagccaccacagccaagcaggggaagacaggggctgaggcccctccattgccagggacttcccagtacgggcacgaaaggacttctcagtacacaggaacctctcctcacccagcgacctctcctcctgcagggagctcccgcccccccatgcagctggactccacctcagcagaggacaccagtccagctctcagcagtggcagctctaagcccaggtgagcccca

SEQ ID NO: 69570 - DNA, 2254 bp, Homo sapiens
  misc_feature (1)..(1): n is a, c, g, or t
ngcttgaacccgggaggcagaggttgcagtgagctgagatcacaccactgcactccagcctgggcaacagaatgagactctgtctcaaaaaaaaaagaaaaagaaaagaaaatgagaaacgaaaccaagaccaaatggacctgcagtccttttataacctaatttcagaagttacattctatcactatctcactgtattctttttattagaaatgagtcactaagtctgggtcacacttaagtggaaggtaattaattaaacttcacctcttaaggggagctgtgtcaaagaatttggagacatatctacatagactacatccatctacatggactacaacaatgtcttttttcaaatgttaccttcccaatagagtttaccctgactactcatttaaagttgtaagctccatttgtcccccctgcaccttagcactcccatttcatcttaccatcctctactttttattttttctatagcacctagtttccaacatattgccataaaatttacttattttattatacttactgtttatggtctatctcctgtctgttagaatgtaagctcaacaaggacaaagatgtatgttttgtgcactggtctagcccaagtgcctagaacagtgcctccacacatagtaggcactctataagtgtttgttgaatagaagaagaaatcatatcttcccactcttttttattttcctcctcttatgaataggccagcaaataatcacctattggtagccttagacataggcagccttacatgtaaatagatgagtagcctatattcccattctaccacctgccttatttgtttgacatttatgttttctgaaaggcagtcccaacttcgggatgaagtgtatataaaccttgaatcttttattattgagaaatcccagaacctctctttttttagagccagttaagagactaacacctcaaaagtcaaaagaataagtacctaacaaaatcctggaaagaaaattagtcttagagtcacaagggctccacttccacagttagaagggctacccttttaccatgtacctgttgttcaatatgtagagaaagccataggattcagggtggtttttttttagtgtccatgtgggcatcgtaaaaaaggataagtctagatgcatgagaatatgctccctcctattatgtgtgtcagttctccgacctagaaaaacttgcagttaattcatcctttcggtattcggtcaggtgcatgcgggctgaatgaggttctgtgagcatataaggtatgataatattgccatcaaagagcttatagtgcttagtgaatgataataagggccatagtagtggagtgattagaaaaagctttctataaatggcaggacgtgaactgggctttgatttaggctttgattgaaaactatgtggaagacattttaggtgggaagcacttgggcaaaggatggaaaataagaataagaatggatgaggattagtagaaaataaagttagcaagataataacttgaggctaaattgtgggggccttaaatgttgggctggcagattagtgttttattctgaaggtggttttcagttttttttgttttttttttttttttttttttgcctgtaacacatttatttctccatttagttcaattgttaacgactgtcattatgtgctgtgattctcaagtggggacacatctcctaggagggagatggggcacattctccttgcacttattaattactgttgcagatagtgggaagccattgaaagttttgactggagaattgacatatgaaggtgatctttaggaatattaggctcttggtcatatgcttatgtgatttgaagaatagtgatgccattgatagactaggaagatcatgggtggggtcggtttaaccgtgggcatataaaagaattgttttccttactgaaaatatgaatgtaccagtatttgagctctggaatgaaaatctccagggaggaaggtatggctgtgcatgtttctcaactatattttgttttttctgaatttcaccttctctttggggttttctcactgtgaatcctgtagtaaccaggggttaccacttctttttttttttttttttctcaagaagagctaaaaagacctctttctttattttccttttgcaaaggcttataagggcttatgttttcaaaaggaaatttattaaaaattttaaagtaattttttaaaaaaattgttaaaattttgagagag

SEQ ID NO: 69571 - DNA, 526 bp, Homo sapiens
cttagcctccccacgttgcagagaagtcagctgctagtcttcacattaactgcagactaaactgcagagtacagcttggctttccaatcacactccaccctacttccaccagcaaatgcagaaaaatagaactgacccccagggagactgggaaaggctctgtattactttccggcttaataattctctctacccccatcatttcaattcatccagcagaaaggcactcagatcaacatctctcatctccaggggaaagagtctcagaaattacaaagtaccctaaaccaatttcctatactacttttgtatagaaaaaaaaaaaattatcctggacagaggagtgcagactgggttcctgcccagttataggtaatgcaatattcctaatggaagccacggaggcagaacacacacacatacaccaagaatcctcacatttttcctgtctcatctgaatgcctaaagtgtacacttttgttgatagtcagcataagaggaataaatggcctttgtagaaatgttt

SEQ ID NO: 69572 - DNA, 5278 bp, Homo sapiens
ccaggaatggtacttttcagtgcagccaggagggctcttgggatttcctttccaaagcacaaaaatactgggacccaagaagaacagctagaggacaactctgttggcacagagacggggacagcccagtctgctgacctcacagggtcagctgggcccccctggtgcttcaccacctgcatcctcttgctcagaatgcctttgcagttgagttttctgggtttctatgattgaccttgaggtttactccttgctcttacaacatttctaaggatttttaaaagtttacttcttgtcttgttcttctaaagctttctccaggacagatattttccctgtcttaaccactggtccagtcatcccagtgggcttctctttgtctctcccagattagacctttgggtgagattggcatcacaacatctaatctgagtctgtcttttgtccttcattctgtatggcagtctccctttgttataaaagctttctaaagcatactaaagaagccttcccagagccccgtcttgcttctcttccaggtgctctatcccctcgagaccctctggtgccaggcttgcttcacggccatcttgtgttgtcactgcagagtttggaggccagttttccacagcctaaacagggaggagctgcagaatggggctctggtctctgggcattcatttccctcatagaggctgagaataaaacaaggacttattcacacatgttctagaaccccagaatggcccaagttacctgagaccagggtttctcaaccttgacaccattgacattttggactgggtaattctttgttctgcagagctgtcctttgcactgtaggagatttactaatatccctggcctctacccagtagtaccactagcacctattccccacccagcgtgtctccagatattgtcaaatatcccatcgggtgcaaaatgatccctggtcaagatctgttgcccaagatgttacaggtcacaatgaccacatttgaaattgttttccctttcattttaccctgtgaaagcatctctcctagagccttgcaagaggcaggtgacattgtgtccatatttcttcctgtttcagaacttctgtttcacaacaatttctctctcgctacaagtattctttcactcagcactggggaagttgggaacagctggtcaccatcatccctttaatcaactcacacctgtttaaagagtgtttctgatttgaccttcatcccttagtttactggcgttaaaaaaagtctcagcaattttcattatttctcgtgggtctcattatcaaacctttacttatttcggcatatttcctctgggcttcttctagtttctgccttacaagcaatgctgttctgtaaatttattgaaacctctggaacatttcacctttagagatggaggatggaaggattggtaccagaagagggctaagatacgttttctgtcttgagctgaaagcacagtctactctccttcgttttgtcgatgagaaagttgaggccagaggggaggtgacatgtttagagtcacccagctggttagtgacagaaaaagcgtgagagttgtctaggattcctgccactttggtccctggcctctcctgggggaggctgctgttcttaggtgctctaagcttaatccctcagaatgtgtggacaggtcagcttagaagagatggggagattcaggatccccctgtgccagagcacagcctcaccggatgctgcttcccacactgaagtgtcctgtccgaccattgctatctgaggcatccacaagcaggtaggaaagctggcgagccattttacttcctgaggacaattccccagccacaggctctgagtcaaatttctatttggtaagcatcctagcagcaaagtcctgcactcagaccagccaaaaaacagcccccattccaagtacttggtgtcaaaagtccccgaacgacttttaaacccaagtcttcttaaggtttcagtactgtggtggctttagcagttgtttttgtgcaactataaattatttaaatcatctgagatgacagtcaattttacaaaccaggtacatattaatttgtataattttgtatatgctctggtacactacctgaactaacgaagggtagaactaattctgtttgtcagtgttcacacctgtaacattaggaggatatgtctgcattgcttatttctttatgttggtgtttctgtggcaaagccctgcacatggcatttctgaaaagccttaaatctttaagatgttgcatgtagggtatgcagtgcaaaaggctgcctcagaactgtgagcccttttgtaagctggaagcatttctcttactactgttacttttgtaggaagttttcaattcagagctgccaaagtgttcccgtaagcagtgccttagtaataccttagtcatgccgccagccttttcttacaccaattcctaatgttcatttacgaattggcccaatattggaaacaaaacaagcaaaaattgtcttcatttttgttttgtaagcccattttttctccagttctataggaaactgactgcttggtgtaaaatccgaaactggacacaagtcagttctttcaccacactcaaatgtatataccaaaacaaaaggttgcaacttcatagtttactatgaaaagcaaattgtactttttaatgttgccttttaaattcatgaccaaatacttagctatttgtgaatcttctgcactctagcatgaaagtgcctttggtttgagattccagcttagaaaagtgctgccataataacgataatttgtagagagaccaaaaatattttgagatcaccgtaatgcctttggtttaccgggatgagtaaccaaccacaggcctctgttcacaagagcacgacgtggtccccgcctgctgctagtctgtctgccactgggggcctcccaacatccatagcacacttcagcggaaggaccccagaaactgttgtgtttgtgtgtgctgatgacctagtgtgtcatttcacctcgtcacccagccctgcgtccggatgaggggacttctgcacaaatgacagaatctcggctggtggacagatactacagctttctcctcctccttgtgttcgtgttcagtctctgtggagactttcttttccattcaaatgacagtgcgcacttatctggtttacacaatgataccattttgaaagttggaagcctcaaactgagacgacagtgcagaacaaaacaaaagtgagttagggtcgttaaaattgaagtgttcttcttagggcaaacatgttgactccgagtattgtgtatgaatgtgctacgagaaacttccaaagagcaccattcacaatttggcattttcaaagaatgttccagccctcaaaggggcaactctttaaagtccttgttggcttttatccaaaccttgtagaaattgggaaagctgatagaggtaaggaagacgagtgaaaaggacaagaaggccaaacaccagccaaaaagaaactaggaaaaaaagattttctttgctaatatagatgtaaaaataacatcagacatctttgaaaattagcctctaaactcttaatacatacgttctgtgtgtctctacctggcgtctttaagaatatcctctctgggctctgaaattttaggagtgattcttatccactccaagttgtaagtatttgtagaaatttgtgcaaacaaacaaaaactatcaaatgaaaagaaaatgtactcaacctaacttatagttagcagctggaattctcaactcttccctgccagcactataccacagtgtggaagaaattagtcaaatgcttgttttcctgcttctcttttcaactgttactgtgctttgtttgaaagtagttttctctctcaaagccgttgcttatatcgttaagaatgaaggtttgtgtttaaaatttattgcattgcaaagggtagtttcactgaagtcatgcaccattaaataagatgaaatatttgtatttattgtcctacttcctaagccgtaacttcttttcctctgtgaatttgcattgagtcactcatgctacactacatcgctttagtatttgagatggcatttatgtttcctctcgtttatcatgaaatggggtcagattccatcagattccacctctgtcaggtggactcttgtctgccttccatgatgagattttttttctccttcccctttctttaagagaggctgacagatctaggtgtcaatcaattggaaaccagtctctgattttttttcattagttattttctatcattagtttcactgtgtaaattagatatcaactgcacttctttaaaaaaaaatacatctccctattacctccttgaaagatttacttctgtaggcctttttcaataggctcatgactgcagacaaggaaaaaaaaagtaaaaacaaaaacagtatgtgcctgaaaatgacaaaaaaaaaatttgtaacatttaaaaaagaaacctgaatagcctttaattctttaataatacacttaaattttatgtaaatcggttttcgccacgtgtgtttgttcacattctaaatgacttaatgggattctcacggtctgtgtctttgtgtcacgtgtataaaatgggcttgtgatgtaagcgtttcatctggtcagtggttcctttgatattgtactgctgctgggagtgggctgtggaacctgccttcgggtaactgggttcctcttgggtagattggagagatgggggtgggcgtgggcaaattctcacacatgttttcttaacctatttgcagaaactttcaaaaggcatttgattaaacctcttggcagtacagtattcttgtatttgttaacgtctgtgtttaggtactggtacctttttgttttaaaatgttctaagtgttggctttaaagtgaatttatctttagtatgatagttatatgaaaattataggatttgtgtgcagagaatttttttataaagtgctttgtaaaaaaaaaaaaatgtattctagcttttgcggtacatatgtgtgataactttaatacccatgacagttaagtgcaattatttcatcactctaaaaatgctatttttgtgtcagttcctgcaggtgttttcatgtctttgcaaagtgacacattttgatgccttcttgataaagtggtagacattttgtagctttctagaaactttgtattcatacggtatcaatgaaaaataaagaaaatgaaagtgtgggtca

SEQ ID NO: 69573 - DNA, 5711 bp, Homo sapiens
  misc_feature (5284)..(5284): n is a, c, g, or t
ccaggaatggtacttttcagtgcagccaggagggctcttgggatttcctttccaaagcacaaaaatactgggacccaagaagaacagctagaggacaactctgttggcacagagacggggacagcccagtctgctgacctcacagggtcagctgggcccccctggtgcttcaccacctgcatcctcttgctcagaatgcctttgcagttgagttttctgggtttctatgattgaccttgaggtttactccttgctcttacaacatttctaaggatttttaaaagtttacttcttgtcttgttcttctaaagctttctccaggacagatattttccctgtcttaaccactggtccagtcatcccagtgggcttctctttgtctctcccagattagacctttgggtgagattggcatcacaacatctaatctgagtctgtcttttgtccttcattctgtatggcagtctccctttgttataaaagctttctaaagcatactaaagaagccttcccagagccccgtcttgcttctcttccaggtgctctatcccctcgagaccctctggtgccaggcttgcttcacggccatcttgtgttgtcactgcagagtttggaggccagttttccacagcctaaacagggaggagctgcagaatggggctctggtctctgggcattcatttccctcatagaggctgagaataaaacaaggacttattcacacatgttctagaaccccagaatggcccaagttacctgagaccagggtttctcaaccttgacaccattgacattttggactgggtaattctttgttctgcagagctgtcctttgcactgtaggagatttactaatatccctggcctctacccagtagtaccactagcacctattccccacccagcgtgtctccagatattgtcaaatatcccatcgggtgcaaaatgatccctggtcaagatctgttgcccaagatgttacaggtcacaatgaccacatttgaaattgttttccctttcattttaccctgtgaaagcatctctcctagagccttgcaagaggcaggtgacattgtgtccatatttcttcctgtttcagaacttctgtttcacaacaatttctctctcgctacaagtattctttcactcagcactggggaagttgggaacagctggtcaccatcatccctttaatcaactcacacctgtttaaagagtgtttctgatttgaccttcatcccttagtttactggcgttaaaaaaagtctcagcaattttcattatttctcgtgggtctcattatcaaacctttacttatttcggcatatttcctctgggcttcttctagtttctgccttacaagcaatgctgttctgtaaatttattgaaacctctggaacatttcacctttagagatggaggatggaaggattggtaccagaagagggctaagatacgttttctgtcttgagctgaaagcacagtctactctccttcgttttgtcgatgagaaagttgaggccagaggggaggtgacatgtttagagtcacccagctggttagtgacagaaaaagcgtgagagttgtctaggattcctgccactttggtccctggcctctcctgggggaggctgctgttcttaggtgctctaagcttaatccctcagaatgtgtggacaggtcagcttagaagagatggggagattcaggatccccctgtgccagagcacagcctcaccggatgctgcttcccacactgaagtgtcctgtccgaccattgctatctgaggcatccacaagcaggtaggaaagctggcgagccattttacttcctgaggacaattccccagccacaggctctgagtcaaatttctatttggtaagcatcctagcagcaaagtcctgcactcagaccagccaaaaaacagcccccattccaagtacttggtgtcaaaagtccccgaacgacttttaaacccaagtcttcttaaggtttcagtactgtggtggctttagcagttgtttttgtgcaactataaattatttaaatcatctgagatgacagtcaattttacaaaccaggtacatattaatttgtataattttgtatatgctctggtacactacctgaactaacgaagggtagaactaattctgtttgtcagtgttcacacctgtaacattaggaggatatgtctgcattgcttatttctttatgttggtgtttctgtggcaaagccctgcacatggcatttctgaaaagccttaaatctttaagatgttgcatgtagggtatgcagtgcaaaaggctgcctcagaactgtgagcccttttgtaagctggaagcatttctcttactactgttacttttgtaggaagttttcaattcagagctgccaaagtgttcccgtaagcagtgccttagtaataccttagtcatgccgccagccttttcttacaccaattcctaatgttcatttacgaattggcccaatattggaaacaaaacaagcaaaaattgtcttcatttttgttttgtaagcccattttttctccagttctataggaaactgactgcttggtgtaaaatccgaaactggacacaagtcagttctttcaccacactcaaatgtatataccaaaacaaaaggttgcaacttcatagtttactatgaaaagcaaattgtactttttaatgttgccttttaaattcatgaccaaatacttagctatttgtgaatcttctgcactctagcatgaaagtgcctttggtttgagattccagcttagaaaagtgctgccataataacgataatttgtagagagaccaaaaatattttgagatcaccgtaatgcctttggtttaccgggatgagtaaccaaccacaggcctctgttcacaagagcacgacgtggtccccgcctgctgctagtctgtctgccactgggggcctcccaacatccatagcacacttcagcggaaggaccccagaaactgttgtgtttgtgtgtgctgatgacctagtgtgtcatttcacctcgtcacccagccctgcgtccggatgaggggacttctgcacaaatgacagaatctcggctggtggacagatactacagctttctcctcctccttgtgttcgtgttcagtctctgtggagactttcttttccattcaaatgacagtgcgcacttatctggtttacacaatgataccattttgaaagttggaagcctcaaactgagacgacagtgcagaacaaaacaaaagtgagttagggtcgttaaaattgaagtgttcttcttagggcaaacatgttgactccgagtattgtgtatgaatgtgctacgagaaacttccaaagagcaccattcacaatttggcattttcaaagaatgttccagccctcaaaggggcaactctttaaagtccttgttggcttttatccaaaccttgtagaaattgggaaagctgatagaggtaaggaagacgagtgaaaaggacaagaaggccaaacaccagccaaaaagaaactaggaaaaaaagattttctttgctaatatagatgtaaaaataacatcagacatctttgaaaattagcctctaaactcttaatacatacgttctgtgtgtctctacctggcgtctttaagaatatcctctctgggctctgaaattttaggagtgattcttatccactccaagttgtaagtatttgtagaaatttgtgcaaacaaacaaaaactatcaaatgaaaagaaaatgtactcaacctaacttatagttagcagctggaattctcaactcttccctgccagcactataccacagtgtggaagaaattagtcaaatgcttgttttcctgcttctcttttcaactgttactgtgctttgtttgaaagtagttttctctctcaaagccgttgcttatatcgttaagaatgaaggtttgtgtttaaaatttattgcattgcaaagggtagtttcactgaagtcatgcaccattaaataagatgaaatatttgtatttattgtcctacttcctaagccgtaacttcttttcctctgtgaatttgcattgagtcactcatgctacactacatcgctttagtatttgagatggcatttatgtttcctctcgtttatcatgaaatggggtcagattccatcagattccacctctgtcaggtggactcttgtctgccttccatgatgagattttttttctccttcccctttctttaagagaggctgacagatctaggtgtcaatcaattggaaaccagtctctgattttttttcattagttattttctatcattagtttcactgtgtaaattagatatcaactgcacttctttaaaaaaaaatacatctccctattacctccttgaaagatttacttctgtaggcctttttcaataggctcatgactgcagacaaggaaaaaaaaagtaaaaacaaaaacagtatgtgcctgaaaatgacaaaaaaaaaatttgtaacatttaaaaaagaaacctgaatagcctttaattctttaataatacacttaaattttatgtaaatcggttttcgccacgtgtgtttgttcacattctaaatgacttaatgggattctcacggtctgtgtctttgtgtcacgtgtataaaatgggcttgtgatgtaagcgtttcatctggtcagtggttcctttgatattgtactgctgctgggagtgggctgtggaacctgccttcgggtaactgggttcctcttgggtagattggagagatgggggtgggcgtgggcaaattctcacacatgttttcttaacctatttgcagaaactttcaaaaggcatttgattaaacctcttggcagtacagtattcttgtatttgttaacgtctgtgtttaggtactggtacctttttgttttaaaatgttctaagtgttggctttaaagtgaatttatctttagtatgatagttatatgaaaattataggatttgtgtgcagagaatttttttataaagtgctttgtaaaaaaaaaaaaatgtattctagcttttgcggtacatatgtgtgataactttaatacccatgacagttaagtgcaattatttcatcactctaaaaatgctatttttgtgtcagttcctgcaggtgttttcatgtctttgcaaagtgacacattttgatgccttcttgataaagtggtagacattttgtagctttctagaaactttgtattcatacggtatcaatgaaaaataaagaaaatgaaagtgtgggtcaaaaaanaaaacaaaccaaaaaaagaaaaaaaaaaaaacaagaaaaaaagaacaacaaaaacacacaacaaccccctatttatcaaaaaaagaaaaacacaaagcaaaaaaagagtgtggtgtggcggggcgcggcgcgcgcgccccgggggagagggttgtagtagccacaacccgtgggaggcggcgcggcgccgccacagagagggtagaaaacaaagagcgagcaactgggcccaacagaagaagacgcggcgtggcgacaacagaaacaaggagggtgggagaccactcacccaaaagaaaaagacacgcgccgggcggggaaccaccgcggcttggtgaaaacaccaaccgccaggggcgggactcatgaagacccaccgggggggatcccacaagggggggcccccagagggcgctatataaaagcg

SEQ ID NO: 69574 - DNA, 2137 bp, Homo sapiens
gaggatcccggtcatttgctacactttccattcaaatgacagtgcgcacttatctggtttacacaatgataccattttgaaagttggaagcctcaaactgagacgacagtgcagaacaaaacaaaagtgagttagggtcgttaaaattgaagtgttcttcttagggcaaacatgttgactccgagtattgtgtatgaatgtgctacgagaaacttccaaagagcaccattcacaatttggcattttcaaagaatgttccagccctcaaaggggcaactctttaaagtccttgttggcttttatccaaaccttgtagaaattgggaaagctgatagaggtaaggaagacgagtgaaaaggacaagaaggccaaacaccagccaaaaagaaactaggaaaaaaagattttctttgctaatatagatgtaaaaataacatcagacatctttgaaaattagcctctaaactcttaatacatacgttctgtgtgtctctacctggcgtctttaagaatatcctctctgggctctgaaattttaggagtgattcttatccactccaagttgtaagtatttgtagaaatttgtgcaaacaaacaaaaactatcaaatgaaaagaaaatgtactcaacctaacttatagttagcagctggaattctcaactcttccctgccagcactataccacagtgtggaagaaattagtcaaatgcttgttttcctgcttctcttttcaactgttactgtgctttgtttgaaagtagttttctctctcaaagccgttgcttatatcgttaagaatgaaggtttgtgtttaaaatttattgcattgcaaagggtagtttcactgaagtcatgcaccattaaataagatgaaatatttgtatttattgtcctacttcctaagccgtaacttcttttcctctgtgaatttgcattgagtcactcatgctacactacatcgctttagtatttgagatggcatttatgtttcctctcgtttatcatgaaatggggtcagattccatcagattccacctctgtcaggtggactcttgtctgccttccatgatgagattttttttctccttcccctttctttaagagaggctgacagatctaggtgtcaatcaattggaaaccagtctctgattttttttcattagttattttctatcattagtttcactgtgtaaattagatatcaactgcacttctttaaaaaaaaatacatctccctattacctccttgaaagatttacttctgtaggcctttttcaataggctcatgactgcagacaaggaaaaaaaaagtaaaaacaaaaacagtatgtgcctgaaaatgacaaaaaaaaaatttgtaacatttaaaaaagaaacctgaatagcctttaattctttaataatacacttaaattttatgtaaatcggttttcgccacgtgtgtttgttcacattctaaatgacttaatgggattctcacggtctgtgtctttgtgtcacgtgtataaaatgggcttgtgatgtaagcgtttcatctggtcagtggttcctttgatattgtactgctgctgggagtgggctgtggaacctgccttcgggtaactgggttcctcttgggtagattggagagatgggggtgggcgtgggcaaattctcacacatgttttcttaacctatttgcagaaactttcaaaaggcatttgattaaacctcttggcagtacagtattcttgtatttgttaacgtctgtgtttaggtactggtacctttttgttttaaaatgttctaagtgttggctttaaagtgaatttatctttagtatgatagttatatgaaaattataggatttgtgtgcagagaatttttttataaagtgctttgtaaaaaaaaaaaaatgtattctagcttttgcggtacatatgtgtgataactttaatacccatgacagttaagtgcaattatttcatcactctaaaaatgctatttttgtgtcagttcctgcaggtgttttcatgtctttgcaaagtgacacattttgatgccttcttgataaagtggtagacattttgtagctttctagaaactttgtattcatacggtatcaatgaaaaataaagaaaatgaaagtgtgggtca
